(19) United States
(12) Patent Application Publication
(10) Pub. No.: US 2025/0304934 A1
(43) Pub. Date: Oct. 2, 2025

(54) REPROGRAMMABLE FANZOR POLYNUCLEOTIDES AND USES THEREOF

(71) Applicants: The Broad Institute, Inc., Cambridge, MA (US); Massachusetts Institute of Technology, Cambridge, MA (US)

(72) Inventors: Feng Zhang, Cambridge, MA (US); Han Altae-Tran, Cambridge, MA (US); Soumya Kannan, Cambridge, MA (US); Guilhem Faure, Cambridge, MA (US); Makoto Saito, Cambridge, MA (US); Peiyu Xu, Cambridge, MA (US)

(21) Appl. No.: 18/719,352

(22) PCT Filed: Dec. 14, 2022
(86) PCT No.: PCT/US2022/081593

§ 371 Date: Jun. 13, 2024

Related U.S. Application Data
(60) Provisional application No. 63/289,598, filed on Dec. 14, 2021.
(60) Provisional application No. 63/402,040, filed on Aug. 29, 2022.
(60) Provisional application No. 63/415,210, filed on Oct. 11, 2022.

(51) Int. Cl. C12N 9/22; C12N 15/113

(52) U.S. Cl. CPC C12N 9/226; C12N 15/113

(57) ABSTRACT

Systems, methods and composition for targeting polynucleotides are detailed herein. In particular, engineered DNA-targeting systems comprising novel Fanzor polypeptides and a reprogrammable targeting nucleic acid component and methods and application of use are provided.

### CROSS-REFERENCE TO RELATED APPLICATIONS

[0001] This application claims the benefit of and priority to U.S. Provisional Patent Application No. 63/289,598, filed on Dec. 14, 2021, U.S. Provisional Patent Application No. 63/402,040, filed Aug. 29, 2022, and U.S. Provisional Patent Application No. 63/415,210, filed Oct. 11, 2022, the contents of which are incorporated by reference in their entireties herein.

### SEQUENCE LISTING

[0002] This application contains a sequence listing filed in electronic form as an xml file entitled BROD-5500US_ST26.xml with size 6,620,445 bytes created on Apr. 28, 2025. The content of the sequence listing is incorporated herein in its entirety.

### TECHNICAL FIELD

[0003] The subject matter disclosed herein is generally directed to Fanzor polypeptide compositions, systems, and methods for targeted polynucleotide modification, particularly gene modification and editing.

### BACKGROUND

[0004] While there are genome-editing techniques available for producing targeted genome perturbations, there still remains a need for new genome engineering technologies that employ innovative strategies and molecular mechanisms that are affordable, easy to set up, scalable, and amenable to targeting multiple positions within a genome or other polynucleotide. Additional desirable tools in genome and polynucleotide engineering and biotechnology would further advance the art.

[0005] Citation or identification of any document in this application is not an admission that such a document is available as prior art to the present invention.

### SUMMARY

[0006] Described in certain example embodiments herein are non-naturally occurring, engineered compositions comprising a) a Fanzor polypeptide comprising a Ruv-C nuclease domain, the Ruv-C nuclease domain optionally comprising Ruv-CI, Ruv-CII, and Ruv-CIII subdomains, and b) an wRNA component molecule comprising a scaffold and a reprogrammable spacer sequence, oRNA component molecule capable of forming a complex with the Fanzor polypeptide and directing the Fanzor polypeptide to a target polynucleotide. In certain example embodiments, the Fanzor polypeptide further comprises a REC domain, a bridge helix domain, or both. In some embodiments, the Fanzor polypeptide comprises a non-native REC domain.

[0007] In certain example embodiments, the Fanzor polypeptide comprises about 10 to about 50 amino acids.

[0008] In certain example embodiments, the reprogrammable spacer sequence comprises a spacer of 10 nucleotides to 30 nucleotides in length.

[0009] In certain example embodiments, oRNA component molecule comprises a scaffold of about 20 to 200 nucleotides in length.

[0010] In certain example embodiments, the Fanzor complex binds a target adjacent motif (TAM) sequence 5′ and/or 3′ of the target polynucleotide.

[0011] In certain example embodiments, target polynucleotide is DNA.

[0012] In certain example embodiments, the composition further comprises a homologous recombination donor template comprising a donor sequence for insertion into a target polynucleotide.

[0013] In certain example embodiments, the composition further comprises a functional domain associated with the Fanzor protein.

[0014] In certain example embodiments, functional domain is a transposase, an integrase, a nucleobase deaminase, a reverse transcriptase, a recombinase, an integrase, a topoisomerase, a retrotransposon, phosphatase, polymerase, ligase, a ligase, a helitron, a helicase, a methylase, a demethylase, a translation activator, a translation repressor, a transcription activator, a transcription repressor, a transcription release factor, a chromatin modifier, a histone modifier, an acetylase, a deacetylase, a reverse transcriptase, a nuclease.

[0015] In certain example embodiments, the Fanzor polypeptide is operatively coupled to one or more nuclear localization signal polypeptides at the C-terminus, the N-terminus, or both of the Fanzor polypeptide.

[0016] In certain example embodiments, the Fanzor polypeptide comprises one or more amino acid mutations as compared to a wild-type Fanzor sequence, whereby the mutations increase binding and/or interaction with a target DNA and/or an wRNA component molecule, and/or increase Fanzor activity.

[0017] In certain example embodiments, the Fanzor polypeptide comprises one or more mutations of one or more neutral and/or negatively charged amino acids to one or more positively charged amino acids.

[0018] In certain example embodiments, the one or more mutations are made in and/or in effective proximity to the DNA interaction region of the Fanzor polypeptide.

[0019] In certain example embodiments, the one or more mutations comprise one or more mutations of FIG. 10C-10E, FIG. 35, or FIG. 56A-56D.

[0020] In certain example embodiments, the Fanzor polypeptide Fanzor activity is increased 1 to 50 fold or more as compared to a wild-type Fanzor or a Fanzor lacking one or more nuclear localization signals.

[0021] In certain example embodiments, the Fanzor (a) a yeast Fanzor; (b) an amoeba Fanzor; (c) a protist Fanzor; (d) a metazoan Fanzor; (e) an algae Fanzor; (f) a fungi Fanzor; (g) a eukaryotic Fanzor; (h) a Mollusca Fanzor; (i) from an organism of the genus Eremothecium, Ashbya, Spizellomyces, Torulaspora, Naegleria, Rhizopus, Guillardia, Batillaria, Dreissena, Mercenaria, Batrachochytrium, or Parasitella; (j) a virus Fanzor, optionally a Bodo saltans virus, a Harvforvirus, Homavirus, Dishui Lake Large Algae virus 1, or Yasminevirus Fanzor; (k) a Fanzor selected from or is encoded by a polynucleotide set forth in Table 1, Table 6, Table 7, Table 8, Table 9, Table 10, Table 11, Table 12, Table 13, Table 14, FIG. 20, FIG. 35, FIG. 56A-56D, or any combination thereof, or is a homolog, ortholog, or variant thereof; or (1) any combination of (a)-(k).

[0022] Described in certain example embodiments herein are vector systems comprising one or more vectors encoding the Fanzor polypeptide and the ωRNA component of any of the preceding paragraphs or elsewhere herein.

[0023] Described in certain example embodiments herein are engineered cells comprising the composition and/or a vector system of the present invention descried in any one of the preceding paragraphs or elsewhere herein.

[0024] Described in certain example embodiments herein are methods of modifying a target polynucleotide sequence in a cell, comprising introducing into the cell the composition of the present invention descried in any one of the preceding paragraphs or elsewhere herein.

[0025] In certain example embodiments, the modifying comprises cleaving a DNA polynucleotide.

[0026] In certain example embodiments, the cleavage occurs distal to a target-adjacent motif.

[0027] In certain example embodiments, the cleavage occurs at the site of the spacer annealing site or 3′ of the target sequence.

[0028] In certain example embodiments, cleavage occurs about 20-22 nucleotides away from the target adjacent motif.

[0029] In certain example embodiments, the polypeptide and/or ωRNA component molecules are provided via one or more polynucleotides encoding the polypeptides and/or ωRNA component molecule(s), and wherein the one or more polynucleotides are operably configured to express the Fanzor polypeptide and/or the ωRNA component molecule.

[0030] In certain example embodiments, the one or more mutations include substitutions, deletions, and insertions.

[0031] Described in certain example embodiments herein are engineered, non-naturally occurring compositions comprising a Fanzor polypeptide, wherein the Fanzor polypeptide is catalytically inactive, a nucleotide deaminase associated with or otherwise capable of forming a complex with the Fanzor protein, and an ωRNA component molecule capable of forming a complex with the Fanzor polypeptide and directing site-specific binding at a target sequence.

[0032] In certain example embodiments, the Fanzor polypeptide is (a (a) a yeast Fanzor; (b) an amoeba Fanzor; (c) a protist Fanzor; (d) a metazoan Fanzor; (e) an algae Fanzor; (f) a fungi Fanzor; (g) a eukaryotic Fanzor; (h) a Mollusca Fanzor; (i) from an organism of the genus Eremothecium, Ashbya, Spizellomyces, Torulaspora, Naegleria, Rhizopus, Guillardia, Batillaria, Dreissena, Mercenaria, Batrachochytrium, or Parasitella; (j) a virus Fanzor, optionally a Bodo saltans virus, a Harvforvirus, Homavirus, Dishui Lake Large Algae virus 1, or Yasminevirus Fanzor; (k) a Fanzor selected from or is encoded by a polynucleotide set forth in Table 1, Table 6, Table 7, Table 8, Table 9, Table 10, Table 11, Table 12, Table 13, Table 14, FIG. 20, FIG. 35, FIG. 56A-56D, or any combination thereof, or is a homolog, ortholog, or variant thereof; or (1) any combination of (a)-(k).

[0033] In certain example embodiments, the nucleotide deaminase is an adenosine deaminase or a cytidine deaminase.

[0034] Described in certain example embodiments herein are one or more polynucleotides encoding one or more components of the composition of any one of the preceding paragraphs or elsewhere herein.

[0035] Described in certain example embodiments herein are one or more vectors encoding the one or more polynucleotides of any one of the preceding paragraphs or elsewhere herein.

[0036] Described in certain example embodiments herein are cells or progeny thereof genetically engineered to express one or more components of the composition any one of the preceding paragraphs or elsewhere herein.

[0037] Described in certain example embodiments herein are methods of editing nucleic acids in target polynucleotides comprising delivering the composition of any one of the preceding paragraphs or as described elsewhere herein, the one or more polynucleotides of any one of the preceding paragraphs or as described elsewhere herein, or one or more vectors of any one of the preceding paragraphs or as described elsewhere herein to a cell or population of cells comprising the target polynucleotides.

[0038] In certain example embodiments, the target polynucleotides are target sequences within genomic DNA.

[0039] In certain example embodiments, the target polynucleotide is edited at one or more bases to introduce a G→A or C→T mutation.

[0040] Described in certain example embodiments herein are isolated cells or progeny thereof comprising one or more base edits made using the method of any one of the preceding paragraphs or as described elsewhere herein.

[0041] Described in certain example embodiments herein are engineered, non-naturally occurring compositions comprising a catalytically dead Fanzor polypeptide, a reverse transcriptase associated with or otherwise capable of forming a complex with the Fanzor polypeptide, and an ωRNA component molecule capable of forming a complex with the Fanzor protein and directing site-specific binding of the complex to a target sequence of a target polynucleotide, the guide molecule further comprising a donor template encoding a donor sequence for insertion into the target polynucleotide.

[0042] Described in certain example embodiments herein are one or more polynucleotides encoding one or more components of the composition of the preceding paragraph or elsewhere herein.

[0043] Described in certain example embodiments herein are one or more vectors encoding the one or more polynucleotides of the preceding paragraph or elsewhere herein.

[0044] Described in certain example embodiments herein are methods of modifying target polynucleotides comprising delivering the composition of any one of the preceding paragraphs or as described elsewhere herein, the one or more polynucleotides of any one of the preceding paragraphs or as described elsewhere herein, or the one or more vectors of claim 40 to a cell, or population of cells, comprising the target polynucleotides, wherein the complex directs the reverse transcriptase to the target sequence and the reverse transcriptase facilitates insertion of a donor sequence encoded by the donor template from the ωRNA component molecule into the target polynucleotide.

[0045] In certain example embodiments, insertion of the donor sequence introduces one or more base edits; corrects or introduces a premature stop codon; disrupts a splice site; inserts or restores a splice site; inserts a gene or gene fragment at one or both alleles of the target polynucleotide; or any combination thereof.

[0046] Described in certain example embodiments herein are isolated cells or progeny thereof comprising the modifications made using the method of any one of the preceding paragraphs or as described elsewhere herein.

[0047] Described in certain example embodiments herein are engineered, non-naturally occurring compositions comprising a Fanzor polypeptide, a non-LTR retrotransposon protein associated with or otherwise capable of forming a complex with the Fanzor polypeptide, and an oRNA component molecule capable of forming a complex with the Fanzor polypeptide and directing site-specific binding of the complex to a target sequence of a target polynucleotide, the ωRNA molecule further comprising a donor template encoding a donor sequence for insertion into the target polynucleotide and located between two binding elements capable of forming a complex with the non-LTR retrotransposon protein.

[0048] In certain example embodiments, the Fanzor protein is fused to the N-terminus of the non-LTR retrotransposon protein.

[0049] In certain example embodiments herein, the Fanzor protein is engineered to have nickase activity.

[0050] In certain example embodiments, the ωRNA component molecule directs the fusion protein to a target sequence 5′ of the targeted insertion site, and wherein the Fanzor protein generates a strand break at the targeted insertion site.

[0051] In certain example embodiments, the ωRNA component molecule directs the fusion protein to a target sequence 3′ of the targeted insertion site, and wherein the Fanzor protein generates a strand break at the targeted insertion site.

[0052] In certain example embodiments, the donor polynucleotide further comprises a polymerase processing element to facilitate 3′ end processing of the donor polynucleotide sequence.

[0053] In certain example embodiments, the donor polynucleotide further comprises a homology region to the target sequence on the 5′ end of the donor construct, the 3′ end of the donor construct, or both.

[0054] In certain example embodiments, the homology region is from 8 to 25 base pairs.

[0055] Described in certain example embodiments herein are one or more polynucleotides encoding one or more components of the composition of any one of the preceding paragraphs or described elsewhere herein.

[0056] Described in certain example embodiments herein are one or more vectors comprising the one or more polynucleotides of any one of the preceding paragraphs or described elsewhere herein.

[0057] Described in certain example embodiments herein are methods of modifying target polynucleotides comprising delivering the composition of any one of claims 46 to 51, the one or more polynucleotides of any one of the preceding paragraphs or as described elsewhere herein, or one or more vectors of any one of the preceding paragraphs or as described elsewhere herein to a cell or population of cells comprising the target polynucleotides, wherein the complex directs the non-LTR retrotransposon protein to the target sequence and the non-LTR retrotransposon protein facilitates insertion of the donor polynucleotide sequence from the donor construct into the target polynucleotide.

[0058] In certain example embodiments, insertion of the donor sequence introduces one or more base edits; corrects or introduces a premature stop codon; disrupts a splice site; inserts or restores a splice site; inserts a gene or gene fragment at one or both alleles of the target polynucleotide; or any combination thereof.

[0059] Described in certain example embodiments herein are isolated cells or progeny thereof comprising the modifications made using the method of any one of the preceding paragraphs or as described elsewhere herein.

[0060] Described in certain example embodiments herein are engineered, non-naturally occurring compositions comprising a Fanzor polypeptide, an integrase protein associated with or otherwise capable of forming a complex with the Fanzor polypeptide, and optionally a reverse transcriptase, and an ωRNA component molecule capable of forming a complex with the Fanzor protein and directing site-specific binding of the complex to a target sequence of a target polynucleotide, the guide molecule further comprising a donor template encoding a donor sequence for insertion into the target polynucleotide and located between two binding elements capable of forming a complex with the integrase protein.

[0061] In certain example embodiments, the Fanzor protein is fused to the integrase protein and optionally the reverse transcriptase.

[0062] In certain example embodiments, the Fanzor protein is engineered to have nickase activity.

[0063] In certain example embodiments, the ωRNA component molecule directs the fusion protein to a target sequence, and wherein the Fanzor protein generates a nick at the targeted insertion site.

[0064] In certain example embodiments, the donor polynucleotide further comprises a homology region to the target sequence on the 5′ end of the donor construct, the 3′ end of the donor construct, or both.

[0065] Described in certain example embodiments herein are one or more polynucleotides encoding one or more components of the composition of any one of the preceding paragraphs or as described elsewhere herein.

[0066] Described in certain example embodiments herein are one or more vectors comprising the one or more polynucleotides of any one of the preceding paragraphs or as described elsewhere herein.

[0067] Described in certain example embodiments herein are methods of modifying target polynucleotides comprising delivering the composition of any one of the preceding paragraphs or as described elsewhere herein, the one or more polynucleotides of any one of the preceding paragraphs or as described elsewhere herein, or one or more vectors of any one of the preceding paragraphs or as described elsewhere herein to a cell or population of cells comprising the target polynucleotides, wherein the complex directs the integrase protein to the target sequence and the integrase protein facilitates insertion of the donor polynucleotide sequence from the donor construct into the target polynucleotide.

[0068] In certain example embodiments, insertion of the donor sequence introduces one or more base edits; corrects or introduces a premature stop codon; disrupts a splice site; inserts or restores a splice site; inserts a gene or gene fragment at one or both alleles of the target polynucleotide; or any combination thereof.

[0069] Described in certain example embodiments herein are isolated cells or progeny thereof comprising the modifications made using the method of any one of the preceding claims or as described in greater detail elsewhere herein.

[0070] Described in certain example embodiments herein are compositions for detecting the presence of a target polynucleotide in a sample, comprising: one or more Fanzor proteins possessing collateral activity; at least one ωRNA component comprising a sequence capable of binding a target polynucleotide and designed to form a complex with the one or more Fanzor proteins; a detection construct comprising a polynucleotide component, wherein the Fanzor protein exhibits collateral nuclease activity and cleaves the polynucleotide component of the detection construct once activated by the target sequence; and optionally, isothermal amplification reagents.

[0071] In certain example embodiments, the Fanzor is (a) a yeast Fanzor; (b) an amoeba Fanzor; (c) from an organism of the species Eremothecium, Ashbya, Spizellomyces, Torulaspora, Naegleria, Rhizopus; (d). a virus Fanzor, optionally a Bodo saltans virus, a Harvforvirus, Homavirus, Dishui Lake Large Algae firus 1, or Yasminevirus Fanzor; (e) a Fanzor selected from or is encoded by a polynucleotide set forth in Table 1, Table 6, Table 7, Table 8, Table 9, Table 10, Table 11, Table 12, Table 13, Table 14, FIG. 20, FIG. 35, FIG. 56A-56D, or any combination thereof, or is a homolog, ortholog, or variant thereof; or (f) any combination of (a)-(e).

[0072] In certain example embodiments the isothermal amplification reagents are loop-mediated isothermal amplification (LAMP) reagents.

[0073] In certain example embodiments the LAMP reagents comprise LAMP primers.

[0074] In certain example embodiments, the composition further comprises one or more additives to increase reaction specificity or kinetics.

[0075] In certain example embodiments, the composition further comprises polynucleotide binding beads.

[0076] Described in certain example embodiments herein are methods for detecting polynucleotides in a sample, the method comprising contacting one or more target sequences with a Fanzor, at least one ωRNA component capable of forming a complex with the Fanzor and direct sequence-specific binding to one or more target polynucleotides and a detection construct, wherein the Fanzor exhibits collateral nuclease activity and cleaves the detection construction once activated by the one or more target sequences; and detecting a signal from cleavage of the detection construction thereby detecting the one or more target polynucleotides.

[0077] In certain example embodiments, the method further comprises amplifying the target polynucleotides using isothermal amplification prior to the contacting step.

[0078] These and other aspects, objects, features, and advantages of the example embodiments will become apparent to those having ordinary skill in the art upon consideration of the following detailed description of example embodiments.

### BRIEF DESCRIPTION OF THE DRAWINGS

[0079] An understanding of the features and advantages of the present invention will be obtained by reference to the following detailed description that sets forth illustrative embodiments, in which the principles of the invention may be utilized, and the accompanying drawings of which:

[0080] FIG. 1A-1Q-Exploration of the diversity of IS200/IS605 superfamily nucleases. (FIG. 1A) Evolution between IS200/IS605 transposon superfamily-encoded nucleases and associated RNAs. Dashed lines reflect tentative/unknown relationships. LCA, last common ancestor. (FIG. 1B) Locations of IscB loci and fragments in the I. tetrasporus genome. Intact locus is labeled as “ChlorIscB.” (FIG. 1C) Small RNA-seq of I. tetrasporus. (FIG. 1D) WebLogo of ChlorIscB cleavage TAM using a reprogrammed guide in an IVTT TAM screen. (FIG. 1E) WebLogo of OgeuIscB TAM using a reprogrammed guide in an IVTT TAM screen. (FIG. 1F (SEQ ID NO: 313-321)) Targeted OgeuIscB-mediated indel formation at the VEGFA locus in HEK293FT cells ordered by abundance, with indel size at left. (FIG. 1G) OgeuIscB-mediated indel formation at multiple sites in HEK293T cells. Error bars denote SD. * P<0.05. (FIG. 1H) Small RNA-seq of RNA from IsrB locus in K. racemifer strain SOSP1-21. (FIG. 1I) WebLogo of Desulfovigula thermocuniculi (DthIsrB) TAM using a reprogrammed guide in an IVTT TAM screen. (FIG. 1J) DthIsrB mediates oRNA-guided nontarget strand nicking in a TAM- and target-dependent manner in an IVTT cleavage assay using 5′ strand-specific labeled targets. (FIG. 1K) SmallRNA-seq of ωRNA from TnpB locus in K. racemifer strain SOSP1-21. (FIG. 1L (SEQ ID NO: 322-323)) Comparison of ωRNAs from K. racemifer IscB and TnpB loci. (FIG. 1M (SEQ ID NO: 324)) Secondary structure prediction of KraTnpB-associated ωRNA. (FIG. 1N) WebLogo of A. macrosporangiidus TnpB (AmaTnpB) TAM using a reprogrammed guide in an IVTT TAM screen. (FIG. 10) In vitro reconstituted AmaTnpB cleavage of dsDNA substrates in the presence or absence of ωRNA, target, and/orTAM. (FIG. 1P) AmaTnpB performs ωRNA-guided, TAM-independent, target-dependent cleavage of 3′ Cy5.5-labeled ssDNA substrates. (FIG. 1Q) AmaTnpBcleavesa 3′ Cy5.5-labeled collateral ssDNA substrate in the presence of TAM- and target-containing dsDNA or target-containing ssDNA substrates. Contig accession and position information for all displayed loci are listed in table S6 of Altae-Tran et al. Science 374:57-65 (2021).

[0081] FIG. 2 (SEQ ID NO: 325-350)—An alignment of exemplary TnpB sequences.

[0082] FIG. 3A-3B—OMEGA systems are small RNA-guided proteins (FIG. 3A) Schematic of the tnpB locus. TnpB and the associated ωRNA form a ribonucleic protein complex that cleaves DNA complementary to the guide region of the ωRNA. [22, Example 1] (FIG. 3B) Evolutionary relationship between prokaryotic TnpB and eukaryotic Fanzor. Protein domains are annotated as color boxes indicate. It is hypothesized that Fanzor is associated with an ωRNA [24, Example 1].

[0083] FIG. 4—Experimental workflow of small RNA-seq of ωRNA to identify ncRNA. RNA was pulled down using purified Fanzor protein. Small RNAs were then isolated from this pull-down, randomly fragmented, subjected to adaptor ligation, and amplified by PCR. NGS was then used to sequence the RNA reads, which were then mapped to the Fanzor locus.

[0084] FIG. 5—Experimental workflow of Western blotting to confirm Fanzor protein expression in HEK293FT cells. Cells are lysed by nonionic detergent containing buffer, and insoluble fractions including cellular debris were separated by tabletop centrifugation. Extracted proteins are then subjected to SDS-PAGE. After gel electrophoresis, proteins are transferred to PVDF membranes. These membranes are then incubated with primary antibody specific to epitope-tag attached to Fanzor. After blocking, a secondary antibody (labeled with horseradish peroxidase for chemiluminescence detection) is added to bind to the primary antibody. Chemiluminescence imaging is then used to visualize Fanzor protein expression.

[0085] FIG. 6—Experimental workflow for assessing Fanzor-mediated cleavage on the human genome. ωRNA expression vector targeting a locus on the human genome and Fanzor protein expression vectors are co-transfected into HEK293FT cells using lipofectamine. After incubation, cells are lysed to make the DNA accessible for sequencing. NGS is used to quantify indels, which are insertions or deletions, at the targeted locus.

[0086] FIG. 7A-7B—Comparisons of Cas12a, TnpB, and Fanzor. (FIG. 7A) Protein domain organization of Cas12a, TnpB, and Fanzor and their respective sizes (left); RNA guide locus organization and size for Cas12a, TnpB, and Fanzor (right). (FIG. 7B) Crystal structure of Cas12a in complex with guide RNA and target DNA and predicted structures of TnpB and Fanzor. Although much smaller than Cas12a, Fanzor retains the overall structure of the REC domain and bridge helix domain, both of which are important for RNA guide and target DNA binding.

[0087] FIG. 8A-8E—Reconstitution of Fanzor in human cells. (FIG. 8A) Secondary structure prediction of the Fanzor minimal ωRNA. The region corresponding to the transposon right end (RE) is highlighted in light blue, and the prospective guide sequence is highlighted in pink. (FIG. 8B) dsDNA cleavage by purified Fanzor-ωRNA complex. Cleaved DNA was ligated to adaptors for PCR amplification, and the cleavage position (mapped relative to the TAM (Transposon-Associated Motif)) was identified by next generation sequencing (NGS). Target guide RNA: guide sequence of minimal ωRNA was replaced by 30-nt target sequence. Non-target guide RNA: guide sequence of minimal ωRNA was replaced with a random 30-nt sequence. (FIG. 8C) Western blot showing expression of Fanzor in HEK293FT cells. N-terminal HA-NLS tagged Fanzor and C-terminal NLS-HA tagged Fanzor was expressed in HEK293FT cells with or without minimal ωRNA. Alpha-tubulin was used as a control to confirm cytosolic protein extraction, and histone H3 was used as a control for nuclear protein ex-traction. (FIG. 8D) Localization of Nuclear localization signal (NLS)-tagged Fanzor proteins. N-terminal HA-NLS tagged Fanzor or C-terminal NLS-HA tagged Fanzor was expressed in HEK293FT cells, and localization of Fanzor was examined via an HA-tag antibody. GAPDH was used as a control for cytosolic proteins. Blue: DAPI, Green: HA, Red: GAPDH (yellow: merged green and red signals). (FIG. 8E) Human genome cleavage assay for 12 representative genomic loci. C-terminal NLS-HA tagged Fanzor was expressed together with an ωRNA bearing a 30-nt guide sequence targeting each locus. Genomic DNA was extracted, and each target site was amplified with a specific pair of primers. The amplicons were analyzed by NGS, and the indel rate (%) was quantified by CRISPResso2.

[0088] FIG. 9A-9B—Identification of an optimal ωRNA boosts Fanzor activity in human cells. (FIG. 9A) Alignment of small-RNA sequencing reads (in blue) across the FZID16 locus. Pink horizontal bars show the 4 scaffold regions of the ωRNA identified and an additional scaffold region constructed with a hepatitis delta virus (HDV) attached to the 3′ end. Pink bars also indicate the distance from the FZID16-ORF in bp. (FIG. 9B) Fanzor activity (% indels) in HEK293FT cells at the on-target gID7 locus, off-target gID5 locus, or a no target locus with 5 ωRNA scaffold variants and an EGFP expression vector. An EGFP expression vector was used to control for successful transfection of DNA plasmids.

[0089] FIG. 10A-10E—Structure-guided engineering of Fanzor protein. (FIG. 10A) Crystal structure of site where cleavage is predicted to occur. This pocket region between the RuvC and Nuc lobe is likely where the target DNA will sit during cleavage. Mutated residues, located in this pocket region, are highlighted in red. (FIG. 10B) Gene editing activity (indel percentage) of Fanzor variants harboring mutations near the putative catalytic pocket site. Each N-terminal NLS tagged mutant and C-terminal tagged mutant was co-transfected with pMJ171 for targeting gID7. All Fanzors were co-expressed with an ωRNA with the optimal scaffold (pMJ 171). Each mutant was constructed with a N-terminal tagged version (blue) and a C-terminal tagged version (pink). Genomic DNA was extracted, and the target site was amplified with a specific pair of primers. The amplicons were analyzed by next generation sequencing, and the indel rate (%) was quantified. (FIG. 10C) To select candidate residues that may be involved in binding to the ωRNA, Fanzor orthologs were aligned to identify conserved positively-charged residues (K, R, or H) that are absent in FZID16. FIG. 10C shows alignment of Fanzor ortholgs for 3 mutated sites. (FIG. 10D) Thirty-two candidate mutation sites are shown on the predicted structure of Fanzor. Mutated residues are in red (see Table 5 for a list of mutations). (FIG. 10E) Gene editing activity (indel percentage) of Fanzor variants harboring mutations predicted to interact with the ωRNA. Each N-terminal NLS tagged mutant and C-terminal tagged mutant was co-transfected with pMJ171 for targeting gID7. Genomic DNA was extracted, and the target site was amplified with a specific pair of primers. The amplicons were analyzed by next generation sequencing, and the indel rate (%) was quantified.

[0090] FIG. 11—Further ωRNA variants for indel activity. Starting from pMJ171, additional 75, 150, 225 bp 5′ extended three ωRNA variants (pMJ204, 205 and 206, respectively) bearing gID7 were transfected with C-terminal NLS tagged FZID16. Higher bars indicate higher indel activities (mean±s.d.; n=3 independent experiments for pMJ204 to pMJ206, n=4 independent experiments for pMJ162 to pMJ171). N.s.: not significant, **: p≤ 0.01, ***: p≤0.001.

[0091] FIG. 12A-12D—Gel electrophoresis images of PCR amplicons for catalytic site directed mutagenesis. Point mutants in FIG. 10A. N-terminal NLS tagged FZID16 (pMJ145) and C-terminal NLS tagged FZID16 (pMJ149) were amplified by PCR for point mutagenesis. Each 2 μl out of 25 μl PCR product was loaded on 1% Agarose gel. ˜ 6 kbp PCR amplicons are expected products for the following KLD reactions. The numbers on the lanes are unique sample numbers. Their detailed information is in Table 5.

[0092] FIG. 13A-13B—Gel electrophoresis images of PCR amplicons for consensus site directed mutagenesis. Point mutants in FIG. 10D. N-terminal NLS tagged FZID16 (pMJ145) and C-terminal NLS tagged FZID16 (pMJ149) were amplified by PCR for point mutagenesis. Each 2 μl out of 25 μl PCR product was loaded on 1% Agarose gel. ˜ 6 kbp PCR amplicons are expected products for the following KLD reactions. The numbers on the lanes are unique sample numbers. Their detailed information is in Table 5.

[0093] FIG. 14—Identification of eukaryotic TnpB-like proteins. 11 loci are confirmed (named Spu locus v1-v11). There was no intron. They are well structured by AlphaFold prediction. There are clear transposon ends and ncRNA region was clearly identifiable.

[0094] FIG. 15A-15B (SEQ ID NO: 351-363)—Spu expresses ncRNA from downstream of a Fanzor open reading frame (ORF).

[0095] FIG. 16A-16C (SEQ ID NO: 364-370)—Experimental strategy and results for a Fanzor RNP pull down assay in yeast and RNAseq analysis. RNP pull down assay with yeast worked for ncRNA identification for Spu.

[0096] FIG. 17—Strategy for a Fanzor RNP pooled pull down assay. The exemplary strategy shown demonstrates 12 contigs in 1 transformation for 1L of yeast culture.

[0097] FIG. 18A-18B—Results for additional candidates with no introns (a single ORF in the transposon). FIG. 18A shows results from Torulaspora delbrueckii. FIG. 18B shows results for Naegleria lovaniensis.

[0098] FIG. 19A-19B—Results for additional candidates with no introns (2-4 ORFs in the transposon. A catalytic DDE was conserved.

[0099] FIG. 20—Contigs tested in yeast.

[0100] FIG. 21 (SEQ ID NO: 371)—An Spu RNP from yeast and RNAseq results. 87-88 nt at analogous position was always observed.

[0101] FIG. 22A-22B (SEQ ID NO: 372-378, 511)—T. del. RNP from yeast and RNAseq results. No ncRNA was identified from other yeast species Ashbya gossypii or Eremothecium cymbalariae DBVPG #7215.

[0102] FIG. 23A-23C (SEQ ID NO: 379-383)—Nlov Fanzor RNP from yeast and RNAseq results.

[0103] FIG. 24A-24B (SEQ ID NO: 384)—Mimiviridae Fanzor RNP from yeast and RNAseq results.

[0104] FIG. 25A-25B (SEQ ID NO: 385-387)−In vitro clevage/TAM screen with Fanzor-RNP from yeast.

[0105] FIG. 26 (SEQ ID NO: 388-391)—Results demonstrating that Spu Fanzor is active.

[0106] FIG. 27—Strategy for identifying suitable Fanzor polypeptides.

[0107] FIG. 28 (SEQ ID NO: 392-418)—Strategy for mining for remote ncRNA guided polypeptides in other locations in the genome.

[0108] FIG. 29—Loci with an inverted repeat (IR) and guide without a Fanzor gene.

[0109] FIG. 30—Results demonstrating a conserved region not containing a Fanzor gene.

[0110] FIG. 31—Fanzor in insects and mollusks.

[0111] FIG. 32—Ribbon diagram comparison of Fanzors from different organisms.

[0112] FIG. 33—Exemplary evaluation of multiple loci in the same genome (e.g., an insect genome) for determining boundaries. 4 loci are shown. Triangles upstream of the Fanzor (Fz) show repeats in various locations indicating structures of potential RNA structures. Inverted repeats are also indicated.

[0113] FIG. 34—Evaluation of activity of Fanzor systems with varying omega RNAs.

[0114] FIG. 35—Evaluation of activity of additional Fanzor variants.

[0115] FIG. 36—Bioinformatical and expression characterization of a Fanzor polypeptide and ωRNA from an exemplary algae (Guillardia theta).

[0116] FIG. 37 (SEQ ID NO: 426)—Predicted secondary structure of the ωRNA from G. theta of FIG. 36.

[0117] FIG. 38 (SEQ ID NO: 427-429)—Bioinformatical characterization and identification of G. theta predicted transposon ends from the identified G. theta ωRNA structure.

[0118] FIG. 39—Bioinformatical and expression characterization of a Fanzor polypeptide and ωRNA from Mollusca (Batillaria attramentaria), an exemplary multicellular eukaryotic organism.

[0119] FIG. 40 (SEQ ID NO: 430)—Predicted secondary structure of the ωRNA from B. attramentaria of FIG. 39.

[0120] FIG. 41—Bioinformatical and expression characterization of Fanzor polypeptides and ωRNA identified in Mollusca (Dreissena polymorpha), an exemplary multicellular eukaryotic organism. 4 contigs were evaluated, oRNA was identified in 2 of them.

[0121] FIG. 42A-42B (SEQ ID NO: 431-432)—Predicted secondary structure an exemplary ωRNA identified the two contigs from D. polymorpha of FIG. 41.

[0122] FIG. 43—Bioinformatical and expression characterization of Fanzor polypeptides and ωRNA identified in Mollusca (Mercenaria mercenaria), an exemplary multicellular eukaryotic organism. 4 contigs were evaluated, oRNA was identified in 3 of them.

[0123] FIG. 44A-44C (SEQ ID NO: 433-435)—Predicted secondary structure an exemplary ωRNA identified the three contigs from M. mercenaria of FIG. 43.

[0124] FIG. 45A-45C—Bioinformatical analysis and prediction of transposon ends of ωRNA identified in M. mercenaria. Boxes indicate accession numbers of contigs where ωRNA was identified of the 4 contigs evaluated. FIG. 45A-45B (SEQ ID NO: 436-445) shows LE and RE transposon end analysis prior to considering ωRNA structure. FIG. 45C shows transposon end bioinformatical analysis from the ωRNA structure, which clarified the transposon LE and RE ends.

[0125] FIG. 46—Bioinformatical characterization of Fanzor polypeptides and ωRNA identified in an exemplary fungus (Batrachochytrium salamandrivorans, JAKFGG010000033). FIG. 46 shows analysis of 5 contigs were evaluated. Boxes indicate contigs where ωRNA was identified.

[0126] FIG. 47 (SEQ ID NO: 446)—Predicted secondary structure an exemplary ωRNA identified from B. salmandrivorans of FIG. 46.

[0127] FIG. 48A-48B—Bioinformatical characterization of Fanzor polypeptides and ωRNA identified in an exemplary fungi (Parasitella parasitica, LN731931 (FIG. 48A) and LN731111 (FIG. 48B)).

[0128] FIG. 49A-49B—Predicted secondary structure an exemplary fungi (Parasitella parasitica, LN731931 (FIG. 49A (SEQ ID NO: 447)) and LN731111 (FIG. 49B (SEQ ID NO: 448))).

[0129] FIG. 50A-50D (SEQ ID NO: 449-453)—Bioinformatic characterization of small TnpB-like Fanzor polypeptides from Naegleria lovaniensis (Nlov) and omega RNA.

[0130] FIG. 51—Results from a TAM screen using Novl Fanzor yeast-RNP RNAseq.

[0131] FIG. 52A-52B (SEQ ID NO: 454-480)—Results from an indel assay in human cells for small TnpB-like Fanzors.

[0132] FIG. 53A-53G—Maps of Nlov Fanzors identified by bioinformatic analysis.

[0133] FIG. 54 (SEQ ID NO: 481-508)—Ternary Fanzor-omega RNA-target DNA complex modeling data based on Fanzor ID 83. The chain ID of the protein is P, the omega RNA is W, the DNA target strand is T, and the DNA non-target strand is N.

[0134] FIG. 55A-55D—Views of the 3D model structure (FIGS. 55A and 55C) and 3D ribbon model (FIGS. 55B and 55D) for an exemplary Fanzor-omega RNA-target DNA complex generated from the data shown in FIG. 54. NTS refers to the non-target strand. TS refers to the target strand.

[0135] FIG. 56A-56D—Functional screening of Fanzor mutation variants. (FIG. 56A) N- or C-terminally tagged SpuFanzor wild-type (WT) or variants harboring mutations were screened for indel activity against a target locus in the human genome. (FIG. 56B) R-substitution scanning of untagged Spu Fanzor WT (Fanzor ID16) or variants harboring point mutations in the WED and/or Bridge Helix domain. (FIG. 56C) Untagged or Tagged WT or SpuFanzor mutation variants harboring mutations in the RuvC domain were screened for indel activity against a target locus in the human genome. (FIG. 56D) Untagged or Tagged WT or SpuFanzor mutation variants harboring various combinations of point mutations were screened for indel activity against a target locus in the human genome.

[0136] FIG. 57—Architectures of TnpB/Fanzor/Cas12 proteins.

[0137] FIG. 58—REC architecture of TnpB, Fanzor2 and Fanzor 1 (e.g., ID83). The scaffoldREC (scaREC) can harbor REC1 domain.

[0138] FIG. 59A-59B—Comparison of TnpB and Fanzor (ID83) complexed with of a guide molecule (e.g., omega RNA) and target polynucleotide and engineering a minimal guide molecule. (FIG. 59A) The scaffoldREC+wREC (a WED domain harbored by a REC domain) cover the hybrid spacer:target duplex on one side. The Bridge helix (BH)+bREC cover the other side of the hybrid spacer:target duplex. Colors noted in FIG. 59A are represented in greyscale. The guide RNA of TnpB and some Cas12 proteins contains a core region (referred to as the “nexus area”, which is just a hairpin and interacts the same way with WED/BH areas in TnpB and some Cas12s. (FIG. 59B (SEQ ID NO: 509-510)) The minimal guide can be engineered to contain or model just the “nexus area”.

[0139] FIG. 60A-60L—Modeling Cas12 protein complexes (FIG. 60A-60K show Cas12a-Cas12k, respectively) FIG. 60L shows Cas12mC. 3 Cas12 proteins (Cas12a, Cas12d, and Cas12e) (FIGS. 60A, 60D, and 60E) that contain a secondary wREC (wREC2) domain positioned right after their first REC domain (wREC1). The Cas12 of FIG. 60C may have a REC upstream of the WED. The Cas12 of FIG. 60F was modeled to form a dimer, thus resulting the dimer having two RECs.

[0140] FIG. 61A-61C—Identification and modeling of a secondary wREC (wREC2) in Cpf1 (Cas12a) (FIG. 61A), Cas12d (FIG. 61B), and Cas12e (FIG. 61C).

[0141] The figures herein are for illustrative purposes only and are not necessarily drawn to scale.

### DETAILED DESCRIPTION OF THE EXAMPLE EMBODIMENTS

### General Definitions

[0142] Unless defined otherwise, technical and scientific terms used herein have the same meaning as commonly understood by one of ordinary skill in the art to which this disclosure pertains. Definitions of common terms and techniques in molecular biology may be found in Molecular Cloning: A Laboratory Manual, 2nd edition (1989) (Sambrook, Fritsch, and Maniatis); Molecular Cloning: A Laboratory Manual, 4th edition (2012) (Green and Sambrook); Current Protocols in Molecular Biology (1987) (F. M. Ausubel et al. eds.); the series Methods in Enzymology (Academic Press, Inc.): PCR 2: A Practical Approach (1995) (M. J. MacPherson, B. D. Hames, and G. R. Taylor eds.): Antibodies, A Laboratory Manual (1988) (Harlow and Lane, eds.): Antibodies A Laboratory Manual, 2nd edition 2013 (E. A. Greenfield ed.); Animal Cell Culture (1987) (R.I. Freshney, ed.); Benjamin Lewin, Genes IX, published by Jones and Bartlett, 2008 (ISBN 0763752223); Kendrew et al. (eds.), The Encyclopedia of Molecular Biology, published by Blackwell Science Ltd., 1994 (ISBN 0632021829); Robert A. Meyers (ed.), Molecular Biology and Biotechnology: Comprehensive Desk Reference, published by VCH Publishers, Inc., 1995 (ISBN 9780471185710); Singleton et al., Dictionary of Microbiology and Molecular Biology 2nd ed., J. Wiley & Sons (New York, N.Y. 1994), March, Advanced Organic Chemistry Reactions, Mechanisms and Structure 4th ed., John Wiley & Sons (New York, N.Y. 1992); and Marten H. Hofker and Jan van Deursen, Transgenic Mouse Methods and Protocols, 2nd edition (2011).

[0143] As used herein, the singular forms “a”, “an”, and “the” include both singular and plural referents unless the context clearly dictates otherwise.

[0144] The term “optional” or “optionally” means that the subsequent described event, circumstance or substituent may or may not occur, and that the description includes instances where the event or circumstance occurs and instances where it does not.

[0145] The recitation of numerical ranges by endpoints includes all numbers and fractions subsumed within the respective ranges, as well as the recited endpoints.

[0146] The terms “about” or “approximately” as used herein when referring to a measurable value such as a parameter, an amount, a temporal duration, and the like, are meant to encompass variations of and from the specified value, such as variations of +/−10% or less, +/−5% or less, +/−1% or less, and +/−0.1% or less of and from the specified value, insofar such variations are appropriate to perform in the disclosed invention. It is to be understood that the value to which the modifier “about” or “approximately” refers is itself also specifically, and preferably, disclosed.

[0147] As used herein, a “biological sample” may contain whole cells and/or live cells and/or cell debris. The biological sample may contain (or be derived from) a “bodily fluid”. The present invention encompasses embodiments wherein the bodily fluid is selected from amniotic fluid, aqueous humour, vitreous humour, bile, blood serum, breast milk, cerebrospinal fluid, cerumen (earwax), chyle, chyme, endolymph, perilymph, exudates, feces, female ejaculate, gastric acid, gastric juice, lymph, mucus (including nasal drainage and phlegm), pericardial fluid, peritoneal fluid, pleural fluid, pus, rheum, saliva, sebum (skin oil), semen, sputum, synovial fluid, sweat, tears, urine, vaginal secretion, vomit and mixtures of one or more thereof. Biological samples include cell cultures, bodily fluids, cell cultures from bodily fluids. Bodily fluids may be obtained from a mammal organism, for example by puncture, or other collecting or sampling procedures. The biological sample can be obtained from an environment (e.g., water source, soil, air, and the like). The biological sample can be obtained from a plant or algae. The biological sample can contain prokaryotic organisms. Biological samples can be obtained via any suitable collection or harvesting technique including active and passive collection/harvesting methods, including but not limited to, puncture, cutting, digging, filtering, bagging, draining, and/or the like.

[0148] The terms “subject,” “individual,” and “patient” are used interchangeably herein to refer to a vertebrate, preferably a mammal, more preferably a human. Mammals include, but are not limited to, murines, simians, humans, farm animals, sport animals, and pets. Tissues, cells and their progeny of a biological entity obtained in vivo or cultured in vitro are also encompassed.

[0149] Various embodiments are described hereinafter. It should be noted that the specific embodiments are not intended as an exhaustive description or as a limitation to the broader aspects discussed herein. One aspect described in conjunction with a particular embodiment is not necessarily limited to that embodiment and can be practiced with any other embodiment(s). Reference throughout this specification to “one embodiment”, “an embodiment,” “an example embodiment,” means that a particular feature, structure or characteristic described in connection with the embodiment is included in at least one embodiment of the present invention. Thus, appearances of the phrases “in one embodiment,” “in an embodiment,” or “an example embodiment” in various places throughout this specification are not necessarily all referring to the same embodiment but may. Furthermore, the particular features, structures or characteristics may be combined in any suitable manner, as would be apparent to a person skilled in the art from this disclosure, in one or more embodiments. Furthermore, while some embodiments described herein include some, but not other features included in other embodiments, combinations of features of different embodiments are meant to be within the scope of the invention. For example, in the appended claims, any of the claimed embodiments can be used in any combination.

[0150] All publications, published patent documents, and patent applications cited herein are hereby incorporated by reference to the same extent as though each individual publication, published patent document, or patent application was specifically and individually indicated as being incorporated by reference.

### OVERVIEW

[0151] Embodiments disclosed herein provide engineered Fanzor systems that function as re-programmable nucleases. The Fanzor system comprises a Fanzor polypeptide and a nucleic acid component capable of forming a complex with the Fanzor polypeptide and directing the complex to a target polynucleotide. The Fanzor systems and Fanzor/nucleic acid component complexes may also be referred to herein as OMEGA (Obligate Mobile Element Guided Activity) systems or complexes, or 22 systems or complexes for short. Fanzor systems are a distinct type of 2 system, which further include IscB, IsrB, IshB, and TpnB systems. The nucleic acid component of 22 systems is structurally distinct from other RNA-guided nucleases, such as CRISPR-Cas systems, and may also be referred to as a ωRNA. In certain example embodiments, the Fanzor systems are RNA-predominate, that is the nucleic acid component makes a larger contribution to the overall size of the Fanzor complex relative to other RNA-guided nuclease systems such as CRISPR-Cas.

[0152] While Fanzor proteins were known to exist within certain eukaryotic species, See e.g., Bao & Jurka, Mobile DNA, 412, (2013), Applicants characterize for the first time that Fanzor systems function as polynucleotide-guided nucleases, provide a characterization of the polynucleotide component, and demonstrate that such systems can be engineered and reprogrammed for a wide variety of gene editing and diagnostic purposes. The present disclosure provides compositions and methods of use thereof. In general, the compositions may comprise engineered and reprogrammable Fanzor systems that allow more flexible and effective strategies to manipulate and modify target polynucleotides. In certain example embodiments, the engineered Fanzor systems disclosed herein may cleave or nick the target polynucleotide. Other modifications which enable further modification and/or editing of target polynucleotides are disclosed in further detail below. The nucleic acid component may be an RNA. The nucleic acid component is also referred to herein as an ωRNA.

[0153] In one embodiment, the Fanzor systems and related compositions may specifically target single-strand or double-strand DNA. In one embodiment, the Fanzor system may bind and cleave double-strand DNA. In one embodiment, the Fanzor system may bind to double-stranded DNA without introducing a break to either of the strands. In one embodiment, the Fanzor polypeptides or nuclease/nucleic acid component complexes may open, disrupting the continuity of one of the two DNA strands, thereby introducing a nick of the double stranded DNA.

[0154] In another aspect, embodiments disclosed herein include applications of the compositions herein, including diagnostics, therapeutics, and methods of detection. Delivery of the proteins and systems disclosed is also provided, including to a variety of cells and via a variety of particles and vectors.

### Fanzor Compositions

[0155] In one aspect, embodiments disclosed herein are directed to compositions comprising an engineered Fanzor and/or ωRNA capable of forming a complex with the Fanzor and directing site-specific binding of the Fanzor to a target sequence on a target polypeptide.

### Fanzor Polypeptides

[0156] Fanzor polypeptides of the present invention may comprise a Ruv-C-like domain. Exemplary Fanzor sequences are shown or encoded by those in Table 1, Table 6, Table 7, Table 8, Table 9, Table 10, Table 11, Table 12, Table 13, Table 14, and FIG. 20. In some embodiments, the Fanzor polypeptide is a polypeptide as shown and described in relation with FIGS. 10C-10E FIG. 35, FIG. 56A-56D. The RuvC domain may be a split RuvC domain comprising a RuvC-I, RuvC-II, and RuvC-III subdomains. The Fanzor may further comprise one or more of a HTH domain, a bridge helix domain, a REC domain, a zinc finger domain, or any combination thereof. Fanzor polypeptides do not comprise an HNH domain. In one example embodiment, Fanzor proteins comprise, starting at the N-terminus a HTH domain, a RuvC-I sub-domain, a bridge helix domain, a RuvC-II sub-domain, a zinger finger domain, and a RuvC-III sub-domain. In one example embodiment, the RuvC-III sub-domain forms the C-terminus of the Fanzor polypeptide.

[0157] In some embodiments, the Fanzor polypeptide comprises one or more mutations in the WED, Bridge Helix domain, Ruv C domain, or any combination thereof. In some embodiments, the Fanzor polypeptide comprises a mutation at one or more amino acid residues selected from 310, 35, 36, 308, 319, 320, 323, 323, 405, 406, 408, 409, 484, 486, 487 or any combination thereof relative to Fanzor ID16 or in position(s) analogous there to in analogous, heterologous, or orthologous to Fanzor ID16. In some embodiments, the Fanzor polypeptide comprises a mutation at one or more amino acid residues selected from 289, 290, 291, 292, 293, 294, 295, 296, 297, 298, 299, 300, 301, 302, 303, 304, 305, 306, 307, 308, 309, 310, 311, 312, 313, 314, 315, 316, 317, 318, 319, 320, 321, 322, 323, 324, 325, 326, 327, 328, 329, 330, 331, 332, 333, 334, 335, 336, 337, 338, 339, 340, 341, 342, 343, 344, 345, 346, 347, 348, 349, 350, 351, 352, 353, 354, 355, 356, 357, 358, 359, 360, 361, 362, 363, 364, 365, 366, 367, 368, 369, 370, 371, 372, 373, 374, 375, 376, 377, 378, 379, 380, 381, 382, 383, 384, 385, 386, 387, 388, 389, 390, 391, 392, 393, 394, 395, 396, 397, 398, 399, 400, 401, 402, 403, 404, 405, 406, 407, 408, 409, 410, 411, 412, 413, 414, 415, 416, 417, 418, 419, 420, 421, 422, 423, 424, 425, 426, 427, 428, 429, 430, 431, 432, 433, 434, 435, 436, 437, 438, 439, 440, 441, 442, 443, 444, 445, 446, 447, 448, 449, 450, 451, 452, 453, 454, 455, 456, 457, 458, 459, 460, 461, 462, 463, 464, 465, 466, 467, 468, 469, 470, 471, 472, 473, 474, 475, 476, 477, 478, 479, 480, 481, 482, 483, 484, 485, 486, 487, 488, 489, 490, 491, 492, 493, 494, 495, 496, 497, 498, or any combination thereof relative to Fanzor ID16 or in position(s) analogous there to in analogous, heterologous, or orthologous to Fanzor ID16. In some embodiments, the Fanzor polypeptide comprises a mutation at one or more amino acid residues selected from 469, 485, 490, 491, 508, 513, 524, 527, 528, 398, 400, 392, 192, 604, 607, 614, 615, 609, 613, 522, 538, 503, or any combination thereof relative to Fanzor ID16 or in position(s) analogous there to in analogous, heterologous, or orthologous to Fanzor ID16. In some embodiments, the Fanzor polypeptide comprises a mutation at one or more amino acids selected from 310, 487, 300, 498, 513, or any combination thereof relative to Fanzor ID16 or in position(s) analogous there to in analogous, heterologous, or orthologous to Fanzor ID16. In some embodiments, the amino acids(s) are independently mutated to R, K, H, A, V, P, D, E, I, or W.

[0158] In one example embodiment, the Fanzor polypeptides are or range between 125 and 1800 amino acids in size, such are or range between 125 and 30, 140, 150, 160, 170, 180, 190, 200, 210, 220, 230, 240, 250, 260, 270, 280, 290, 300, 310, 320, 330, 340, 350, 360, 370, 380, 390, 400, 410, 420, 430, 440, 450, 460, 470, 480, 490, 500, 510, 520, 530, 540, 550, 560, 570, 580, 590, 600, 610, 620, 630, 640, 650, 660, 670, 680, 690, 700, 710, 720, 730, 740, 750, 760, 770, 780, 790, 800, 810, 820, 830, 840, 850, 860, 870, 880, 890, 900, 910, 920, 930, 940, 950, 960, 970, 980, 990, 1000, 1010, 1020, 1030, 1040, 1050, 1060, 1070, 1080, 1090, 1100, 1110, 1120, 1130, 1140, 1150, 1160, 1170, 1180, 1190, 1200, 1210, 1220, 1230, 1240, 1250, 1260, 1270, 1280, 1290, 1300, 1310, 1320, 1330, 1340, 1350, 1360, 1370, 1380, 1390, 1400, 1410, 1420, 1430, 1440, 1450, 1460, 1470, 1480, 1490, 1500, 1510, 1520, 1530, 1540, 1550, 1560, 1570, 1580, 1590, 1600, 1610, 1620, 1630, 1640, 1650, 1660, 1670, 1680, 1690, 1700, 1710, 1720, 1730, 1740, 1750, 1760, 1770, 1780, 1790, or/to 1800 amino acids in size or any value or range of values therein.

[0159] In certain example embodiments, the Fanzor polypeptides are or range between 125 and 850 amino acids in size. In certain example embodiments, the Fanzor polypeptides are between 175 and 800 amino acids in size, between 200 and 790 amino acids in size, between 200 and 780 amino acids in size, between 200 and 770 amino acids in size, between 200 and 760 amino acids in size, between 200 and 750 amino acids in size, between 200 and 740 amino acids in size, between 200 and 730 amino acids in size, between 200 and 720 amino acids in size, between 200 and 720 amino acids in size, between 200 and 710 amino acids in size, between 200 and 700 amino acids in size, between 200 and 690 amino acids in size, between 200 and 680 amino acids in size, between 200 and 670 amino acids in size, between 200 and 660 amino acids in size, between 200 and 650 amino acids in size, between 200 and 640 amino acids in size, between 200 and 630 amino acids in size, between 200 and 620 amino acids in size, between 200 and 610 amino acids in size, between 200 and 600 amino acids in size, between 200 and 590 amino acids in size, between 200 and 580 amino acids in size, between 200 and 570 amino acids in size, between 200 and 560 amino acid, between 200 between 550 amino acids, between 200 and 540 amino acids, between 200 and 530 amino acids, between 200 and 520 amino acids, between 200 and 510 amino acids, between 200 and 500 amino acids, between 200 and 490 amino acids, between 200 and 480 amino acids, between 200 and 470 amino acids, between 200 and 460 amino acids, between 200 and 450 amino acids, between 200 and 440 amino acids, between 200 and 430 amino acids, between 200 and 420 amino acids, between 200 and 410 amino acids, between 210 and 500 amino acids, between 220 and 500 amino acids, between 230 and 500 amino acids, between 240 and 500 amino acids, between 250 and 500 amino acids, between 260 and 500 amino acids, between 270 and 500 amino acids, between 280 and 500 amino acids, between 290 and 500 amino acids, between 300 and 500 amino acids, between 250 and 490 amino acids, between 250 and 480 amino acids, between 250 and 490 amino acids, or between 250 and 600 amino acids. In one embodiment, the Fanzor polypeptide is between 300 and 500 amino acids, or between 350 and 450 amino acids. Fanzor polypeptides may be classified as Type 1 Fanzor polypeptides, which are typically between the size of a TnpB polypeptide and Cas12a, or Type 2 Fanzor polypeptides, which are typically smaller in size than a TnpB polypeptide.

[0160] In some embodiments, the Fanzor polypeptide is a Fanzor polypeptide from a metazoan, fungi, protist, or a dsDNA virus capable of infecting a eukaryote. See e.g., Bao et al. 2013. Mob DNA. 2013; 4:12 doi: 10.1186/1759-8753-4-12, particularly at Table 1, Supplementary material additional files 1 and 3. In some embodiments, is a Fanzor protein or functional domain thereof as set forth in Bao et al. 2013. Mob DNA. 2013; 4:12 doi: 10.1186/1759-8753-4-12.

[0161] In one example embodiment, the Fanzor polypeptide may be derived from (a) a yeast Fanzor; (b) an amoeba Fanzor; (c) a protist Fanzor; (d) a metazoan Fanzor; (e) an algae Fanzor; (f) a fungi Fanzor; (g) a eukaryotic Fanzor; (h) a Mollusca Fanzor; (i) from an organism of the genus Eremothecium, Ashbya, Spizellomyces, Torulaspora, Naegleria, Rhizopus , Guillardia, Batillaria, Dreissena, Mercenaria, Batrachochytrium, or Parasitella; (j) a virus Fanzor, optionally a Bodo saltans virus, a Harvforvirus, Homavirus, Dishui Lake Large Algae virus 1, or Yasminevirus Fanzor; (k) a Fanzor selected from or is encoded by a polynucleotide set forth in Table 1, Table 6, Table 7, Table 8, Table 9, Table 10, Table 11, Table 12, Table 13, Table 14, FIG. 20, FIG. 35, FIG. 56A-56D, or any combination thereof, or is a homolog, ortholog, or variant thereof; or (1) any combination of (a)-(k)

[0162] In some embodiments, the Fanzor polypeptide is from an organism of the genus Eremothecium, Ashbya, Spizellomyces, Torulaspora, Naegleria, Rhizopus, Guillardia, Batillaria, Dreissena, Mercenaria, Batrachochytrium, or Parasitella. In some embodiments, the Fanzor polypeptide is from an organism of the genus Eremothecium, Ashbya, Spizellomyces, Torulaspora, Naegleria, Rhizopus, Guillardia, Batrachochytrium, or Parasitella. In some embodiments, the Fanzor polypeptide is from Eremothecium cymbalaria, Ashbya gossypii, Spizellomyces punctatus, Torulaspora delbrueckii, Naegleria lovaniensis, or Rhizopus microspores. In some embodiments, the Fanzor polypeptide is from Spizellomyces punctatus. In some embodiments, the Fanzor polypeptide is from Bodo saltans virus, a Harvforvirus, Homavirus, Dishui Lake Large Algae virus 1.

[0163] In some embodiments, the Fanzor polypeptide is a eukaryotic Fanzor polypeptide. In some embodiments, the Fanzor polypeptide is from an organism of the genus Batillaria , Dreissena, Mercenaria, or Naegieria. In some embodiments, the Fanzor polypeptide is from Batillaria attramentaria, Dreissena polymorpha, Mercenaria mercenaria, or Naegleria lovaniensis.

[0164] In one embodiment, the Fanzor polypeptides may comprise a modified naturally occurring protein, functional fragment or truncated version thereof, or a non-naturally occurring protein. In one embodiment, the Fanzor polypeptide comprises one or more domains originating from other Fanzor polypeptides, more particularly originating from different organisms. In one embodiment, the Fanzor polypeptides may be designed by in silico approaches. Examples of in silico protein design have been described in the art and are therefore known to a skilled person.

[0165] In one embodiment, the Fanzor polypeptide is a homologue or ortholog to a TnpB polypeptide from Epsilonproteobacteria bacterium, or Actinoplanes lobatus strain DSM 43150, Actinomadura celluolosilytica strain DSM 45823, Actinomadura namibiensis strain DSM 44197, Alicyclobacillus macrosprangiidus strain DSM 17980, Lipingzhangella halophila strain DSM 102030, or Ktedonobacter recemifer. In one embodiment, the Fanzor polypeptide is a homologue or ortholog from Ktedonobacter racemifer, or comprises a conserved RNA region with similarity to the 5′ ITR of K. racemifer Fanzor loci. See e.g., Table 5, FIG. 2 of U.S. Provisional Application 63/282,352. In an aspect, the Fanzor polypeptide encodes 5′ ITR/RNA (with RNA on the 3′ strand), Fanzor (3′ strand), and lastly 3′ ITR. In one example embodiment, the Fanzor may comprise a Fanzor protein or a Fanzor homolog, found in eukaryotic genomes.

[0166] The Fanzor polypeptides also encompasses homologs or orthologs of Fanzor polypeptides whose sequences are specifically described herein. The terms “ortholog” and “homolog” are well known in the art. By means of further guidance, a “homolog” of a protein as used herein is a protein of the same species which performs the same or a similar function as the protein it is a homolog of. Homologous proteins may be, but need not be, structurally related, or are only partially structurally related. An “ortholog” of a protein as used herein is a protein of a different species which performs the same or a similar function as the protein it is an orthologue of. Orthologous proteins may but need not be structurally related or are only partially structurally related. In particular embodiments, the homolog or ortholog of a Fanzor polypeptide such as referred to herein has a sequence homology or identity of at least 80%, at least 85%, at least 90%, at least 95% with a Fanzor polypeptide. In further embodiments, the homolog or ortholog of a Fanzor polypeptide has a sequence identity of at least 80%, at least 85%, at least 90%, or at least 95% with a wildtype Fanzor polypeptide, in particular embodiment a Fanzor sequence identified in Table 1 or a polypeptide, or a polypeptide encoded by a sequence or portion thereof identified in Table 6, Table 7, Table 8, Table 9, Table 10, Table 11, Table 12, Table 13 and/or Table 14. In particular embodiments, a homolog or ortholog is identified according to its domain structure and/or function. In embodiments, the homolog or ortholog comprises catalytic residues and/or domains as defined herein, including any as identified in Table 1, Table 6, Table 7, Table 8, Table 9, Table 10, Table 11, Table 12, Table 13, and/or Table 14. Sequence alignments conducted as described herein, as well as folding studies and domain predictions as taught herein can aid in the identification of a homolog or ortholog with the structural and functional characteristics identifying Fanzor polypeptides, particularly those with conserved residues, including catalytic residues, and domains of Fanzor polypeptides, such as any of those identified or encoded by a sequence in Table 1, Table 6, Table 7, Table 8, Table 9, Table 10, Table 11, Table 12, Table 13, and/or Table 14.

[0167] In one embodiment, the Fanzor loci comprises inverted terminal repeats (ITRs). An inverted terminal repeat may be present on the 5′ or 3′ end of the Fanzor sequence. In an aspect, the inverted terminal repeat may comprise between about 20 to about 40 nucleotides, for example, 20, 21, 22, 23, 24, about 25, 26, 27, 28, 29, 30, 31, 32, 33, 34, 35, 36, 37, 38, 39, or 40 nucleotides. In embodiments, the ITR comprises about 25 to 35 nucleotides, about 28 to 32 nucleotides. In an aspect, the ITR shares similarity with one or more inverted terminal repeats with sequences encoding TnpB polypeptides. In one embodiment, the 5′ ITR or 3′ITR of Fanzor has a sequence homology or identity of at least 80%, at least 85%, at least 90%, at least 95%, at least 96%, at least 97% at least 98% or at least 99% identity with an TnpB 5′ ITR or 3′ ITR. In an embodiment, the 5′ ITR of the Fanzor is homologous to the 5′ ITR of the TnpB.

[0168] In one embodiment, the Fanzor loci comprises a region of high conservation beyond the sequence encoding the polypeptide that indicates the presence of RNA at the 5′ end of the Fanzor loci. In an aspect, the region upstream of the 5′ ITR of Fanzor comprises a region encoding an RNA species that comprises a guide sequence.

### Ruv-C Domain

[0169] In one embodiment, the Fanzor polypeptide comprises at least at least one RuvC-like nuclease domain. The RuvC domain may comprise conserved catalytic amino acids indicative of the RuvC catalytic residue. In an example embodiment, the RuvC catalytic residue may be referenced relative to 186D, 270E or 354D of TnpB polypeptide 488601079; to 172D, 254E, or 337D of TnpB polypeptide 297565028; or to 179D, 268E, or 351D of TnpB polypeptide 257060308. See e.g., Altae-Tran et al. Science. 374:57-65 (2021) and/or U.S. Provisional Application Ser. No. 63/282,352, particularly at Table 1A. The catalytic residue may be referenced relative to 195D, 277E, or 361D of the sequence alignment in FIG. 2. In an aspect, the RuvC domain may comprise multiple subdomains, e.g., RuvC-I, RuvC-II and RuvC-III. The subdomains may be separated by interval sequences on the amino acid sequence of the protein.

[0170] In one embodiment, examples of the RuvC domain include any polypeptides a structural similarity and/or sequence similarity to a RuvC domain described in the art. For example, the RuvC domain may share a structural similarity and/or sequence similarity to a RuvC of Cas9. In some examples, the RuvC domain may have an amino acid sequence that share at least 50%, at least 55%, at least 60%, at least 65%, at least 70%, at least 75%, at least 80%, at least 85%, at least 90%, at least 95%, at least 99%, or 100% sequence identity with RuvC domains known in the art.

[0171] In some examples, the RuvC domain comprise RuvC-I sub-domain, RuvC-II sub-domain, and RuvC-III sub-domain. Examples of the RuvC-I sub-domain also include any polypeptides having structural similarity and/or sequence similarity to a RuvC-I domain described in the art. For example, the RuvC-I domain may share a structural similarity and/or sequence similarity to a RuvC-I found in bacterial or archaeal species, including CRISPR Cas proteins such as Cas9. In some examples, the RuvC domain may have an amino acid sequence that share at least 50%, at least 55%, at least 60%, at least 5%, at least 70%, at least 75%, at least 80%, at least 85%, at least 90%, at least 95%, at least 99%, or 100% sequence identity with RuvC-I domain. The RuvC-II domain also include any polypeptides a structural similarity and/or sequence similarity to a RuvC-II domain described in the art. For example, the RuvC-II domain may share a structural similarity and/or sequence similarity to a RuvC-II of Cas9. In some examples, the RuvC domain may have an amino acid sequence that share at least 50%, at least 55%, at least 60%, at least 5%, at least 70%, at least 75%, at least 80%, at least 85%, at least 90%, at least 95%, at least 99%, or 100% sequence identity with RuvC-II domains. The RuvC-III domain also include any polypeptides a structural similarity and/or sequence similarity to a RuvC-III domain described in the art. For example, the RuvC-III domains may share a structural similarity and/or sequence similarity to a RuvC-III of Cas9. In some examples, the RuvC domain may have an amino acid sequence that share at least 50%, at least 55%, at least 60%, at least 5%, at least 70%, at least 75%, at least 80%, at least 85%, at least 90%, at least 95%, at least 99%, or 100% sequence identity with RuvC-III domains.

[0172] For example, and as described in the art (e.g., Crystal structure of Cas9 in complex with nucleic acid component molecule and target DNA, Nishimasu et al. Cell, 2014) the RuvC domain of Cas9 consists of a six-stranded mixed β-sheet (β1, β2, β5, β11, β14 and β17) flanked by α-helices (α33, α34 and α39-α45) and two additional two-stranded antiparallel β-sheets (β3/β4 and β15/β16). It has been described that the RuvC domain of Cas9 shares structural similarity with the retroviral integrase superfamily members characterized by an RNase H fold, such as Escherichia coli RuvC (PDB code 1HJR, 14% identity, root-mean-square deviation (rmsd) of 3.6 Å for 126 equivalent Ca atoms) and Thermus thermophilus RuvC (PDB code 4LD0, 12% identity, rmsd of 3.4 Å for 131 equivalent Ca atoms). E. coli RuvC is a 3-layer alpha-beta sandwich containing a 5-stranded beta-sheet sandwiched between 5 alpha-helices. RuvC nucleases have four catalytic residues (e.g., Asp7, Glu70, His143 and Asp146 in T. thermophilus RuvC), and cleave Holliday junctions (or structurally analogous cruciform junctions) through a two-metal mechanism. Asp10 (Ala), Glu762, His983 and Asp986 of the Cas9 RuvC domain are located at positions similar to those of the catalytic residues of T. thermophilus RuvC. The RuvC-like domain of the Fanzor polypeptides may comprise 1, 2, 3 or 4 of the catalytic residues similar to the Cas9 protein.

[0173] In embodiments, the Fanzor polypeptide is a nuclease. In one embodiment, the Fanzor and nucleic acid component can direct sequence-specific nuclease activity. The cleavage may result in a 5′ overhang. The cleavage may occur distal to a target-adjacent motif (TAM) and may occur at the site of the spacer (guide) annealing site or 3′ of the target sequence. In an aspect, the Fanzor cleaves at multiple positions within and beyond the nucleic acid component annealing site. In an aspect, DNA cleavage occurs 15, 16, 17, 18, 19, 20, 21, 22, 23, 24, 25 or more base pairs distal to the TAM and results in a 5′ overhang. In some embodiments, DNA cleavage occurs about 20-22 base pairs distal to the TAM.

[0174] In an embodiment, the Fanzor polypeptide is active, i.e., possesses nuclease activity, over a temperature range of from about 37° C. to about 80° C. In an embodiment, the Fanzor polypeptide is active from about 37° C. to about 75° C., from about 37° C. to about 70° C., from about 37° C. to about 65° C., from about 37° C. to about 60° C., from about 37° C. to about 55° C., from about 37° C. to about 50° C., from about 37° C. to about 45° C. In an example embodiment, the Fanzor polypeptide is active in the range of 37° C. to 65° C. In an example embodiment, the Fanzor polypeptide is active in the range of 45° C. to 65° C. In an example embodiment, the Fanzor polypeptide is active in the range of 45° C. to 60° C.

[0175] In embodiments, the Fanzor polypeptides also encompasses homologs or orthologs of Fanzor polypeptides whose sequences are specifically described herein. The terms “ortholog” and “homolog” are well known in the art. By means of further guidance, a “homolog” of a protein as used herein is a protein of the same species which performs the same or a similar function as the protein it is a homolog of. Homologous proteins may but need not be structurally related, or are only partially structurally related. An “ortholog” of a protein as used herein is a protein of a different species which performs the same or a similar function as the protein it is an orthologue of. Orthologous nucleases may but need not be structurally related, or are only partially structurally related. In particular embodiments, the homolog or ortholog of a Fanzor polypeptides such as referred to herein has a sequence homology or identity of at least 80%, at least 85%, at least 90%, at least 95% with a Fanzor polypeptide. In further embodiments, the homolog or ortholog of a Fanzor polypeptide has a sequence identity of at least 80%, at least 85%, at least 90%, or at least 95% with a wildtype Fanzor polypeptide, in particular embodiment the Fanzor sequence identified in Table 1. In one embodiment, the Fanzor polypeptide displays collateral activity. In an aspect, the Fanzor polypeptide possesses collateral activity once triggered by target recognition. In an aspect, upon binding to the target sequence, the Fanzor polypeptide will non-specifically cleave polynucleotide sequences, e.g., DNA. The target-activated nonspecific nuclease activity of Fanzor is also referred to herein as collateral activity.

[0176] In an embodiment, the Fanzor protein displays nuclease activity towards both ssDNA and dsDNA target sequences. In an embodiment, the Fanzor protein displays nuclease activity towards both ssDNA and dsDNA wherein a TAM may not be necessary to cut a ssDNA target.

[0177] In embodiments, the Fanzor polypeptide is a nuclease. In one embodiment, the Fanzor and nucleic acid component molecule can direct sequence-specific nuclease activity. The Fanzor polypeptides provided herein may also exhibit RNA-guided recombinase activity. The homology to the RuvC domain and relatedness to the DDE family of recombinases indicate potential recombinase activity. In an embodiment the Fanzor polypeptides detailed herein exhibit a lack of nuclease activity, or reduced nuclease activity, and are provided with a transposable element, e.g. transposase, integrase, recombinase, allowing for RNA-guided target specific modifications.

### Exemplary Fanzor Polypeptides

[0178] In certain example embodiments, the Fanzor protein may comprise a sequence as set forth in Table 1, Table 6, Table 7, Table 10, Table 11, Table 12, and/or Table 14, or a portion thereof, such as a functional domain or thereof. In certain example embodiments, the Fanzor polypeptide is encoded by a sequence or portion thereof set forth in Table 8, Table 9, Table 13, and/or Table 14.

[0179] Table 1 provides a list of example Fanzor systems and the location of their loci in example source organisms.

TABLE 1
(SEQ ID NO: 1-312)

| | | |
|---|---|---|
| 1 | GCA_000708835.1_ASM70883v1_{—} | Klebsormidium nitens DNA, scaffold: kfl00709, whole |
| | genomic_\|_DF237658 | genome shotgunsequence. |
| 2 | GCA_000708835.1_ASM70883v1_{—} | Klebsormidium nitens DNA, scaffold: kfl01217, whole |
| | genomic_\|_DF238166 | genome shotgunsequence. |
| 3 | GCA_000708835.1_ASM70883v1_{—} | GCA_000708835.1_ASM70883v1_genomic_\|_<unknown_name>. |
| | genomic_\|_<unknown_name> | |
| 4 | GCA_002925995.2_T_m_triunguis- | GCA_002925995.2_T_m_triunguis- |
| | 2.0_genomic_\|_<unknown_name> | 2.0_genomic_\|_<unknown_name>. |
| 5 | GCA 009430475.1_Amar_v1_{—} | GCA_009430475.1_Amar_v1_genomic_\|_<unknown_name>. |
| | genomic_\|_<unknown_name> | |
| 6 | GCA_009025955.1_ASM902595v1_{—} | GCA_009025955.1_ASM902595v1_genomic_\|_<unknown_name>. |
| | genomic_\|_<unknown_name> | |
| 7 | GCA_009026005.1_ASM902600v1_{—} | GCA_009026005.1_ASM902600v1_genomic_\|_<unknown_name> |
| | genomic_\|_<unknown_name> | |
| 8 | GCA_009602685.1_ASM960268v1_{—} | GCA_009602685.1_ASM960268v1_genomic_\|_<unknown_name>. |
| | genomic_\|_<unknown_name> | |
| 9 | GCA_009829735.1_ASM982973v1_{—} | Pyropia yezoensis cultivar RZ chromosome 2, whole |
| | genomic_\|_CM020619 | genome shotgunsequence. |
| 10 | GCA_009829735.1_ASM982973v1_{—} | GCA_009829735.1_ASM982973v1_genomic_\|_<unknown_name>. |
| | genomic_\|_<unknown_name> | |
| 11 | GCA_003956735.1_Pr102_V2_{—} | GCA_003956735.1_Pr102_V2_genomic_\|_<unknown_name>. |
| | genomic_\|_<unknown_name> | |
| 12 | GCA_001278165.1_SOD158v2_{—} | GCA_001278165.1_SOD158v2_genomic_\|_<unknown_name>. |
| | genomic_\|_<unknown_name> | |
| 13 | GCA_001933325.1_CC14654_v1_{—} | GCA_001933325.1_CC14654_v1_genomic_\|_<unknown_name>. |
| | genomic_\|_<unknown_name> | |
| 14 | GCA_001933455.1_CC2176_v1_{—} | GCA_001933455.1_CC2176_v1_genomic_\|_<unknown_name>. |
| | genomic_\|_<unknown_name> | |
| 15 | GCA_001955675.1_CC1011_v1_{—} | GCA_001955675.1_CC1011_v1_genomic_\|_<unknown_name>. |
| | genomic_\|_<unknown_name> | |
| 16 | GCA_001933345.1_CC1008_v1_{—} | GCA_001933345.1_CC1008_v1_genomic_\|_<unknown_name>. |
| | genomic_\|_<unknown_name> | |
| 17 | GCA_001933465.1_CC2186_v1_{—} | GCA_001933465.1_CC2186_v1_genomic_\|_<unknown_name>. |
| | genomic_\|_<unknown_name> | |
| 18 | GCA_001278145.1_SOD69v2_{—} | GCA_001278145.1_SOD69v2_genomic_\|_<unknown_name>. |
| | genomic_\|_<unknown_name> | |
| 19 | GCA_009720205.1_ASM972020v1_{—} | Chlorella vulgaris strain NJ-7 NJ-7_scaffold00028, whole |
| | genomic_\|_VATV01000028 | genomeshotgun sequence. |
| 20 | GCA_009720215.1_ASM972021v1_{—} | Chlorella vulgaris strain UTEX259 |
| | genomic_\|_VATW01000042 | UTEX259_scaffold00042, wholegenome shotgun |
| | | sequence. |
| 21 | GCA_004335795.1_ASM433579v1_{—} | GCA_004335795.1_ASM433579v1_genomic_\|_<unknown_name>. |
| | genomic_\|_<unknown_name> | |
| 22 | GCA_004335865.1_ASM433586v1_{—} | GCA_004335865.1_ASM433586v1_genomic_\|_<unknown_name>. |
| | genomic_\|_<unknown_name> | |
| 23 | GCA_009848525.1_Psojae2019.1_{—} | GCA_009848525.1_Psojae2019.1_genomic_\|_<unknown_name>. |
| | genomic_\|_<unknown_name> | |
| 24 | GCA_000149755.2_P.sojae_V3.0_{—} | Phytophthora sojae unplaced genomic scaffold |
| | genomic_\|_JH159153 | PHYSOscaffold_3, wholegenome shotgun sequence. |
| 25 | GCA_004335715.1_ASM433571v1_{—} | Chlamydomonas sp. WS7, whole genome shotgun |
| | genomic_\|_QAXL01002383 | sequence. |
| 26 | GCA_004335755.1_ASM433575v1_{—} | Chlamydomonas sp. WS3, whole genome shotgun |
| | genomic_\|_QAXM01002383 | sequence. |
| 27 | GCA_010203745.1_Muccir1_3_{—} | Mucor lusitanicus strain MU402 FB192scaffold_3, whole |
| | genomic_\|_JAAECE010000003 | genomeshotgun sequence. |
| 28 | GCA_001638945.1_Mucci2_{—} | GCA_001638945.1_Mucci2_genomic_\|_<unknown_name>. |
| | genomic_\|_<unknown_name> | |
| 29 | GCA_010014875.1_ASM1001487v1_{—} | Psitteuteles goldiei isolate Piper_X7F3MAPY5K, whole |
| | genomic_\|_JAAAKH010039255 | genome shotgunsequence. |
| 30 | GCA_004798425.1_ASM479842v1_{—} | Digenea simplex isolate OPJ- |
| | genomic_\|_RXNZ01001972 | A18NODE_contig_02773+_length_42877_cov_1, whole |
| | | genome shotgunsequence. |
| 31 | GCA_011763775.1_ASM1176377v1_{—} | GCA_011763775.1_ASM1176377v1_genomic_\|_<unknown_name>. |
| | genomic_\|_<unknown_name> | |
| 32 | GCA_011763815.1_ASM1176381v1_{—} | GCA_011763815.1_ASM1176381v1_genomic_\|_<unknown_name>. |
| | genomic_\|_<unknown_name> | |
| 33 | GCA_000587855.1_B50_{—} | GCA_000587855.1_B50_genomic_\|_<unknown_name>. |
| | genomic_\|_<unknown_name> | |
| 34 | GCA_000697435.1_RhiVarB7584- | GCA_000697435.1_RhiVarB7584- |
| | 1.0_genomic_\|_<unknown_name> | 1.0_genomic_\|_<unknown_name>. |
| 35 | GCA_000812005.1_ASM81200v1_{—} | GCA_000812005.1_ASM81200v1_genomic_\|_<unknown_name>. |
| | genomic_\|_<unknown_name> | |
| 36 | GCA_000812005.1_ASM81200v1_{—} | GCA_000812005.1_ASM81200v1_genomic_\|_<unknown_name>. |
| | genomic_\|_<unknown_name> | |
| 37 | GCA_902505575.1_Diploid_assembly_{—} | GCA_902505575.1_Diploid_assembly_genomic_\|_<unknown_name>. |
| | genomic_\|_<unknown_name> | |
| 38 | GCA_000330985.1_DBM_FJ_V1.1_{—} | GCA_000330985.1_DBM_FJ_V1.1_genomic_\|_<unknown_name>. |
| | genomic_\|_<unknown_name> | |
| 39 | GCA_000333055.2_SMSTG_v2.0_{—} | GCA_000333055.2_SMSTG_v2.0_genomic_\|_<unknown_name>. |
| | genomic_\|_<unknown_name> | |
| 40 | GCA_000338815.2_SMST21v2.0_{—} | Phytophthora lateralis SMST21 unplaced genomic |
| | genomic_\|_KQ479608 | scaffoldscf_4885_1206, whole genome shotgun sequence. |
| 41 | GCA_002891735.1_TetSoc1_{—} | GCA_002891735.1_TetSoc1_genomic_\|_<unknown_name>. |
| | genomic_\|_<unknown_name> | |
| 42 | GCA_002891735.1_TetSocl_genomic | GCA_002891735.1_TetSoc1_genomic_\|_<unknown_name>. |
| | <unknown_name> | |
| 43 | GCA_002891735.1_TetSoc1_{—} | GCA_002891735.1_TetSoc1_genomic_\|_<unknown_name>. |
| | genomic_\|_<unknown_name> | |
| 44 | GCA_012979215.1_ASM1297921v1_{—} | Spodoptera frugiperda isolate AFR2017 ctg4, whole |
| | genomic_\|_WUTJ01000333 | genome shotgunsequence. |
| 45 | GCA_012979215.1_ASM1297921v1_{—} | Spodoptera frugiperda isolate AFR2017 ctg30, whole |
| | genomic_\|_WUTJ01000224 | genome shotgunsequence. |
| 46 | GCA_011064685.1_ZJU_Sfru_1.0_{—} | Spodoptera frugiperda isolate Faw-zju chromosome 32, |
| | genomic_\|_CM021696 | whole genomeshotgun sequence. |
| 47 | GCA_011064685.1_ZJU_Sfru_1.0_{—} | Spodoptera frugiperda isolate Faw-zju chromosome 7, |
| | genomic_\|_CM021671 | whole genomeshotgun sequence. |
| 48 | GCA_009829735.1_ASM982973v1_{—} | Pyropia yezoensis cultivar RZ chromosome 3, whole |
| | genomic_\|_CM020620 | genome shotgunsequence. |
| 49 | GCA_009829735.1_ASM982973v1_{—} | Pyropia yezoensis cultivar RZ chromosome 1, whole |
| | genomic_\|_CM020618 | genome shotgunsequence. |
| 50 | GCA_000931965.1_ASM93196v1_{—} | GCA_000931965.1_ASM93196v1_genomic_\|_<unknown_name>. |
| | genomic_\|_<unknown_name> | |
| 51 | GCA_002806785.1_ASM280678v1_{—} | GCA_002806785.1_ASM280678v1_genomic_\|_<unknown_name>. |
| | genomic_\|_<unknown_name> | |
| 52 | GCA_012922725.1_ASM1292272v1_{—} | GCA_012922725.1_ASM1292272v1_genomic_\|_<unknown_name>. |
| | genomic_\|_<unknown_name> | |
| 53 | GCA_012922805.1_ASM1292280v1_{—} | GCA_012922805.1_ASM1292280v1_genomic_\|_<unknown_name>. |
| | genomic_\|_<unknown_name> | |
| 54 | GCA_013036735.1_ASM1303673v1_{—} | GCA_013036735.1_ASM1303673v1_genomic_\|_<unknown_name>. |
| | genomic_\|_<unknown_name> | |
| 55 | GCA_003055205.1_ASM305520v1_{—} | Rhodotorula mucilaginosa strain JGTA-S1 Scaffold_5, |
| | genomic_\|_PEFX01000029 | whole genomeshotgun sequence. |
| 56 | GCA_004143675.1_ASM414367v1_{—} | Rhodotorula mucilaginosa strain CYJ03000007F_{—} |
| | genomic_\|_RZHN01000008 | arrow_pilon, wholegenome shotgun sequence. |
| 57 | GCA_012922695.1_ASM1292269v1_{—} | Rhodotorula mucilaginosa strain IIF5SW- |
| | genomic_\|_JABBMU010000021 | F2NODE_21_length_302823_cov_114.905287, whole |
| | | genome shotgunsequence. |
| 58 | GCA_012922825.1_ASM1292282v1_{—} | GCA_012922825.1_ASM1292282v1_genomic_\|_<unknown_name>. |
| | genomic_\|_<unknown_name> | |
| 59 | GCA_012922835.1_ASM1292283v1_{—} | Rhodotorula mucilaginosa strain IF6SW- |
| | genomic_\|_JABBYN010000100 | B2NODE_100_length_46004_cov_97.333703, whole |
| | | genome shotgun sequence. |
| 60 | GCA_013030385.1_ASM1303038v1_{—} | Rhodotorula mucilaginosa strain IF2SG- |
| | genomic_\|_JABENE010000097 | BINODE_97_length_46011_cov_114.621740, whole |
| | | genome shotgun sequence. |
| 61 | GCA_013030405.1_ASM1303040v1_{—} | Rhodotorula mucilaginosa strain IF6SG- |
| | genomic_\|_JABENF010000049 | BINODE_49_length_139707_cov_99.078472, whole |
| | | genome shotgun sequence. |
| 62 | GCA_013030415.1_ASM1303041v1_{—} | Rhodotorula mucilaginosa strain IF8SG- |
| | genomic_\|_JABENH010000098 | BINODE_98_length_46004_cov_100.932654, whole |
| | | genome shotgun sequence. |
| 63 | GCA_013036305.1_ASM1303630v1_{—} | Rhodotorula mucilaginosa strain IF3SG- |
| | genomic_\|_JABBHW010000095 | BINODE_95_length_46022_cov_116.600109, whole |
| | | genome shotgun sequence. |
| 64 | GCA_013036385.1_ASM1303638v1_{—} | Rhodotorula mucilaginosa strain IFCSG- |
| | genomic_\|_JABBHY010000096 | BINODE_96_length_46033_cov_83.106254, whole |
| | | genome shotgun sequence. |
| 65 | GCA_013036445.1_ASM1303644v1_{—} | Rhodotorula mucilaginosa strain IIF2*SW- |
| | genomic_\|_JABBIA010000102 | FINODE_102_length_46028_cov_72.672085, whole |
| | | genome shotgun sequence. |
| 66 | GCA_013036475.1_ASM1303647v1_{—} | Rhodotorula mucilaginosa strain IIF8SW- |
| | genomic_\|_JABBIB010000097 | FINODE_97_length_47253_cov_95.890177, whole |
| | | genome shotgun sequence. |
| 67 | GCA_013036505.1_ASM1303650v1_{—} | GCA_013036505.1_ASM1303650v1_genomic_\|_<unknown_name>. |
| | genomic_\|_<unknown_name> | |
| 68 | GCA_013036515.1_ASM1303651v1_{—} | Rhodotorula mucilaginosa strain IIF1SW- |
| | genomic_\|_JABBIC010000018 | FINODE_18_length_302847_cov_68.964399, whole |
| | | genome shotgun sequence. |
| 69 | GCA_013036595.1_ASM1303659v1_{—} | Rhodotorula mucilaginosa strain IF4SW- |
| | genomic_\|_JABBIF010000012 | F2NODE_12_length_398650_cov_66.964822, whole |
| | | genome shotgun sequence. |
| 70 | GCA_013036615.1_ASM1303661v1_{—} | Rhodotorula mucilaginosa strain IF3SW- |
| | genomic_\|_JABBIG010000021 | F2NODE_21_length_302850_cov_72.478738, whole |
| | | genome shotgun sequence. |
| 71 | GCA_013036665.1_ASM1303666v1_{—} | Rhodotorula mucilaginosa strain IIF2*SW- |
| | genomic_\|_JABBII010000100 | BINODE_100_length_46004_cov_89.506325, whole |
| | | genome shotgun sequence. |
| 72 | GCA_013036715.1_ASM1303671v1_{—} | Rhodotorula mucilaginosa strain IIF8SW- |
| | genomic_\|_JABBIJ010000101 | B3NODE_101_length_46013_cov_80.269244, whole |
| | | genome shotgun sequence. |
| 73 | GCA_013036755.1_ASM1303675v1_{—} | Rhodotorula mucilaginosa strain IIF6SW- |
| | genomic_\|_JABBIL010000099 | B2NODE_99_length_46002_cov_97.487055, whole |
| | | genome shotgun sequence. |
| 74 | GCA_013036805.1_ASM1303680v1_{—} | Rhodotorula mucilaginosa strain IF8SW- |
| | genomic_\|_JABBIM010000021 | P2NODE_21_length_302849_cov_99.676420, whole |
| | | genome shotgun sequence. |
| 75 | GCA_013036825.1_ASM1303682v1_{—} | Rhodotorula mucilaginosa strain IF8SW- |
| | genomic_\|_JABBIN010000091 | B2NODE_91_length_46003_cov_108.885816, whole |
| | | genome shotgun sequence. |
| 76 | GCA_013036835.1_ASM1303683v1_{—} | Rhodotorula mucilaginosa strain IF7SW- |
| | genomic_\|_JABBIO010000100 | B3NODE_100_length_46122_cov_90.899514, whole |
| | | genome shotgun sequence. |
| 77 | GCA_013036895.1_ASM1303689v1_{—} | GCA_013036895.1_ASM1303689v1_genomic_\|_<unknown_name>. |
| | genomic_\|_<unknown_name> | |
| 78 | GCA_013036955.1_ASM1303695v1_{—} | Rhodotorula mucilaginosa strain IF1SW- |
| | genomic_\|_JABBIR010000094 | BINODE_94_length_46021_cov_96.461431, whole |
| | | genome shotgun sequence. |
| 79 | GCA_001600475.1_JCM_30513_assembly_{—} | Pilasporangium apinafurcum DNA, scaffold: scaffold_107, |
| | v001_genomic_\|_BCKD01000108 | strain: JCM30513, whole genome shotgun sequence. |
| 80 | GCA_001600475.1_JCM_30513_assembly_{—} | Pilasporangium apinafurcum DNA, scaffold: scaffold_189, |
| | v001_genomic_\|_BCKD01000190 | strain: JCM30513, whole genome shotgun sequence. |
| 81 | GCA_004764695.1_ASM476469v1_{—} | GCA_004764695.1_ASM476469v1_genomic_\|_<unknown_name>. |
| | genomic_\|_<unknown_name> | |
| 82 | GCA_004764695.1_ASM476469v1_{—} | GCA_004764695.1_ASM476469v1_genomic_\|_<unknown_name>. |
| | genomic_\|_<unknown_name> | |
| 83 | GCA_004764695.1_ASM476469v1_{—} | GCA_004764695.1_ASM476469v1_genomic_\|_<unknown_name>. |
| | genomic_\|_<unknown_name> | |
| 84 | GCA_004764695.1_ASM476469v1_{—} | GCA_004764695.1_ASM476469v1_genomic_\|_<unknown_name>. |
| | genomic_\|_<unknown_name> | |
| 85 | GCA_000333075.3_PhyKer238_432v3_{—} | GCA_000333075.3_PhyKer238_432v3_genomic_\|_<unknown_name>. |
| | genomic_\|_<unknown_name> | |
| 86 | GCA_000333095.2_PhyKer629_1v2_{—} | GCA_000333095.2_PhyKer629_1v2_genomic_\|_<unknown_name>. |
| | genomic_\|_<unknown_name> | |
| 87 | GCA_000333115.2_PhyKer844_4v2_{—} | GCA_000333115.2_PhyKer844_4v2_genomic_\|_<unknown_name> |
| | genomic_\|_<unknown_name> | |
| 88 | GCA_001021125.1_ASM102112v1_{—} | GCA_001021125.1_ASM102112v1_genomic_\|_<unknown_name>. |
| | genomic_\|_<unknown_name> | |
| 89 | GCA_009720215.1_ASM972021v1_{—} | Chlorella vulgaris strain UTEX259 |
| | genomic_\|_VATW01000042 | UTEX259_scaffold00042, wholegenome shotgun |
| | | sequence. |
| 90 | GCA_001712635.2_PfChile5v2.0_{—} | GCA_001712635.2_PfChile5v2.0_genomic_\|_<unknown_name>. |
| | genomic_\|_<unknown_name> | |
| 91 | GCA_001712635.2_PfChile5v2.0_{—} | Nothophytophthora sp. Chile5 scaffold_10711, whole |
| | genomic_\|_MBAC02010711 | genome shotgunsequence. |
| 92 | GCA_000708835.1_ASM70883v1_{—} | Klebsormidium nitens DNA, scaffold: kfl01583, whole |
| | genomic_\|_DF238532 | genome shotgunsequence. |
| 93 | GCA_000708835.1_ASM70883v1_{—} | Klebsormidium nitens DNA, scaffold: kfl01013, whole |
| | genomic_\|_DF237962 | genome shotgunsequence. |
| 94 | GCA_000812005.1_ASM81200v1_{—} | Coccomyxa sp. LA000219 unplaced genomic scaffold |
| | genomic_\|_KN714628 | scaffold40, wholegenome shotgun sequence. |
| 95 | GCA_000812005.1_ASM81200v1_{—} | GCA_000812005.1_ASM81200v1_genomic_\|_<unknown_name>. |
| | genomic_\|_<unknown_name> | |
| 96 | GCA_001586965.3_ASM158696v3_{—} | GCA_001586965.3_ASM158696v3_genomic_\|_<unknown_name>. |
| | genomic_\|_<unknown_name> | |
| 97 | GCA_001586965.3_ASM158696v3_{—} | GCA_001586965.3_ASM158696v3_genomic_\|_<unknown_name> |
| | genomic_\|_<unknown_name> | |
| 98 | GCA_002192655.2_ASM219265v2_{—} | GCA_002192655.2_ASM219265v2_genomic_\|_<unknown_name>. |
| | genomic_\|_<unknown_name> | |
| 99 | GCA_002192655.2_ASM219265v2_{—} | GCA_002192655.2_ASM219265v2_genomic_\|_<unknown_name>. |
| | genomic_\|_<unknown_name> | |
| 100 | GCA_006384855.1_TSEL_PacBio_{—} | Tetraselmis striata strain LANL1001 Tetraselmis_3046, |
| | SMRT_genomic_\|_VCJN01003028 | whole genomeshotgun sequence. |
| 101 | GCA_006384855.1_TSEL_PacBio_{—} | Tetraselmis striata strain LANL1001 Tetraselmis_3046, |
| | SMRT_genomic_\|_VCJN01003028 | whole genomeshotgun sequence. |
| 102 | GCA_009720205.1_ASM972020v1_{—} | GCA_009720205.1_ASM972020v1_genomic_\|_<unknown_name>. |
| | genomic_\|_<unknown_name> | |
| 103 | GCA_001021125.1_ASM102112v1_{—} | GCA_001021125.1_ASM102112v1_genomic_\|_<unknown_name>. |
| | genomic_\|_<unknown_name> | |
| 104 | GCA_012845835.1_ASM1284583v1_{—} | GCA_012845835.1_ASM1284583v1_genomic_\|_<unknown_name>. |
| | genomic_\|_<unknown_name> | |
| 105 | GCA_001742925.1_Okinawa_mozuku_{—} | Cladosiphon okamuranus DNA, scaffold: oki- |
| | S_1.0_genomic_\|_DF977970 | s_mms_scaffold_286, wholegenome shotgun sequence. |
| 106 | GCA_012845835.1_ASM1284583v1_{—} | Undaria pinnatifida isolate A029 HiC_scaffold_23, whole |
| | genomic_\|_JABAKD010000023 | genomeshotgun sequence. |
| 107 | GCA_012845835.1_ASM1284583v1_{—} | Undaria pinnatifida isolate A029 HiC_scaffold_23, whole |
| | genomic_\|_JABAKD010000023 | genomeshotgun sequence. |
| 108 | GCA_013435995.1_ASM1343599v1_{—} | Rhipicephalus microplus strain Deutsch |
| | genomic_\|_WOVZ01023221 | ScK7wFR_23227; HRSCAF = 77848, whole genome |
| | | shotgun sequence. |
| 109 | GCA_013339745.1_ASM1333974v1_{—} | GCA_013339745.1_ASM1333974v1_genomic_\|_<unknown_name>. |
| | genomic_\|_<unknown_name> | |
| 110 | GCA_000004825.1_PolPal_Dec2009_{—} | Polysphondylium pallidum PN500 unplaced genomic |
| | genomic_GL290995 | scaffoldPPL_scaffold13, whole genome shotgun sequence. |
| 111 | GCA_000004825.1_PolPal_Dec2009_{—} | GCA_000004825.1_PolPal_Dec2009_genomic_\|_<unknown_name>. |
| | genomic_\|_<unknown_name> | |
| 112 | GCA_000149755.2_P.sojae_V3.0_{—} | Phytophthora sojae unplaced genomic scaffold |
| | genomic_\|_JH159159 | PHYSOscaffold_9, wholegenome shotgun sequence. |
| 113 | GCA_009848525.1_Psojae2019.1_{—} | Phytophthora sojae strain |
| | genomic_\|_WWEI01000003 | P6497P6497_smrtdenovo_ONT10kb_corrected_contig_3, |
| | | whole genome shotgunsequence. |
| 114 | GCA_002891735.1_TetSoc1_{—} | GCA_002891735.1_TetSoc1_genomic_\|_<unknown_name>. |
| | genomic_\|_<unknown_name> | |
| 115 | GCA_002891735.1_TetSoc1_{—} | GCA_002891735.1_TetSoc1_genomic_\|_<unknown_name>. |
| | genomic_\|_<unknown_name> | |
| 116 | GCA_004764695.1_ASM476469v1_{—} | GCA_004764695.1_ASM476469v1_genomic_\|_<unknown_name>. |
| | genomic_\|_<unknown_name> | |
| 117 | GCA_004764695.1_ASM476469v1_{—} | GCA_004764695.1_ASM476469v1_genomic_\|_<unknown_name>. |
| | genomic_\|_<unknown_name> | |
| 118 | GCA_004764695.1_ASM476469v1_{—} | GCA_004764695.1_ASM476469v1_genomic_\|_<unknown_name> |
| | genomic_\|_<unknown_name> | |
| 119 | GCA_004764695.1_ASM476469v1_{—} | Schizochytrium sp. TIO01 scaffold6_size4854460, whole |
| | genomic_\|_SMSO01000034 | genomeshotgun sequence. |
| 120 | GCA_004764695.1_ASM476469v1_{—} | Schizochytrium sp. TIO01 scaffold4_size9043229, whole |
| | genomic_\|_SMSO01000032 | genomeshotgun sequence. |
| 121 | GCA_004764695.1_ASM476469v1_{—} | Schizochytrium sp. TIO01 scaffold9_size5018410, whole |
| | genomic_\|_SMSO01000037 | genomeshotgun sequence. |
| 122 | GCA_006384855.1_TSEL_PacBio_{—} | Tetraselmis striata strain LANL1001 Tetraselmis_2972, |
| | SMRT_genomic_\|_VCJN01002955 | whole genomeshotgun sequence. |
| 123 | GCA_006384855.1_TSEL_PacBio_{—} | Tetraselmis striata strain LANL1001 Tetraselmis_2972, |
| | SMRT_genomic_\|_VCJN01002955 | whole genomeshotgun sequence. |
| 124 | GCA_006384855.1_TSEL_PacBio_{—} | Tetraselmis striata strain LANL1001 Tetraselmis_2972, |
| | SMRT_genomic_\|_VCJN01002955 | whole genomeshotgun sequence. |
| 125 | GCA_006384855.1_TSEL_PacBio_{—} | Tetraselmis striata strain LANL1001 Tetraselmis_2972, |
| | SMRT_genomic_\|_VCJN01002955 | whole genomeshotgun sequence. |
| 126 | GCA_013167095.1_ASM1316709v1_{—} | Daphnia carinata strain WSL Contig00030, whole genome |
| | genomic_\|_WJBH01000312 | shotgunsequence. |
| 127 | GCA_013167095.1_ASM1316709v1_{—} | Daphnia carinata strain WSL Contig00030, whole genome |
| | genomic_\|_WJBH01000312 | shotgunsequence. |
| 128 | GCA_000193105.1_Acas_2.0_{—} | GCA_000193105.1_Acas_2.0_genomic_\|_< unknown_name>. |
| | genomic_\|_<unknown_name> | |
| 129 | GCA_000313135.1_Acastellanii.strNEFF_{—} | Acanthamoeba castellanii str. Neff unplaced genomic |
| | v1_genomic_\|_KB007908 | scaffoldscf7180000084776, whole genome shotgun |
| | | sequence. |
| 130 | GCA_013030395.1_ASM1303039v1_{—} | GCA_013030395.1_ASM1303039v1_genomic_\|_<unknown_name>. |
| | genomic_\|_<unknown_name> | |
| 131 | GCA_013036355.1_ASM1303635v1_{—} | GCA_013036355.1_ASM1303635v1_genomic_\|_<unknown_name>. |
| | genomic_\|_<unknown_name> | |
| 132 | GCA_013036525.1_ASM1303652v1_{—} | GCA_013036525.1_ASM1303652v1_genomic_\|_<unknown_name>. |
| | genomic_\|_<unknown_name> | |
| 133 | GCA_012922765.1_ASM1292276v1_{—} | GCA_012922765.1_ASM1292276v1_genomic_\|_<unknown_name>. |
| | genomic_\|_<unknown_name> | |
| 134 | GCA_013036365.1_ASM1303636v1_{—} | GCA_013036365.1_ASM1303636v1_genomic_\|_<unknown_name>. |
| | genomic_\|_<unknown_name> | |
| 135 | GCA_013036655.1_ASM1303665v1_{—} | GCA_013036655.1_ASM1303665v1_genomic_\|_<unknown_name>. |
| | genomic_\|_<unknown_name> | |
| 136 | GCA_013435795.1_ASM1343579v1_{—} | GCA_013435795.1_ASM1343579v1_genomic_\|_<unknown_name>. |
| | genomic_\|_<unknown_name> | |
| 137 | GCA_013435795.1_ASM1343579v1_{—} | GCA_013435795.1_ASM1343579v1_genomic_\|_<unknown_name>. |
| | genomic_\|_<unknown_name> | |
| 138 | GCA_009663345.1_TniFNL_draft_{—} | GCA_009663345.1_TniFNL_draft_assembly_genomic_\|_<unknown_name>. |
| | assembly_genomic_\|_<unknown_name> | |
| 139 | GCA_003590095.1_tn1_{—} | GCA_003590095.1_tn1_genomic_\|_<unknown_name>. |
| | genomic_\|_<unknown_name> | |
| 140 | GCA_902809745.2_Scenedesmus- | Tetradesmus acuminatus strain SAG 38.81 genome |
| | acuminatus-SAG- | assembly, contig: scf7180000027569, whole genome |
| | 38.81_genomic_\|_CADDIJ020000232 | shotgun sequence. |
| 141 | GCA_902809745.2_Scenedesmus- | Tetradesmus acuminatus strain SAG 38.81 genome |
| | acuminatus-SAG- | assembly, contig: scf7180000030319, whole genome |
| | 38.81_genomic_\|_CADDIJ020002999 | shotgun sequence. |
| 142 | GCA_902809745.2_Scenedesmus- | Tetradesmus acuminatus strain SAG 38.81 genome |
| | acuminatus-SAG- | assembly, contig: scf7180000028938, whole genome |
| | 38.81_genomic_\|_CADDIJ020002356 | shotgun sequence. |
| 143 | GCA_902809745.2_Scenedesmus- | Tetradesmus acuminatus strain SAG 38.81 genome |
| | acuminatus-SAG- | assembly, contig: scf7180000027504, whole genome |
| | 38.81_genomic_\|_CADDIJ020002159 | shotgun sequence. |
| 144 | GCA_902809745.2_Scenedesmus- | Tetradesmus acuminatus strain SAG 38.81 genome |
| | acuminatus-SAG- | assembly, contig: scf7180000028326, whole genome |
| | 38.81_genomic_\|_CADDIJ020003124 | shotgun sequence. |
| 145 | GCA_002192655.2_ASM219265v2_{—} | GCA_002192655.2_ASM219265v2_genomic_\|_<unknown_name>. |
| | genomic_\|_<unknown_name> | |
| 146 | GCA_002192655.2_ASM219265v2_{—} | Mamestra configurata isolate AAFC colony scaffold565, |
| | genomic_\|_NDFZ01005234 | whole genomeshotgun sequence. |
| 147 | GCA_002192655.2_ASM219265v2_{—} | Mamestra configurata isolate AAFC colony scaffold10821, |
| | genomic_\|_NDFZ01003509 | wholegenome shotgun sequence. |
| 148 | GCA_002192655.2_ASM219265v2_{—} | GCA_002192655.2_ASM219265v2_genomic_\|_<unknown_name>. |
| | genomic_\|_<unknown_name> | |
| 149 | GCA_013283005.1_ASM1328300v1_{—} | GCA_013283005.1_ASM1328300v1_genomic_\|_<unknown_name>. |
| | genomic_\|_<unknown_name> | |
| 150 | GCA_013283005.1_ASM1328300v1_{—} | Paralithodes platypus isolate Beidaihe-2018 chromosome |
| | genomic_\|_CM023285 | 33, wholegenome shotgun sequence. |
| 151 | GCA_013283005.1_ASM1328300v1_{—} | GCA_013283005.1_ASM1328300v1_genomic_\|_<unknown_name>. |
| | genomic_\|_<unknown_name> | |
| 152 | GCA_013283005.1_ASM1328300v1_{—} | Paralithodes platypus isolate Beidaihe-2018 chromosome |
| | genomic_\|_CM023342 | 85, wholegenome shotgun sequence. |
| 153 | GCA_000143045.1_pug_{—} | GCA_000143045.1_pug_genomic_\|_<unknown_name>. |
| | genomic_\|_<unknown_name> | |
| 154 | GCA_000143045.1_pug_{—} | Pythium ultimum DAOM BR144 unplaced genomic |
| | genomic_\|_GL376622 | scaffoldscf_1117875582025, whole genome shotgun |
| | | sequence. |
| 155 | GCA_001638945.1_Mucci2_{—} | GCA_001638945.1_Mucci2_genomic_\|_<unknown_name>. |
| | genomic_\|_<unknown_name> | |
| 156 | GCA_010203745.1_Muccir1_3_{—} | GCA_010203745.1_Muccir1_3_genomic_\|_<unknown_name>. |
| | genomic_\|_<unknown_name> | |
| 157 | GCA_013435795.1_ASM1343579v1_{—} | GCA_013435795.1_ASM1343579v1_genomic_\|_<unknown_name>. |
| | genomic_\|_<unknown_name> | |
| 158 | GCA_013435795.1_ASM1343579v1_{—} | GCA_013435795.1_ASM1343579v1_genomic_\|_<unknown_name>. |
| | genomic_\|_<unknown_name> | |
| 159 | GCA_013435795.1_ASM1343579v1_{—} | Chlamydomonas sp. ICE-L scaffold_745, whole genome |
| | genomic_\|_JACBWV010000810 | shotgunsequence. |
| 160 | GCA_013435795.1_ASM1343579v1_{—} | Chlamydomonas sp. ICE-L scaffold_79, whole genome |
| | genomic_\|_JACBWV010000681 | shotgun sequence. |
| 161 | GCA_001278225.1_SODL51v2_{—} | GCA_001278225.1_SODL51v2_genomic_\|_<unknown_name>. |
| | genomic_\|_<unknown_name> | |
| 162 | GCA_001933405.1_CC1048_v1_{—} | GCA_001933405.1_CC1048_v1_genomic_\|_<unknown_name>. |
| | genomic_\|_<unknown_name> | |
| 163 | GCA_001933315.1_CC2184_v1_{—} | GCA_001933315.1_CC2184_v1_genomic_\|_<unknown_name>. |
| | genomic_\|_<unknown_name> | |
| 164 | GCA_001933485.1_CC2187_v1_{—} | Phytophthora ramorum strain EU1 isolate |
| | genomic_\|_MLJG01001351 | CC2187scf_11801_1022.contig_1, whole genome shotgun |
| | | sequence. |
| 165 | GCA_001933395.1_CC1033_v1_{—} | Phytophthora ramorum strain EU1 isolate |
| | genomic_\|_MLJB01001374 | CC1033scf_65018_1045.contig_1, whole genome shotgun |
| | | sequence. |
| 166 | GCA_001278135.1_SOD58v2_{—} | Phytophthora ramorum strain EU2 isolate |
| | genomic_\|_LHTS01000796 | SOD58/12scf_18997_724.contig_1, whole genome |
| | | shotgun sequence. |
| 167 | GCA_001278215.1_SOD136v2_{—} | Phytophthora ramorum strain EU2 isolate SOD136/11 |
| | genomic_\|_KQ439796 | unplaced genomicscaffold scf_18210_1167, whole |
| | | genome shotgun sequence. |
| 168 | GCA_002892825.2_ISE6_asm2.2_deduplicated_{—} | Ixodes scapularis tig00386297, whole genome shotgun |
| | genomic_\|_PKSA02002535 | sequence. |
| 169 | GCA_002892825.2_ISE6_asm2.2_deduplicated_{—} | Ixodes scapularis tig02189122, whole genome shotgun |
| | genomic_\|_PKSA02004961 | sequence. |
| 170 | GCA_002892825.2_ISE6_asm2.2_deduplicated_{—} | Ixodes scapularis tig02189161, whole genome shotgun |
| | genomic_\|_PKSA02003809 | sequence. |
| 171 | GCA_002892825.2_ISE6_asm2.2_deduplicated_{—} | Ixodes scapularis tig00387840, whole genome shotgun |
| | genomic_\|_PKSA02001876 | sequence. |
| 172 | GCA_002892825.2 ISE6_asm2.2_deduplicated_{—} | Ixodes scapularis tig00021533, whole genome shotgun |
| | genomic_\|_PKSA02012815 | sequence. |
| 173 | GCA_006384855.1_TSEL_PacBio_{—} | GCA_006384855.1_TSEL_PacBio_SMRT_genomic_\|_<unknown_name>. |
| | SMRT_genomic_\|_<unknown_name> | |
| 174 | GCA_006384855.1_TSEL_PacBio_{—} | GCA_006384855.1_TSEL_PacBio_SMRT_genomic_\|_<unknown name>. |
| | SMRT_genomic_\|_<unknown_name> | |
| 175 | GCA_006384855.1_TSEL_PacBio_{—} | GCA_006384855.1_TSEL_PacBio_SMRT_genomic_\|_<unknown_name>. |
| | SMRT_genomic_\|_<unknown_name> | |
| 176 | GCA_013435795.1_ASM1343579v1_{—} | GCA_013435795.1_ASM1343579v1_genomic_\|_<unknown_name>. |
| | genomic_\|_<unknown_name> | |
| 177 | GCA_013435795.1_ASM1343579v1_{—} | GCA_013435795.1_ASM1343579v1_genomic_\|_<unknown_name>. |
| | genomic_\|_<unknown_name> | |
| 178 | GCA_013435795.1_ASM1343579v1_{—} | GCA_013435795.1_ASM1343579v1_genomic_\|_<unknown_name>. |
| | genomic_\|_<unknown_name> | |
| 179 | GCA_013435795.1_ASM1343579v1_{—} | GCA_013435795.1_ASM1343579v1_genomic_\|_<unknown_name>. |
| | genomic_\|_<unknown_name> | |
| 180 | GCA_013435795.1_ASM1343579v1_{—} | GCA_013435795.1_ASM1343579v1_genomic_\|_<unknown_name>. |
| | genomic_\|_<unknown_name> | |
| 181 | GCA_013435795.1_ASM1343579v1_{—} | GCA_013435795.1_ASM1343579v1_genomic_\|_<unknown_name>. |
| | genomic_\|_<unknown_name> | |
| 182 | GCA_013435795.1_ASM1343579v1_{—} | GCA_013435795.1_ASM1343579v1_genomic_\|_<unknown_name>. |
| | genomic_\|_<unknown_name> | |
| 183 | GCA_013435795.1_ASM1343579v1_{—} | GCA_013435795.1_ASM1343579v1_genomic_\|_<unknown_name>. |
| | genomic_\|_<unknown_name> | |
| 184 | GCA_013435795.1_ASM1343579v1_{—} | GCA_013435795.1_ASM1343579v1_genomic_\|_<unknown_name>. |
| | genomic_\|_<unknown_name> | |
| 185 | GCA_013435795.1_ASM1343579v1_{—} | GCA_013435795.1_ASM1343579v1_genomic_\|_<unknown_name>. |
| | genomic_\|_<unknown_name> | |
| 186 | GCA_013435795.1_ASM1343579v1_{—} | GCA_013435795.1_ASM1343579v1_genomic_\|_<unknown_name>. |
| | genomic_\|_<unknown_name> | |
| 187 | GCA_013435795.1_ASM1343579v1_{—} | GCA_013435795.1_ASM1343579v1_genomic_\|_<unknown_name>. |
| | genomic_\|_<unknown_name> | |
| 188 | GCA_013435795.1_ASM1343579v1_{—} | GCA_013435795.1_ASM1343579v1_genomic_\|_<unknown_name>. |
| | genomic_\|_<unknown_name> | |
| 189 | GCA_013435795.1_ASM1343579v1_{—} | GCA_013435795.1_ASM1343579v1_genomic_\|_<unknown_name>. |
| | genomic_\|_<unknown_name> | |
| 190 | GCA_013435795.1_ASM1343579v1_{—} | GCA_013435795.1_ASM1343579v1_genomic_\|_<unknown_name>. |
| | genomic_\|_<unknown_name> | |
| 191 | GCA_013435795.1_ASM1343579v1_{—} | GCA_013435795.1_ASM1343579v1_genomic_\|_<unknown_name>. |
| | genomic_\|_<unknown_name> | |
| 192 | GCA_013435795.1_ASM1343579v1_{—} | GCA_013435795.1_ASM1343579v1_genomic_\|_<unknown_name>. |
| | genomic_\|_<unknown_name> | |
| 193 | GCA_013435795.1_ASM1343579v1_{—} | GCA_013435795.1_ASM1343579v1_genomic_\|_<unknown_name>. |
| | genomic_\|_<unknown_name> | |
| 194 | GCA_013435795.1_ASM1343579v1_{—} | GCA_013435795.1_ASM1343579v1_genomic_\|_<unknown_name>. |
| | genomic_\|_<unknown_name> | |
| 195 | GCA_013435795.1_ASM1343579v1_{—} | GCA_013435795.1_ASM1343579v1_genomic_\|_<unknown_name>. |
| | genomic_\|_<unknown_name> | |
| 196 | GCA_013435795.1_ASM1343579v1_{—} | GCA_013435795.1_ASM1343579v1_genomic_\|_<unknown_name>. |
| | genomic_\|_<unknown_name> | |
| 197 | GCA_013435795.1_ASM1343579v1_{—} | GCA_013435795.1_ASM1343579v1_genomic_\|_<unknown_name>. |
| | genomic_\|_<unknown_name> | |
| 198 | GCA_013435795.1_ASM1343579v1_{—} | GCA_013435795.1_ASM1343579v1_genomic_\|_<unknown_name>. |
| | genomic_\|_<unknown_name> | |
| 199 | GCA_013435795.1_ASM1343579v1_{—} | GCA_013435795.1_ASM1343579v1_genomic_\|_<unknown_name>. |
| | genomic_\|_<unknown_name> | |
| 200 | GCA_013435795.1_ASM1343579v1_{—} | GCA_013435795.1_ASM1343579v1_genomic_\|_<unknown_name>. |
| | genomic_\|_<unknown_name> | |
| 201 | GCA_013435795.1_ASM1343579v1_{—} | GCA_013435795.1_ASM1343579v1_genomic_\|_<unknown_name>. |
| | genomic_\|_<unknown_name> | |
| 202 | GCA_013435795.1_ASM1343579v1_{—} | GCA_013435795.1_ASM1343579v1_genomic_\|_<unknown_name>. |
| | genomic_\|_<unknown_name> | |
| 203 | GCA_013435795.1_ASM1343579v1_{—} | GCA_013435795.1_ASM1343579v1_genomic_\|_<unknown_name>. |
| | genomic_\|_<unknown_name> | |
| 204 | GCA_013435795.1_ASM1343579v1_{—} | GCA_013435795.1_ASM1343579v1_genomic_\|_<unknown_name>. |
| | genomic_\|_<unknown_name> | |
| 205 | GCA_013435795.1_ASM1343579v1_{—} | GCA_013435795.1_ASM1343579v1_genomic_\|_<unknown_name>. |
| | genomic_\|_<unknown_name> | |
| 206 | GCA_013435795.1_ASM1343579v1_{—} | GCA_013435795.1_ASM1343579v1_genomic_\|_<unknown_name>. |
| | genomic_\|_<unknown_name> | |
| 207 | GCA_013435795.1_ASM1343579v1_{—} | GCA_013435795.1_ASM1343579v1_genomic_\|_<unknown_name>. |
| | genomic_\|_<unknown_name> | |
| 208 | GCA_013435795.1_ASM1343579v1_{—} | GCA_013435795.1_ASM1343579v1_genomic_\|_<unknown_name>. |
| | genomic_\|_<unknown_name> | |
| 209 | GCA_013435795.1_ASM1343579v1_{—} | GCA_013435795.1_ASM1343579v1_genomic_\|_<unknown_name>. |
| | genomic_\|_<unknown_name> | |
| 210 | GCA_902602495.3_Esub_Assebmy2_{—} | Ectocarpus sp. CCAP 1310/34 strain Bft15b genome |
| | genomic_\|_CACKRE030000866 | assembly, contig: ESUB_scaffold1789, whole genome |
| | | shotgun sequence. |
| 211 | GCA_902705575.1_Esub_Assebmy_{—} | GCA_902705575.1_Esub_Assebmy_complete_genomic_\|_<unknown_name>. |
| | complete_genomic_\|_<unknown_name> | |
| 212 | GCA_004335615.1_ASM433561v1_{—} | Chloroidium sp. JM, whole genome shotgun sequence. |
| | genomic_\|_QAXI01000449 | |
| 213 | GCA_004335625.1_ASM433562v1_{—} | Chloroidium sp. CF, whole genome shotgun sequence. |
| | genomic_\|_QAXJ01000001 | |
| 214 | GCA_009848525.1_Psojae2019.1_{—} | GCA_009848525.1_Psojae2019.1_genomic_\|_<unknown_name>. |
| | genomic_\|_<unknown_name> | |
| 215 | GCA_000149755.2_P.sojae_V3.0_{—} | Phytophthora sojae unplaced genomic scaffold |
| | genomic_\|_JH159151 | PHYSOscaffold_1, wholegenome shotgun sequence. |
| 216 | GCA_000149755.2_P.sojae_V3.0_{—} | Phytophthora sojae unplaced genomic scaffold |
| | genomic_\|_JH159153 | PHYSOscaffold_3, wholegenome shotgun sequence. |
| 217 | GCA_000697135.1_RhiOry99-133- | Rhizopus oryzae 99-133 ctg7180000127893_1, whole |
| | 1.0_genomic_\|_JNDX01002515 | genome shotgunsequence. |
| 218 | GCA_000697195.1_MucRam97-1192- | GCA_000697195.1_MucRam97-1192- |
| | 1.0_genomic_\|_<unknown_name> | 1.0 genomic_\|_<unknown_name>. |
| 219 | GCA_011800955.1_ASM1180095v1_{—} | Rhizopus oryzae strain GL40 |
| | genomic_\|_JAANRM010000850 | NODE_851_length_14818_cov_42.072, wholegenome |
| | | shotgun sequence. |
| 220 | GCA_011800985.1_ASM1180098v1_{—} | Rhizopus oryzae strain GL53 |
| | genomic_\|_JAANRL010000814 | NODE_815_length_14818_cov_40.9535, whole genome |
| | | shotgun sequence. |
| 221 | GCA_011801035.1_ASM1180103v1_{—} | Rhizopus oryzae strain GL38 |
| | genomic_\|_JAANRN010000837 | NODE_838_length_14818_cov_43.3954, whole genome |
| | | shotgun sequence. |
| 222 | GCA_011801055.1_ASM1180105v1_{—} | Rhizopus oryzae strain GL31 |
| | genomic_\|_JAANRO010000807 | NODE_808_length_14835_cov_30.4701, whole genome |
| | | shotgun sequence. |
| 223 | GCA_011801645.1_ASM1180164v1_{—} | Rhizopus oryzae strain GL49 |
| | genomic_\|_JAANRB010002740 | NODE_2740_length_3061_cov_55.1477, whole genome |
| | | shotgun sequence. |
| 224 | GCA_011950945.1_ASM1195094v1_{—} | Rhizopus oryzae strain GL41 |
| | genomic_\|_JAANRD010000833 | NODE_833_length_14711_cov_37.6819, whole genome |
| | | shotgun sequence. |
| 225 | GCA_011952145.1_ASM1195214v1_{—} | Rhizopus oryzae strain GL37 |
| | genomic_\|_JAANRJ010000815 | NODE_815_length_14869_cov_40.4539, whole genome |
| | | shotgun sequence. |
| 226 | GCA_011952175.1_ASM1195217v1_{—} | Rhizopus oryzae strain GL32 |
| | genomic_\|_JAANRK010000790 | NODE_791_length_15684_cov_35.334, wholegenome |
| | | shotgun sequence. |
| 227 | GCA_011764265.1_ASM1176426v1_{—} | GCA 011764265.1_ASM1176426v1_genomic_\|_<unknown_name>. |
| | genomic_\|_<unknown_name> | |
| 228 | GCA_011801385.1_ASM1180138v1_{—} | GCA_011801385.1_ASM1180138v1_genomic_\|_<unknown_name>. |
| | genomic_\|_<unknown_name> | |
| 229 | GCA_011764225.1_ASM1176422v1_{—} | GCA_011764225.1_ASM1176422v1_genomic_\|_<unknown_name>. |
| | genomic_\|_<unknown_name> | |
| 230 | GCA_011801305.1_ASM1180130v1_{—} | Rhizopus oryzae strain GL46 |
| | genomic_\|_JAANRS010000865 | NODE_866_length_13693_cov_40.8166, whole genome |
| | | shotgun sequence. |
| 231 | GCA_011801335.1_ASM1180133v1_{—} | Rhizopus oryzae strain GL22 |
| | genomic_\|_JAANRP010000857 | NODE_971_length_13318_cov_41.8099, whole genome |
| | | shotgun sequence. |
| 232 | GCA_011801505.1_ASM1180150v1_{—} | Rhizopus oryzae strain GL44 |
| | genomic_\|_JAANRU010001014 | NODE_1015_length_12499_cov_36.2515, whole genome |
| | | shotgun sequence. |
| 233 | GCA_011801555.1_ASM1180155v1_{—} | Rhizopus oryzae strain GL52 |
| | genomic_\|_JAANRX010000993 | NODE_993_length_12636_cov_42.0685, whole genome |
| | | shotgun sequence. |
| 234 | GCA_011801575.1_ASM1180157v1_{—} | Rhizopus oryzae strain GL34 |
| | genomic_\|_JAANRW010000980 | NODE_980_length_12936_cov_43.8233, whole genome |
| | | shotgun sequence. |
| 235 | GCA_011801605.1_ASM1180160v1_{—} | Rhizopus oryzae strain GL56 |
| | genomic_\|_JAANRT010000988 | NODE_989_length_12605_cov_56.0753, whole genome |
| | | shotgun sequence. |
| 236 | GCA_011950985.1_ASM1195098v1_{—} | Rhizopus oryzae strain GL43 |
| | genomic_\|_JAANRF010000987 | NODE_987_length_12605_cov_19.5725, whole genome |
| | | shotgun sequence. |
| 237 | GCA_011951285.1_ASM1195128v1_{—} | Rhizopus oryzae strain GL42 |
| | genomic_\|_JAANRG010001004 | NODE_1004_length_12767_cov_22.8081, whole genome |
| | | shotgun sequence. |
| 238 | GCA_011952115.1_ASM1195211v1_{—} | Rhizopus oryzae strain GL7 |
| | genomic_\|_JAANRI010000863 | NODE_863_length_12471_cov_25.2721, wholegenome |
| | | shotgun sequence. |
| 239 | GCA_013435795.1_ASM1343579v1_{—} | GCA_013435795.1_ASM1343579v1_genomic_\|_<unknown_name>. |
| | genomic_\|_<unknown_name> | |
| 240 | GCA_013435795.1_ASM1343579v1_{—} | GCA_013435795.1_ASM1343579v1_genomic_\|_<unknown_name>. |
| | genomic_\|_<unknown_name> | |
| 241 | GCA_013435795.1_ASM1343579v1_{—} | GCA_013435795.1_ASM1343579v1_genomic_\|_<unknown_name>. |
| | genomic_\|_<unknown_name> | |
| 242 | GCA_013435795.1_ASM1343579v1_{—} | GCA_013435795.1_ASM1343579v1_genomic_\|_<unknown_name>. |
| | genomic_\|_<unknown_name> | |
| 243 | GCA_001483015.1_ASM148301v1_{—} | GCA_001483015.1_ASM148301v1_genomic_\|_<unknown_name>. |
| | genomic_\|_<unknown_name> | |
| 244 | GCA_001482985.1_ASM148298v1_{—} | Phytophthora nicotianae strain race 1 scaffold991, whole |
| | genomic_\|_LNFP01001009 | genomeshotgun sequence. |
| 245 | GCA_003328465.1_ASM332846v1_{—} | Phytophthora nicotianae strain JM01 scaffold_166, whole |
| | genomic_\|_NIOD01000166 | genomeshotgun sequence. |
| 246 | GCA_000365545.1_Phyt_para_CJ01A1_{—} | GCA_000365545.1_Phyt_para_CJ01A1_V1_genomic_\|_<unknown_name>. |
| | V1_genomic_\|_<unknown_name> | |
| 247 | GCA_012658955.1_USDA_Pnic_BL162_{—} | Phytophthora nicotianae strain BL162 |
| | 1.0_genomic_\|_JAAKBE010002713 | Contig_2713: Phytophthora, whole genome shotgun |
| | | sequence. |
| 248 | GCA_003730235.1_ASM373023v1_{—} | GCA_003730235.1_ASM373023v1_genomic_\|_<unknown_name> |
| | genomic_\|_<unknown_name> | |
| 249 | GCA_004335795.1_ASM433579v1_{—} | GCA_004335795.1_ASM433579v1_genomic_\|_<unknown_name>. |
| | genomic_\|_<unknown_name> | |
| 250 | GCA_004335865.1_ASM433586v1_{—} | GCA_004335865.1_ASM433586v1_genomic_\|_<unknown_name>. |
| | genomic_\|_<unknown_name> | |
| 251 | GCA_013435795.1_ASM1343579v1_{—} | GCA_013435795.1_ASM1343579v1_genomic_\|_<unknown_name>. |
| | genomic_\|_<unknown_name> | |
| 252 | GCA_013435795.1_ASM1343579v1_{—} | GCA_013435795.1_ASM1343579v1_genomic_\|_<unknown_name>. |
| | genomic_\|_<unknown_name> | |
| 253 | GCA_013435795.1_ASM1343579v1_{—} | GCA_013435795.1_ASM1343579v1_genomic_\|_<unknown_name>. |
| | genomic_\|_<unknown_name> | |
| 254 | GCA_013435795.1_ASM1343579v1_{—} | GCA_013435795.1_ASM1343579v1_genomic_\|_<unknown_name>. |
| | genomic_\|_<unknown_name> | |
| 255 | GCA_013435795.1_ASM1343579v1_{—} | GCA_013435795.1_ASM1343579v1_genomic_\|_<unknown_name>. |
| | genomic_\|_<unknown_name> | |
| 256 | GCA_013435795.1_ASM1343579v1_{—} | GCA_013435795.1_ASM1343579v1_genomic_\|_<unknown_name>. |
| | genomic_\|_<unknown_name> | |
| 257 | GCA_013435795.1_ASM1343579v1_{—} | GCA_013435795.1_ASM1343579v1_genomic_\|_<unknown_name>. |
| | genomic_\|_<unknown_name> | |
| 258 | GCA_000193105.1_Acas_2.0_{—} | GCA_000193105.1_Acas_2.0_genomic_\|_<unknown_name>. |
| | genomic_\|_<unknown_name> | |
| 259 | GCA_000826445.1_Acanthamoeba_quina_{—} | GCA_000826445.1_Acanthamoeba_quina_genomic_\|_<unknown_name>. |
| | genomic_\|_<unknown_name> | |
| 260 | GCA_002284615.2_Dunsall_v._2_{—} | GCA_002284615.2_Dunsall_v._2_genomic_\|_<unknown_name>. |
| | genomic_\|_<unknown_name> | |
| 261 | GCA_002284615.2_Dunsall_v._2_{—} | GCA_002284615.2_Dunsall_v._2_genomic_\|_<unknown_name> |
| | genomic_\|_<unknown_name> | |
| 262 | GCA_004335715.1_ASM433571v1_{—} | GCA_004335715.1_ASM433571v1_genomic_\|_<unknown_name>. |
| | genomic_\|_<unknown_name> | |
| 263 | GCA_004335755.1_ASM433575v1_{—} | GCA_004335755.1_ASM433575v1_genomic_\|_<unknown_name>. |
| | genomic_\|_<unknown_name> | |
| 264 | GCA_006384855.1_TSEL_PacBio_{—} | GCA_006384855.1_TSEL_PacBio_SMRT_genomic_\|_<unknown_name>. |
| | SMRT_genomic_\|_<unknown_name> | |
| 265 | GCA_006384855.1_TSEL_PacBio_{—} | GCA_006384855.1_TSEL_PacBio_SMRT_genomic_\|_<unknown_name>. |
| | SMRT_genomic_\|_<unknown_name> | |
| 266 | GCA_001185145.1_ASM118514v1_{—} | Balamuthia mandrillaris strain CDC-V039 unitig_3077, |
| | genomic_LFUI01000036 | whole genomeshotgun sequence. |
| 267 | GCA_001185145.1_ASM118514v1_{—} | Balamuthia mandrillaris strain CDC-V039 unitig_577, |
| | genomic_\|_LFUI01000239 | whole genomeshotgun sequence. |
| 268 | GCA_008828725.1_ASM882872v1_{—} | GCA_008828725.1_ASM882872v1_genomic_\|_<unknown_name>. |
| | genomic_\|_<unknown_name> | |
| 269 | GCA_000978595.1_SJ6.1_{—} | Saccharina japonica cultivar Ja scaffold156, whole genome |
| | genomic_\|_XRI01000156 | shotgunsequence. |
| 270 | GCA_902705575.1_Esub_Assebmy_complete_{—} | GCA_902705575.1_Esub_Assebmy_complete_genomic_\|_<unknown_name>. |
| | genomic_\|_<unknown_name> | |
| 271 | GCA_902602495.3_Esub_Assebmy2_{—} | Ectocarpus sp. CCAP 1310/34 strain Bft15b genome |
| | genomic_\|_CACKRE030002068 | assembly, contig: ESUB_scaffold2929, whole genome |
| | | shotgun sequence. |
| 272 | GCA_902602495.3_Esub_Assebmy2_{—} | GCA_902602495.3_Esub_Assebmy2_genomic_\|_<unknown_name>. |
| | genomic_\|_<unknown_name> | |
| 273 | GCA_004764655.1_pasteur_ecto_instagraal_{—} | Ectocarpus sp. Ec32 chromosome 6, whole genome |
| | genomic_\|_CM015678 | shotgun sequence. |
| 274 | GCA_000310025.1_ASM31002v1_{—} | GCA_000310025.1_ASM31002v1_genomic_\|_<unknown_name>. |
| | genomic_\|_<unknown_name> | |
| 275 | GCA_902602495.3_Esub_Assebmy2_{—} | GCA_902602495.3_Esub_Assebmy2_genomic_\|_<unknown_name>. |
| | genomic_\|_<unknown_name> | |
| 276 | GCA_011763795.1_ASM1176379v1_{—} | GCA_011763795.1_ASM1176379v1_genomic_\|_<unknown_name>. |
| | genomic_\|_<unknown_name> | |
| 277 | GCA_011763585.1_ASM1176358v1_{—} | GCA_011763585.1_ASM1176358v1_genomic_\|_<unknown_name>. |
| | genomic_\|_<unknown_name> | |
| 278 | GCA_011763855.1_ASM1176385v1_{—} | GCA_011763855.1_ASM1176385v1_genomic_\|_<unknown_name>. |
| | genomic_\|_<unknown_name> | |
| 279 | GCA_011763895.1_ASM1176389v1_{—} | GCA_011763895.1_ASM1176389v1_genomic_\|_<unknown_name>. |
| | genomic_\|_<unknown_name> | |
| 280 | GCA_013435795.1_ASM1343579v1_{—} | GCA_013435795.1_ASM1343579v1_genomic_\|_<unknown_name>. |
| | genomic_\|_<unknown_name> | |
| 281 | GCA_013435795.1_ASM1343579v1_{—} | GCA_013435795.1_ASM1343579v1_genomic_\|_<unknown_name>. |
| | genomic_\|_<unknown_name> | |
| 282 | GCA_013435795.1_ASM1343579v1_{—} | GCA_013435795.1_ASM1343579v1_genomic_\|_<unknown_name>. |
| | genomic_\|_<unknown_name> | |
| 283 | GCA_013435795.1_ASM1343579v1_{—} | GCA_013435795.1_ASM1343579v1_genomic_\|_<unknown_name>. |
| | genomic_\|_<unknown_name> | |
| 284 | GCA_013435795.1_ASM1343579v1_{—} | GCA_013435795.1_ASM1343579v1_genomic_\|_<unknown_name>. |
| | genomic_\|_<unknown_name> | |
| 285 | GCA_013435795.1_ASM1343579v1_{—} | GCA_013435795.1_ASM1343579v1_genomic_\|_<unknown_name>. |
| | genomic_\|_<unknown_name> | |
| 286 | GCA_902705575.1_Esub_Assebmy_complete_{—} | GCA_902705575.1_Esub_Assebmy_complete_genomic_\|_<unknown_name>. |
| | genomic_\|_<unknown_name> | |
| 287 | GCA_902602495.3_Esub_Assebmy2_{—} | GCA_902602495.3_Esub_Assebmy2_genomic_\|_<unknown_name>. |
| | genomic_\|_<unknown_name> | |
| 288 | GCA_902602495.3_Esub_Assebmy2_{—} | Ectocarpus sp. CCAP 1310/34 strain Bft15b genome |
| | genomic_\|_CACKRE030002068 | assembly, contig: ESUB_scaffold2929, whole genome |
| | | shotgun sequence. |
| 289 | GCA_000338815.2_SMST21v2.0_{—} | GCA_000338815.2_SMST21v2.0_genomic_\|_<unknown_name>. |
| | genomic_\|_<unknown_name> | |
| 290 | GCA_000149735.1_ASM14973v1_{—} | GCA_000149735.1_ASM14973v1_genomic_\|_<unknown_name>. |
| | genomic_\|_<unknown_name> | |
| 291 | GCA_000340395.2_CC2275_v2_{—} | GCA_000340395.2_CC2275_v2_genomic_\|_<unknown_name>. |
| | genomic_\|_<unknown_name> | |
| 292 | GCA_001278155.1_SOD22v2_{—} | GCA_001278155.1_SOD22v2_genomic_\|_<unknown_name>. |
| | genomic_\|_<unknown_name> | |
| 293 | GCA_001278235.1_SOD169v2_{—} | GCA_001278235.1_SOD169v2_genomic_\|_<unknown_name>. |
| | genomic_\|_<unknown_name> | |
| 294 | GCA_001933335.1_CC12475v1_{—} | GCA_001933335.1_CC12475v1_genomic_\|_<unknown_name>. |
| | genomic_\|_<unknown_name> | |
| 295 | GCA_001933415.1_CC2168_v1_{—} | GCA_001933415.1_CC2168_v1_genomic_\|_<unknown_name>. |
| | genomic_\|_<unknown_name> | |
| 296 | GCA_000336535.2 EU2_996_3_v2_{—} | GCA_000336535.2_EU2_996_3_v2_genomic_\|_<unknown_name>. |
| | genomic_\|_<unknown_name> | |
| 297 | GCA_013435795.1_ASM1343579v1_{—} | Chlamydomonas sp. ICE-L scaffold_633, whole genome |
| | genomic_\|_JACBWV010000423 | shotgunsequence. |
| 298 | GCA_013435795.1_ASM1343579v1_{—} | GCA_013435795.1_ASM1343579v1_genomic_\|_<unknown_name>. |
| | genomic_\|_<unknown_name> | |
| 299 | GCA_013435795.1_ASM1343579v1_{—} | GCA_013435795.1_ASM1343579v1_genomic_\|_<unknown_name>. |
| | genomic_\|_<unknown_name> | |
| 300 | GCA_013435795.1_ASM1343579v1_{—} | GCA_013435795.1_ASM1343579v1_genomic_\|_<unknown_name>. |
| | genomic_\|_<unknown_name> | |
| 301 | GCA_013435795.1_ASM1343579v1_{—} | GCA_013435795.1_ASM1343579v1_genomic_\|_<unknown_name>. |
| | genomic_\|_<unknown_name> | |
| 302 | GCA_013435795.1_ASM1343579v1_{—} | Chlamydomonas sp. ICE-L scaffold_288, whole genome |
| | genomic_\|_JACBWV010000660 | shotgunsequence. |
| 303 | GCA_013435795.1_ASM1343579v1_{—} | Chlamydomonas sp. ICE-L scaffold_151, whole genome |
| | genomic_\|_JACBWV010000673 | shotgunsequence. |
| 304 | GCA_013435795.1_ASM1343579v1_{—} | Chlamydomonas sp. ICE-L scaffold_865, whole genome |
| | genomic_\|_JACBWV010000099 | shotgunsequence. |
| 305 | GCA_013435795.1_ASM1343579v1_{—} | Chlamydomonas sp. ICE-L scaffold_354, whole genome |
| | genomic_\|_JACBWV010000587 | shotgunsequence. |
| 306 | GCA_013435795.1_ASM1343579v1_{—} | Chlamydomonas sp. ICE-L scaffold_216, whole genome |
| | genomic_\|_JACBWV010000592 | shotgunsequence. |
| 307 | GCA_013435795.1_ASM1343579v1_{—} | Chlamydomonas sp. ICE-L scaffold_511, whole genome |
| | genomic_\|_JACBWV010000626 | shotgunsequence. |
| 308 | GCA_013435795.1_ASM1343579v1_{—} | GCA_013435795.1_ASM1343579v1_genomic_\|_<unknown_name>. |
| | genomic_\|_<unknown_name> | |
| 309 | GCA_013435795.1_ASM1343579v1_{—} | Chlamydomonas sp. ICE-L scaffold_920, whole genome |
| | genomic_\|_JACBWV010000392 | shotgunsequence. |
| 310 | GCA_013435795.1_ASM1343579v1_{—} | Chlamydomonas sp. ICE-L scaffold_358, whole genome |
| | genomic_\|_JACBWV010000579 | shotgunsequence. |
| 311 | GCA_013435795.1_ASM1343579v1_{—} | GCA_013435795.1_ASM1343579v1_genomic_\|_<unknown_name>. |
| | genomic_\|_<unknown_name> | |
| 312 | GCA_013435795.1_ASM1343579v1_{—} | Chlamydomonas sp. ICE-L scaffold_511, whole genome |
| | genomic_\|_JACBWV010000626 | shotgunsequence. |

### Protein Modifications

[0180] The Fanzor polypeptide may comprise one or more modifications. As used herein, the term “modified” with regard to a Fanzor polypeptide generally refers to a Fanzor polypeptide having one or more modifications or mutations (including point mutations, truncations, insertions, deletions, chimeras, fusion proteins, etc.) compared to the wild-type counterpart from which it is derived. By derived is meant that the derived enzyme is largely based, in the sense of having a high degree of sequence homology with, a wildtype enzyme, but that it has been mutated (modified) in some way as known in the art or as described herein.

[0181] The modified proteins, e.g., modified Fanzor polypeptide may be catalytically inactive (also referred as dead). As used herein, a catalytically inactive or dead nuclease may have reduced, or no nuclease activity compared to a wildtype counterpart nuclease. In some cases, a catalytically inactive or dead nuclease may have nickase activity. In some cases, a catalytically inactive or dead nuclease may not have nickase. Such a catalytically inactive or dead nuclease may not make either double-strand or single-strand break on a target polynucleotide but may still bind or otherwise form complex with the target polynucleotide.

[0182] In an embodiment, eukaryotic homologues of bacterial Fanzor may be utilized in the present invention. These TnpB-like proteins, Fanzor 1 and Fanzor 2 while having a shared amino acid motif in their C-terminal half regions, are variable in their N terminal regions. See, Bao et al., Homologues of bacterial TnpB_IS605 are widespread in diverse eukaryotic transposable elements. Mobile DNA 4, 12 (2013). Doi: 10.1186/1759-8753-4-12. In an aspect, the conserved sequence between TnpB and Fanzor comprise D-X (125, 275)-[TS]-[TS]-X-X-[C4 zinc finger]-X (5,50)-RD. Fanzor proteins, in addition to varying in their N-terminal region from TnpB have higher diversity, with Fanzor proteins associated with different transposons and compositions. With Applicant's discovery of the nucleic acid component and mechanism for reprogramming TnpB polypeptide activity, the similarity of the Fanzor systems may allow for similar use and applications.

[0183] In one embodiment, the modifications of the Fanzor polypeptide may or may not cause an altered functionality. By means of example, modifications which do not result in an altered functionality include for instance codon optimization for expression into a particular host, or providing the nuclease with a particular marker (e.g., for visualization). Modifications with may result in altered functionality may also include mutations, including point mutations, insertions, deletions, truncations (including split nucleases), etc., as well as chimeric nucleases (e.g., comprising domains from different orthologues or homologues) or fusion proteins. Fusion proteins may without limitation include, for instance, fusions with heterologous domains or functional domains (e.g., localization signals, catalytic domains, etc.). In one embodiment, various different modifications may be combined (e.g., a mutated nuclease which is catalytically inactive and which further is fused to a functional domain, such as for instance to induce DNA methylation or another nucleic acid modification, such as including without limitation, a break (e.g. by a different nuclease (domain)), a mutation, a deletion, an insertion, a replacement, a ligation, a digestion, a break or a recombination). As used herein, “altered functionality” includes without limitation an altered specificity (e.g., altered target recognition, increased (e.g., “enhanced” Fanzor polypeptide) or decreased specificity, or altered TAM recognition), altered activity (e.g. increased or decreased catalytic activity, including catalytically inactive nucleases or nickases), and/or altered stability (e.g. fusions with destabilization domains). Examples of all these modifications are known in the art. It will be understood that a “modified” nuclease as referred to herein, and in particular a “modified” Fanzor polypeptide or system or complex preferably still has the capacity to interact with or bind to the polynucleic acid (e.g., in complex with the nucleic acid component molecule). Such modified Fanzor polypeptide can be combined with the deaminase protein or active domain thereof as described herein.

[0184] In one embodiment, an unmodified Fanzor polypeptides may have cleavage activity. In one embodiment, the Fanzor polypeptides may direct cleavage of one or both nucleic acid (DNA or RNA) strands at the location of or near a target sequence, such as within the target sequence and/or within the complement of the target sequence or at sequences associated with the target sequence. In one embodiment, the Fanzor polypeptides may direct cleavage of one or both DNA or RNA strands within about 1, 2, 3, 4, 5, 6, 7, 8, 9, 10, 15, 20, 25, 50, 100, 200, 500, or more base pairs or nucleotides from the first or last nucleotide of a target sequence. In one embodiment, the cleavage may be staggered, i.e., generating sticky ends. In one embodiment, the cleavage is a staggered cut with a 5′ overhang. In one embodiment, the cleavage is a staggered cut with a 5′ overhang of 1 to 5 nucleotides, preferably of 4 or 5 nucleotides. In particular embodiments, the Fanzor polypeptides cleave DNA strands.

[0185] In one embodiment, a Fanzor polypeptide may be mutated with respect to a corresponding wild-type enzyme such that the mutated Fanzor lacks the ability to cleave one or both strands of a target polynucleotide containing a target sequence. As a further example, two or more catalytic domains of a Fanzor polypeptide (e.g., RuvC) may be mutated to produce a mutated Fanzor polypeptide substantially lacking all DNA cleavage activity. In one embodiment, a Fanzor polypeptide may be considered to substantially lack all polynucleotide cleavage activity when the polynucleotide cleavage activity of the mutated enzyme is no more than 25%, no more than 10%, no more than 5%, no more than 1%, no more than 0.1%, no more than 0.01% of the nucleic acid cleavage activity of the non-mutated form of the enzyme; an example can be when the nucleic acid cleavage activity of the mutated form is nil or negligible as compared with the non-mutated form.

[0186] In one embodiment, the Fanzor polypeptide may comprise one or more modifications resulting in enhanced activity and/or specificity, such as including mutating residues that stabilize the targeted or non-targeted strand. In one embodiment, the altered or modified activity of the engineered Fanzor polypeptide comprises increased targeting efficiency or decreased off-target binding. In one embodiment, the altered activity of the engineered Fanzor polypeptide comprises modified cleavage activity. In one embodiment, the altered activity comprises increased cleavage activity as to the target polynucleotide loci. In one embodiment, the altered activity comprises decreased cleavage activity as to the target polynucleotide loci. In one embodiment, the altered activity comprises decreased cleavage activity as to off-target polynucleotide loci. In one embodiment, the modified nuclease comprises a modification that alters association of the protein with the nucleic acid molecule comprising RNA, or a strand of the target polynucleotide loci, or a strand of off-target polynucleotide loci. In an aspect of the invention, the engineered Fanzor polypeptide comprises a modification that alters formation of the Fanzor polypeptide and related complex. In one embodiment, the altered activity comprises increased cleavage activity as to off-target polynucleotide loci. Accordingly, in one embodiment, there is increased specificity for target polynucleotide loci as compared to off-target polynucleotide loci. In other embodiments, there is reduced specificity for target polynucleotide loci as compared to off-target polynucleotide loci. In one embodiment, the mutations result in decreased off-target effects (e.g., cleavage or binding properties, activity, or kinetics), such as in case for Fanzor polypeptide for instance resulting in a lower tolerance for mismatches between target and Nucleic acid component. Other mutations may lead to increased off-target effects (e.g., cleavage or binding properties, activity, or kinetics). Other mutations may lead to increased or decreased on-target effects (e.g., cleavage or binding properties, activity, or kinetics). In one embodiment, the mutations result in altered (e.g., increased or decreased) activity, association or formation of the functional nuclease complex. Examples mutations include positively charged residues and/or (evolutionary) conserved residues, such as conserved positively charged residues, in order to enhance specificity. In one embodiment, such residues may be mutated to uncharged residues, such as alanine.

### Nuclear Localization Sequences

[0187] In one embodiment, the Fanzor polypeptide is fused to one or more nuclear localization sequences (NLSs), such as about or more than about 1, 2, 3, 4, 5, 6, 7, 8, 9, 10, or more NLSs. In one embodiment, the Fanzor polypeptide comprises about or more than about 1, 2, 3, 4, 5, 6, 7, 8, 9, 10, or more NLSs at or near the amino-terminus, about or more than about 1, 2, 3, 4, 5, 6, 7, 8, 9, 10, or more NLSs at or near the carboxy-terminus, or a combination of these (e.g., zero or at least one or more NLS at the amino-terminus and zero or at one or more NLS at the carboxy terminus). When more than one NLS is present, each may be selected independently of the others, such that a single NLS may be present in more than one copy and/or in combination with one or more other NLSs present in one or more copies. In a preferred embodiment of the invention, the Fanzor polypeptide comprises at most 6 NLSs. In one embodiment, an NLS is considered near the N- or C-terminus when the nearest amino acid of the NLS is within about 1, 2, 3, 4, 5, 10, 15, 20, 25, 30, 40, 50, or more amino acids along the polypeptide chain from the N- or C-terminus. Non-limiting examples of NLSs include an NLS sequence derived from: the NLS of the SV40 virus large T-antigen, having the amino acid sequence PKKKRKV (SEQ ID NO: 512); the NLS from nucleoplasmin (e.g. the nucleoplasmin bipartite NLS with the sequence KRPAATKKAGQAKKKK (SEQ ID NO: 513); the c-myc NLS having the amino acid sequence PAAKRVKLD (SEQ ID NO: 514) or RQRRNELKRSP (SEQ ID NO: 515); the hRNPA1 M9 NLS having the sequence NQSSNFGPMKGGNFGGRSSGPYGGGGQYFAKPRNQGGY (SEQ ID NO: 516); the sequence RMRIZFKNKGKDTAELRRRRVEVSVELRKAKKDEQILKRRN (SEQ ID NO: 517) of the IBB domain from importin-alpha; the sequences VSRKRPRP (SEQ ID NO: 518) and PPKKARED (SEQ ID NO: 519) [of the myoma T protein; the sequence PQPKKKPL of human p53; the sequence SALIKKKKKMAP (SEQ ID NO: 520) of mouse c-abl IV; the sequences DRLRR (SEQ ID NO: 521) and PKQKKRK (SEQ ID NO: 522) of the influenza virus NS1; the sequence RKLKKKIKKL (SEQ ID NO: 523) of the Hepatitis virus delta antigen; the sequence REKKKFLKRR (SEQ ID NO: 524) of the mouse Mx1 protein; the sequence KRKGDEVDGVDEVAKKKSKK (SEQ ID NO: 525) of the human poly(ADP-ribose) polymerase; and the sequence RKCLQAGMNLEARKTKK (SEQ ID NO: 526) of the steroid hormone receptors (human) glucocorticoid. In general, the one or more NLSs are of sufficient strength to drive accumulation of the Fanzor polypeptide in a detectable amount in the nucleus of a eukaryotic cell. In general, strength of nuclear localization activity may derive from the number of NLSs in the Fanzor polypeptide, the particular NLS(s) used, or a combination of these factors. Detection of accumulation in the nucleus may be performed by any suitable technique. For example, a detectable marker may be fused to the Fanzor polypeptide, such that location within a cell may be visualized, such as in combination with a means for detecting the location of the nucleus (e.g., a stain specific for the nucleus such as DAPI). Cell nuclei may also be isolated from cells, the contents of which may then be analyzed by any suitable process for detecting protein, such as immunohistochemistry, Western blot, or enzyme activity assay. Accumulation in the nucleus may also be determined indirectly, such as by an assay for the effect of complex formation (e.g., assay for DNA cleavage or mutation at the target sequence, or assay for altered gene expression activity affected by complex formation and/or Fanzor polypeptide activity), as compared to a control no exposed to the Fanzor polypeptide or complex, or exposed to a Fanzor polypeptide lacking the one or more NLSs. In one embodiment of the herein described Fanzor polypeptide protein complexes and systems the codon optimized Fanzor polypeptides comprise an NLS attached to the C-terminal of the protein. In one embodiment, other localization tags may be fused to the Fanzor polypeptide, such as without limitation for localizing the Fanzor polypeptide to particular sites in a cell, such as organelles, such as mitochondria, plastids, chloroplast, vesicles, Golgi, (nuclear or cellular) membranes, ribosomes, nucleolus, ER, cytoskeleton, vacuoles, centrosome, nucleosome, granules, centrioles, etc.

[0188] In one embodiment of the invention, at least one nuclear localization signal (NLS) is attached to the nucleic acid sequences encoding the Fanzor polypeptide. In preferred embodiments at least one or more C-terminal or N-terminal NLSs are attached (and hence nucleic acid molecule(s) coding for the Fanzor polypeptide can include coding for NLS(s) so that the expressed product has the NLS(s) attached or connected). In a preferred embodiment a C-terminal NLS is attached for optimal expression and nuclear targeting in eukaryotic cells, preferably human cells. The invention also encompasses methods for delivering multiple nucleic acid components, wherein each nucleic acid component is specific for a different target locus of interest thereby modifying multiple target loci of interest. The nucleic acid component of the complex may comprise one or more protein-binding RNA aptamers. The one or more aptamers may be capable of binding a bacteriophage coat protein.

### Linkers

[0189] In some preferred embodiments, the functional domain is linked to a Fanzor polypeptide (e.g., an active or a dead Fanzor polypeptide) to target and activate epigenomic sequences such as promoters or enhancers. One or more Nucleic acid components directed to such promoters or enhancers may also be provided to direct the binding of the Fanzor polypeptide to such promoters or enhancers.

[0190] The term “associated with” is used here in relation to the association of the functional domain to the Fanzor polypeptide protein or the adaptor protein. It is used in respect of how one molecule ‘associates’ with respect to another, for example between an adaptor protein and a functional domain, or between the Fanzor polypeptide protein and a functional domain. In the case of such protein-protein interactions, this association may be viewed in terms of recognition in the way an antibody recognizes an epitope. Alternatively, one protein may be associated with another protein via a fusion of the two, for instance one subunit being fused to another subunit. Fusion typically occurs by addition of the amino acid sequence of one to that of the other, for instance via splicing together of the nucleotide sequences that encode each protein or subunit. Alternatively, this may essentially be viewed as binding between two molecules or direct linkage, such as a fusion protein. In any event, the fusion protein may include a linker between the two subunits of interest (i.e., between the enzyme and the functional domain or between the adaptor protein and the functional domain). Thus, in one embodiment, the Fanzor polypeptide protein or adaptor protein is associated with a functional domain by binding thereto. In other embodiments, the Fanzor polypeptide or adaptor protein is associated with a functional domain because the two are fused together, optionally via an intermediate linker.

[0191] The term “linker” as used in reference to a fusion protein refers to a molecule which joins the proteins to form a fusion protein. Generally, such molecules have no specific biological activity other than to join or to preserve some minimum distance or other spatial relationship between the proteins. However, in one embodiment, the linker may be selected to influence some property of the linker and/or the fusion protein such as the folding, net charge, or hydrophobicity of the linker.

[0192] Suitable linkers for use in the methods of the present invention are well known to those of skill in the art and include, but are not limited to, straight or branched-chain carbon linkers, heterocyclic carbon linkers, or peptide linkers. However, as used herein the linker may also be a covalent bond (carbon-carbon bond or carbon-heteroatom bond). In particular embodiments, the linker is used to separate the Fanzor polypeptide and the nucleotide deaminase by a distance sufficient to ensure that each protein retains its required functional property. Preferred peptide linker sequences adopt a flexible extended conformation and do not exhibit a propensity for developing an ordered secondary structure. In one embodiment, the linker can be a chemical moiety which can be monomeric, dimeric, multimeric or polymeric. Preferably, the linker comprises amino acids. Typical amino acids in flexible linkers include Gly, Asn and Ser. Accordingly, in particular embodiments, the linker comprises a combination of one or more of Gly, Asn and Ser amino acids. Other near neutral amino acids, such as Thr and Ala, also may be used in the linker sequence. Exemplary linkers are disclosed in Maratea et al. (1985), Gene 40:39-46; Murphy et al. (1986) Proc. Nat'l. Acad. Sci. USA 83:8258-62; U.S. Pat. Nos. 4,935,233; and 4,751,180. For example, GlySer linkers GGS, GGGS (SEQ ID NO: 527) or GSG can be used. GGS, GSG, GGGS (SEQ ID NO: 527) or GGGGS (SEQ ID NO: 528) linkers can be used in repeats of 3 (such as (GGS)₃ (SEQ ID NO: 529), (GGGGS)₃ (SEQ ID NO: 530) or 5, 6, 7, 9 or even 12 or more, to provide suitable lengths. In some cases, the linker may be (GGGGS)₃₋₁₅ (SEQ ID NO: 530-542), For example, in some cases, the linker may be (GGGGS)₃₋₁₁ (SEQ ID NO: 530-538), e.g., GGGGS (SEQ ID NO: 528), (GGGGS)₂ (SEQ ID NO: 543), (GGGGS)₃ (SEQ ID NO: 530), (GGGGS)₄ (SEQ ID NO: 531), (GGGGS)₅ (SEQ ID NO: 532), (GGGGS)₆ (SEQ ID NO: 533), (GGGGS)₇ (SEQ ID NO: 534), (GGGGS): (SEQ ID NO: 535), (GGGGS)₉ (SEQ ID NO: 536), (GGGGS)₁₀ (SEQ ID NO: 537), or (GGGGS)₁₁ (SEQ ID NO: 538).

[0193] In particular embodiments, linkers such as (GGGGS)₃ (SEQ ID NO: 530) are preferably used herein. (GGGGS)₆ (SEQ ID NO: 533), (GGGGS)₉ (SEQ ID NO: 536) or (GGGGS)₁₂ (SEQ ID NO: 539) may preferably be used as alternatives. Other preferred alternatives are (GGGGS)₁ (SEQ ID NO: 528), (GGGGS)₄ (SEQ ID NO: 531), (GGGGS)₅ (SEQ ID NO: 532), (GGGGS)₇ (SEQ ID NO: 534), (GGGGS): (SEQ ID NO: 535), (GGGGS)₁₀ (SEQ ID NO: 537), or (GGGGS)₁₁ (SEQ ID NO: 538). In yet a further embodiment, LEPGEKPYKCPECGKSFSQSGALTRHQRTHTR (SEQ ID NO: 544) is used as a linker. In yet an additional embodiment, the linker is an XTEN linker. In particular embodiments, the Fanzor polypeptide is linked to the deaminase protein or its catalytic domain by means of an LEPGEKPYKCPECGKSFSQSGALTRHQRTHTR (SEQ ID NO: 544) (linker. In further particular embodiments, Fanzor polypeptide is linked C-terminally to the N-terminus of a deaminase protein or its catalytic domain by means of an LEPGEKPYKCPECGKSFSQSGALTRHQRTHTR ((SEQ ID NO: 544)) linker. In addition, N- and C-terminal NLSs can also function as linker (e.g., PKKKRKVEASSPKKRKVEAS (SEQ ID NO: 545)).

[0194] Examples of linkers are shown in Table 2 below.

TABLE 2

| | |
|---|---|
| GGS | GGTGGTAGT |
| GGS | GGTGGTAGTGGAGGGAGCGGCGGTTCA (SEQ ID NO: 547) |
| x 3 | |
| (SEQ | |
| ID NO: | |
| 546) | |
| GGS | ggtggaggaggctctggtggaggcggtagcggaggcggagggtcgGGTGGTAGTGGAGGGAGC |
| x7 | G GCGGTTCA (SEQ ID NO: 549) |
| (SEQ | |
| ID NO: | |
| 548) | |
| XTEN | TCGGGATCTGAGACGCCTGGGACCTCGGAATCGGCTACGCCCGAAAGT |
| | (SEQ ID NO: 550) |
| Z- | Gtggataacaaatttaacaaagaaatgtgggcggcgtgggaagaaattcgtaacctgccgaacctgaacggctggc |
| EFGR | agatgaccgcgtttattgcgagcctggtggatgatccgagccagagcgcgaacctgctggcggaagcgaaaaaact |
| Short | gaac gatgcgcaggcgccgaaaaccggcggtggttctggt (SEQ ID NO: 551) |
| GSAT | Ggtggttctgccggtggctccggttctggctccagcggtggcagctctggtgcgtccggcacgggtactgcgggtg |
| | gc actggcagcggttccggtactggctctggc (SEQ ID NO: 552) |

[0195] Linkers may be used between the Nucleic acid component molecules and the functional domain (activator or repressor), or between the Fanzor polypeptide and the functional domain. The linkers may be used to engineer appropriate amounts of “mechanical flexibility”.

[0196] In one embodiment, the one or more functional domains are controllable, e.g., inducible.

[0197] Other suitable functional domains can be found, for example, in International Application Publication No. WO 2019/018423, for example, at [0678]-[0692], incorporated herein by reference. Exemplary functional domains are further detailed elsewhere herein.

### Optimized Fanzor Polypeptides

[0198] In some embodiments, the Fanzor polypeptide is optimized to have increased binding and/or interaction with a target DNA and/or an ωRNA component molecule, and/or increase Fanzor activity (such as cleavage or other activity). In some embodiments, the Fanzor polypeptide is optimized by introducing one or more mutations in the Fanzor polypeptide as compared to a wild-type, control, and/or Fanzor polypeptide not having the one or more mutations. In some embodiments, the one or more mutations increase binding and/or interaction with a target DNA and/or an ωRNA component molecule, and/or increase Fanzor activity. In some embodiments Fanzor activity is increased 1 to 50 fold or more, e.g., 1, to/or 2, 3, 4, 5, 6, 7, 8, 9, 10, 11, 12, 13, 14, 15, 16, 17, 18, 19, 20, 21, 22, 23, 24, 25, 26, 27, 28, 29, 30, 31, 32, 33, 34, 35, 36, 37, 38, 39, 40, 41, 42, 43, 44, 45, 46, 47, 48, 49, to/or 50 fold or more. In some embodiments, the one or more mutations comprise one or more mutations of one or more neutral and/or negatively charged amino acids to one or more positively charged amino acids (e.g., Lys, His, or Arg). In some embodiments, 1-50 or more residues are mutated. In some embodiments, the mutations are made in and/or within effective proximity to the catalytic pocket or DNA interaction region of the Fanzor polypeptide. In some embodiments, the mutations are made between a RuvC domain and nuclease domain of the Fanzor polypeptide. In certain example embodiments, the one or more mutations comprise one or more mutations of FIG. 10C-10E, FIG. 35, or FIG. 56A-56D. In certain example embodiments, the one or more mutations at sites in the Fanzor polypeptide as shown in FIG. 10D or in positions analogous thereto in other Fanzor polypeptides.

### Chimeric Fanzors Having a Non-Native REC Domain

[0199] In some embodiments, the Fanzor is a chimeric Fanzor and contains one or more non-native REC domains. In some embodiments, the one or more non-native REC domains replace one or more native REC domains. In some embodiments, the one or more non-native REC domains are in addition to native REC domain(s) in the Fanzor polypeptide.

[0200] In one example embodiment, the non-native REC domain is a Cas REC domain. In on example embodiment, the REC domain is a Type II Cas REC domain. In one example embodiment, the non-native REC domain is a Type V REC domain. In one example embodiment, the non-native REC domain is a Cas12a REC domain. In one example embodiment, the non-native REC domain is a Cas12b REC domain. In one example embodiment, the non-native REC domain is a Cas12c REC domain. In some embodiments, the non-native REC domain is a Cas12d REC domain. In some embodiments, the non-native REC domain is a Cas12e REC domain. In some embodiments, the non-native REC domain is a Cas12 wREC2 domain. In some embodiments, the non-native REC domain is a Cas12a wREC2 domain. In some embodiments, the non-native REC domain is a Cas12d wREC2 domain. In some embodiments, the non-native REC domain is a Cas12e wREC2 domain.

[0201] In some embodiments, the non-native REC2 domain is 80-100 percent identical to any one of SEQ ID NO: 649-651. In some embodiments, the non-native REC2 domain is 80 to/or 81, 82, 83, 84, 85, 86, 87, 88, 89, 90, 91, 92, 93, 94, 95, 96, 97, 98, 99, 100 percent identical to any one of SEQ ID NO: 649-651.

[0202] In some embodiments, the non-native REC domain(s) are fused or coupled to (e.g., via a linker) to the Fanzor polypeptide. In some embodiments the non-native REC domain(s) are fused or coupled to the N-terminus and/or C-terminus of the Fanzor polypeptide. In some embodiments, the non-native REC domain(s) are inserted between two contiguous amino acids between the N- and C-terminus of the Fanzor polypeptide. In some embodiments, the one or more non-native REC domains are inserted downstream of a native REC1 (e.g., a native wREC1) domain in a Fanzor polypeptide. In some embodiments, a non-native REC domain is inserted in a Fanzor polypeptide at S246 in Fanzor ID83, at N259 in Fanzor ID16, at K165 in Fanzor ID89, at G210 in Fanzor ID36, or in analogous positions in homolog or ortholog Fanzor polypeptides. In some embodiments where the non-native REC domain(s) are linked to the Fanzor polypeptide by one or more linkers, the linker is a flexible or rigid linker. In some embodiments where the non-native REC domain(s) are linked to the Fanzor polypeptide by one or more linkers, the linker is a Gly-Ser linker. Exemplary linkers, including Gly-Ser linkers are generally known in the art described in other contexts herein. It will be appreciated that such linkers can be used in this context to link the non-native REC domain to the Fanzor polypeptide. Without being bound by theory, the non-native REC domains may modify Fanzor polypeptide activity.

### Nucleic Acid Component Molecules

### ωRNA Component Molecules

[0203] The Fanzor systems described herein may further comprise one or more nucleic acid component molecules. Such nucleic acid components may comprise RNA, DNA, or combinations thereof and include modified and non-canonical nucleotides as described further below. At least one of the one or more nucleic acid component molecules in a Fanzor system described herein are ωRNA, which are also referred to herein as ωRNA component molecules. The ωRNA can comprise a reprogrammable spacer sequence, also referred to herein as a guide sequence, and a scaffold that interacts with the Fanzor polypeptide. ωRNA may form a complex (Ω2 complex) with a Fanzor polypeptide, and direct sequence-specific binding of the complex to a target sequence of a target polynucleotide. In the context of the present invention, the Fanzor polypeptide and ωRNA comprise modifications to the polypeptide or nucleic acid component, or both, such that one or more of the polypeptide, or the nucleic acid component, are the complex have structurally distinct features from naturally occurring systems. In one example embodiment, the ωRNA is a single molecule comprising a scaffold sequence and a spacer sequence. In certain example embodiments, the spacer is 5′ of the scaffold sequence. In one example embodiment, the ωRNA may further comprise a conserved nucleic acid sequence between the scaffold and spacer portions.

[0204] In embodiments, the ωRNA comprises a spacer sequence and a scaffold sequence, e.g., a conserved nucleotide sequence. In embodiments, the ωRNA comprises about 45 to about 250 nucleotides, such as about 45, 46, 47 48, 49, 50, 51, 52, 53, 54, 55, 56, 57, 58, 59, 60, 61, 62, 63, 64, 65, 66, 67, 68, 69, 70, 71, 72, 73, 74, 75, 76, 77, 78, 79, 80, 81, 82, 83, 84, 85, 86, 87, 88, 89, 90, 91, 92, 93, 94, 95, 96, 97, 98, 99, 100, 101, 102, 103, 104, 105, 106, 107, 108, 109, 110, 111, 112, 113, 114, 115, 116, 117, 118, 119, 120, 121, 122, 123, 124, 125, 126, 127, 128, 129, 130, 131, 132, 133, 134, 135, 136, 17, 138, 19, 140, 141, 142, 143, 144, 145, 146, 147, 148, 149, 150, 151, 152, 153, 154, 155, 156, 157, 158, 159, 160, 11, 162, 163, 164, 165, 166, 167, 168, 169, 170, 171, 172, 173, 174, 175, 176, 177, 178, 179, 180. 181, 182, 183, 184, 185, 186, 187, 188, 189, 190, 191, 192, 193, 194, 195, 196, 197, 198, 199, 200, 201, 202, 203, 204, 205, 206, 207, 208, 209, 210, 211, 212, 213, 214, 215, 216, 217, 218, 219, 220, 221, 222, 223, 224, 225, 226, 227, 228, 229, 230, 231, 232, 233, 234, 235, 236, 237, 238, 239, 2340, 241, 242, 243, 244, 245, 246, 247, 248, 249, to/or about 250 nucleotides, or any numerical range therein.

[0205] The scaffold sequence therefore typically comprises conserved regions, with the scaffold comprising about 20 to about 200 nucleotides, about 50 to 180, about 80 to 175 nucleotides, or about 20, 21, 22, 23, 24, 25, 26, 27, 28,29, 30, 31, 32, 33, 34, 35, 36, 37, 38, 39 40, 41, 42, 43, 44, 45, 46, 47 48, 49, 50, 51, 52, 53, 54, 55, 56, 57, 58, 59, 60, 61, 62, 63, 64, 65, 66, 67, 68, 69, 70, 71, 72, 73, 74, 75, 76, 77, 78, 79, 80, 81, 82, 83, 84, 85, 86, 87, 88, 89, 90, 91, 92, 93, 94, 95, 96, 97, 98, 99, 100, 101, 102, 103, 104, 105, 106, 107, 108, 109, 110, 111, 112, 113, 114, 115, 116, 117, 118, 119, 120, 121, 122, 123, 124, 125, 126, 127, 128, 129, 130, 131, 132, 133, 134, 135, 136, 137, 138, 139, 140, 141, 142, 143, 144, 145, 146, 147, 148, 149, 150, 151, 152, 153, 154, 155, 156, 157, 158, 159, 160, 161, 162, 163, 164, 165, 166, 167, 168, 169, 170, 171, 172, 173, 174, 175, 176, 177, 178, 179, 180, 181, 182, 183, 184, 185, 186, 187, 188, 189, 190, 191, 192, 193, 194, 195, 196, 197, 198, 199, to/or 200 or more nt, or any range of values therein. In an aspect, the nucleic acid component scaffold comprises one conserved nucleotide sequence. In embodiments, the conserved nucleotide sequence is on or near a 5′ end of the scaffold.

[0206] The ωRNA may further comprise a spacer, which can be re-programmed to replace the naturally occurring spacer sequence with an engineered spacer sequence that directssite-specific binding to a target sequence of a target polynucleotide that is different than the naturally occurring target polynucleotide. The spacer may also be referred to herein as part of the ωRNA scaffold or ωRNA and may comprise an engineered heterologous sequence. In some embodiments, the RNA species comprises the RNA conserved region+guide sequence, which is distinct from but generally related to the DR+spacer configuration of CRISPR-Cas systems.

[0207] In one embodiment, the spacer length of the ωRNA is from 10 to 30 or 10 to 50 nt. In one embodiment, the spacer length of the ωRNA is at least 10, 11, 12, 13, 14, or 15 nucleotides. In one embodiment, the spacer length is from 10 to 40 nucleotides, from 15 to 30 nt, 15 to 17 nt, e.g., 15, 16, or 17 nt, from 17 to 20 nt, e.g., 17, 18, 19, or 20 nt, from 20 to 24 nt, e.g., 20, 21, 22, 23, or 24 nt, from 23 to 25 nt, e.g., 23, 24, or 25 nt, from 24 to 27 nt, e.g., 24, 25, 26, or 27 nt, from 27 to 30 nt, e.g., 27, 28, 29, or 30 nt, from 30 to 35 nt, e.g., 30, 31, 32, 33, 34, or 35 nt, or 35 nt or longer. In example embodiments, the spacer sequence is 14, 15, 16, 17,18, 19, 20, 21, 22, 23, 24, 25, 26, 27, 28, 29, 30, 31, 32, 33, 34, 35, 36, 37, 38, 39 40, 41, 42, 43, 44, 45, 46, 47 48, 49, or 50 nt. In some embodiments, the space length is 10, 11, 12, 13, 14, 15, 16, 17, 18, 19, 20, 21, 22, 23, 24, 25, 26, 27, 28, 29, 30, 31, 32, 33, 34, 35, 36, 37, 38, 39, 40, 41, 42, 43, 44, 45, 46, 47, 48, 49, to/or 50 nt, or any range of values therein. In some embodiments, the space length is 10, 11, 12, 13, 14, 15, 16, 17, 18, 19, 20, 21, 22, 23, 24, 25, 26, 27, 28, 29, 30, 31, 32, 33, 34, 35, 36, 37, 38, 39 to/or 40 nt, or any range of values therein. In some embodiments, the space length is 10, 11, 12, 13, 14, 15, 16, 17, 18, 19, 20, 21, 22, 23, 24, 25, 26, 27, 28, 29 to/or 30 nt, or any range of values therein.

[0208] In one embodiment, the sequence of the ωRNA is selected to reduce the degree secondary structure within the ωRNA. In one embodiment, about or less than about 75%, 50%, 40%, 30%, 25%, 20%, 15%, 10%, 5%, 1%, or fewer of the nucleotides of the nucleic acid-targeting Nucleic acid component participate in self-complementary base pairing when optimally folded. Optimal folding may be determined by any suitable polynucleotide folding algorithm. Some programs are based on calculating the minimal Gibbs free energy. An example of one such algorithm is mFold, as described by Zuker and Stiegler (Nucleic Acids Res. 9 (1981), 133-148). Another example of a folding algorithm is the online webserver RNAfold, developed at Institute for Theoretical Chemistry at the University of Vienna, using the centroid structure prediction algorithm (see e.g., A. R. Gruber et al., 2008, Cell 106 (1): 23-24; and PA Carr and GM Church, 2009, Nature Biotechnology 27 (12): 1151-62).

[0209] As Applicant demonstrates in the Working Examples herein, in some embodiments, the ωRNA comprises a minimal scaffold (gRNA) that contains a core region that is capable of interacting with Wedge (WED)/Bridge Helix (BH) domains, particularly the wREC domains and a spacer that is binds a target nucleotide sequence. See e.g., FIG. 59A-59B. In some embodiments, the minimal scaffold (gRNA) is a hairpin. WED, BH, and analogous domains are also described in context of TnpB and/or IscBs and Cas12. See e.g., Altae-Tran et al., Science. 2021. 374 (6563): 57-65, Karvelis et al. Nature. 2021: 599 (7886): 692-696, Bao and Jurka et al. Mobile DNA. 2013:4: Article 12, and Swarts et al. Mol. Cell. 2017. 66 (2): 221-233 and Zhang et al, Nat Struct Mol Biol. 2020 November; 27 (11): 1069-1076.

[0210] Exemplary ωRNAs are described in the Working Examples herein. In some embodiments the ωRNAs comprises all or a portion or region of (e.g., spacer, scaffold or other region) an ωRNA of Table 13.

[0211] As used herein, a heterologous ωRNA is an ωRNA that is not derived from the same species as the Fanzor polypeptide, or comprises a portion of the molecule, e.g., spacer, that is not derived from the same species as the Fanzor polypeptide. For example, a heterologous ωRNA of a Fanzor polypeptide derived from species A comprises a polynucleotide derived from a species different from species A, or an artificial polynucleotide.

[0212] In a particular embodiment, the ωRNA comprises a spacer sequence linked to a conserved nucleotide sequence, wherein the conserved nucleotide sequence may comprise one or more stem loops or optimized secondary structures. In particular embodiments, the conserved nucleotide sequence has a minimum length of 16 nts and a single stem loop. In further embodiments the conserved nucleotide sequence has a length longer than 16 nts, preferably more than 17 nts, and has more than one stem loops or optimized secondary structures. In particular embodiments, the spacer sequence may be linked to all or part of the natural conserved nucleotide sequence. In particular embodiments, certain aspects of the ωRNA architecture can be modified, for example by addition, subtraction, or substitution of features, whereas certain other aspects of architecture are maintained. Preferred locations for engineered ωRNA modifications, including but not limited to insertions, deletions, and substitutions include Nucleic acid component termini and regions of the ωRNA that are exposed when complexed with Fanzor polypeptide and/or target.

[0213] In one embodiment, the ωRNA forms a stemloop with a separate non-covalently linked sequence, which can be DNA or RNA. In particular embodiments, the sequences forming the Nucleic acid component molecule are first synthesized using the standard phosphoramidite synthetic protocol (Herdewijn, P., ed., Methods in Molecular Biology Col 288, Oligonucleotide Synthesis: Methods and Applications, Humana Press, New Jersey (2012)). In one embodiment, these sequences can be functionalized to contain an appropriate functional group for ligation using the standard protocol known in the art (Hermanson, G. T., Bioconjugate Techniques, Academic Press (2013)). Examples of functional groups include, but are not limited to, hydroxyl, amine, carboxylic acid, carboxylic acid halide, carboxylic acid active ester, aldehyde, carbonyl, chlorocarbonyl, imidazolylcarbonyl, hydrozide, semicarbazide, thio semicarbazide, thiol, maleimide, haloalkyl, sufonyl, ally, propargyl, diene, alkyne, and azide. Once this sequence is functionalized, a covalent chemical bond or linkage can be formed between this sequence and the conserved nucleotide sequence. Examples of chemical bonds include, but are not limited to, those based on carbamates, ethers, esters, amides, imines, amidines, aminotrizines, hydrozone, disulfides, thioethers, thioesters, phosphorothioates, phosphorodithioates, sulfonamides, sulfonates, fulfones, sulfoxides, ureas, thioureas, hydrazide, oxime, triazole, photolabile linkages, C—C bond forming groups such as Diels-Alder cyclo-addition pairs or ring-closing metathesis pairs, and Michael reaction pairs.

[0214] In one embodiment, these stem-loop forming sequences can be chemically synthesized. In one embodiment, the chemical synthesis uses automated, solid-phase oligonucleotide synthesis machines with 2′-acetoxyethyl orthoester (2′-ACE) (Scaringe et al., J. Am. Chem. Soc. (1998) 120:11820-11821; Scaringe, Methods Enzymol. (2000) 317:3-18) or 2′-thionocarbamate (2′-TC) chemistry (Dellinger et al., J. Am. Chem. Soc. (2011) 133:11540-11546; Hendel et al., Nat. Biotechnol. (2015) 33:985-989).

[0215] The repeat: anti repeat duplex will be apparent from the secondary structure of the nucleic acid component. It may be typically a first complimentary stretch after (in 5′ to 3′ direction) the poly U tract and before the tetraloop; and a second complimentary stretch after (in 5′ to 3′ direction) the tetraloop and before the poly A tract. The first complimentary stretch (the “repeat”) is complimentary to the second complimentary stretch (the “anti-repeat”). As such, they Watson-Crick base pair to form a duplex of dsRNA when folded back on one another. As such, the anti-repeat sequence is the complimentary sequence of the repeat and in terms to A-U or C-G base pairing, but also in terms of the fact that the anti-repeat is in the reverse orientation due to the tetraloop.

[0216] In an embodiment of the invention, modification of nucleic acid component molecule architecture comprises replacing bases in stemloop 2. For example, in one embodiment, “actt” (“acuu” in RNA) and “aagt” (“aagu” in RNA) bases in stemloop2 are replaced with “cgcc” and “gcgg”. In one embodiment, “actt” and “aagt” bases in stemloop2 are replaced with complimentary GC-rich regions of 4 nucleotides. In one embodiment, the complimentary GC-rich regions of 4 nucleotides are “cgcc” and “gcgg” (both in 5′ to 3′ direction). In one embodiment, the complimentary GC-rich regions of 4 nucleotides are “gcgg” and “cgcc” (both in 5′ to 3′ direction). Other combination of C and G in the complimentary GC-rich regions of 4 nucleotides will be apparent including CCCC and GGGG.

[0217] In one aspect, the stemloop 2, e.g., “ACTTgtttAAGT” (SEQ ID NO: 553) can be replaced by any “XXXXgtttYYYY”, e.g., where X and YYYY represent any complementary sets of nucleotides that together will base pair to each other to create a stem.

[0218] As used herein, the term “spacer” may also be referred to as a “guide sequence.” In one embodiment, the degree of complementarity of the spacer sequence to a given target sequence, when optimally aligned using a suitable alignment algorithm, is about or more than 50%, 60%, 75%, 80%, 85%, 90%, 95%, 97.5%, 99%, or more. In certain example embodiments, the Nucleic acid component molecule comprises a spacer sequence that may be designed to have at least one mismatch with the target sequence, such that a RNA duplex formed between the sequence and the target sequence. Accordingly, the degree of complementarity is less than 99%. For instance, where the spacer sequence consists of 24 nucleotides, the degree of complementarity is more particularly about 96% or less. In particular embodiments, the spacer sequence is designed to have a stretch of two or more adjacent mismatching nucleotides, such that the degree of complementarity over the entire sequence is further reduced. For instance, where the spacer sequence consists of 24 nucleotides, the degree of complementarity is more particularly about 96% or less, more particularly, about 92% or less, more particularly about 88% or less, more particularly about 84% or less, more particularly about 80% or less, more particularly about 76% or less, more particularly about 72% or less, depending on whether the stretch of two or more mismatching nucleotides encompasses 2, 3, 4, 5, 6 or 7 nucleotides, etc. In one embodiment, aside from the stretch of one or more mismatching nucleotides, the degree of complementarity, when optimally aligned using a suitable alignment algorithm, is about or more than about 50%, 60%, 75%, 80%, 85%, 90%, 95%, 97.5%, 99%, or more. Optimal alignment may be determined with the use of any suitable algorithm for aligning sequences, non-limiting example of which include the Smith-Waterman algorithm, the Needleman-Wunsch algorithm, algorithms based on the Burrows-Wheeler Transform (e.g., the Burrows Wheeler Aligner), ClustalW, Clustal X, BLAT, Novoalign (Novocraft Technologies; available at www.novocraft.com), ELAND (Illumina, San Diego, CA), SOAP (available at soap.genomics.org.cn), and Maq (available at maq.sourceforge.net). The ability of a sequence (within a nucleic acid-targeting Nucleic acid component molecule) to direct sequence-specific binding of a nucleic acid-targeting complex to a target nucleic acid sequence may be assessed by any suitable assay. For example, the components of a Nucleic acid component system sufficient to form a nucleic acid-targeting complex, including the Nucleic acid component molecule sequence to be tested, may be provided to a host cell having the corresponding target nucleic acid sequence, such as by transfection with vectors encoding the components of the nucleic acid-targeting complex, followed by an assessment of preferential targeting (e.g., cleavage) within the target nucleic acid sequence, such as by Surveyor assay as described herein. Similarly, cleavage of a target nucleic acid sequence (or a sequence in the vicinity thereof) may be evaluated in a test tube by providing the target nucleic acid sequence, components of a nucleic acid-targeting complex, including the sequence to be tested and a control sequence different from the test ωRNA, and comparing binding or rate of cleavage at or in the vicinity of the target sequence between the test and control ωRNA molecule sequence reactions. Other assays are possible, and will occur to those skilled in the art. A spacer equence, and hence a nucleic acid-targeting ωRNA may be selected to target any target nucleic acid sequence.

[0219] A ωRNA, and hence a nucleic acid-targeting spacer, may be selected to modify the target specific to of the Omega complex to target target nucleic acid sequences other than those sequences naturally targeted by the Omega complex. The target sequence may be DNA. The target sequence may be any RNA sequence. In one embodiment, the target sequence may be a sequence within a RNA molecule selected from the group consisting of messenger RNA (mRNA), pre-mRNA, ribosomal RNA (rRNA), transfer RNA (tRNA), micro-RNA (miRNA), small interfering RNA (siRNA), small nuclear RNA (snRNA), small nucleolar RNA (snoRNA), double stranded RNA (dsRNA), non-coding RNA (ncRNA), long non-coding RNA (lncRNA), and small cytoplasmatic RNA (scRNA). In some preferred embodiments, the target sequence may be a sequence within a RNA molecule selected from the group consisting of mRNA, pre-mRNA, and rRNA. In some preferred embodiments, the target sequence may be a sequence within a RNA molecule selected from the group consisting of ncRNA, and lncRNA. In some more preferred embodiments, the target sequence may be a sequence within an mRNA molecule or a pre-mRNA molecule.

[0220] In one embodiment, the ωRNA forms a stem loop with a separate non-covalently linked sequence, which can be DNA or RNA. In particular embodiments, the sequences forming the Nucleic acid component are first synthesized using the standard phosphoramidite synthetic protocol (Herdewijn, P., ed., Methods in Molecular Biology Col 288, Oligonucleotide Synthesis: Methods and Applications, Humana Press, New Jersey (2012)). In one embodiment, these sequences can be functionalized to contain an appropriate functional group for ligation using the standard protocol known in the art (Hermanson, G. T., Bioconjugate Techniques, Academic Press (2013)). Examples of functional groups include, but are not limited to, hydroxyl, amine, carboxylic acid, carboxylic acid halide, carboxylic acid active ester, aldehyde, carbonyl, chlorocarbonyl, imidazolylcarbonyl, hydrazide, semicarbazide, thio semicarbazide, thiol, maleimide, haloalkyl, sufonyl, ally, propargyl, diene, alkyne, and azide. Once this sequence is functionalized, a covalent chemical bond or linkage can be formed between this sequence and the conserved nucleotide sequence. Examples of chemical bonds include, but are not limited to, those based on carbamates, ethers, esters, amides, imines, amidines, aminotrizines, hydrozone, disulfides, thioethers, thioesters, phosphorothioates, phosphorodithioates, sulfonamides, sulfonates, sulfones, sulfoxides, ureas, thioureas, hydrazide, oxime, triazole, photolabile linkages, C—C bond forming groups such as Diels-Alder cyclo-addition pairs or ring-closing metathesis pairs, and Michael reaction pairs.

### ωRNA Chemical Modifications

[0221] In one embodiment, these stem-loop forming sequences can be chemically synthesized. In one embodiment, the chemical synthesis uses automated, solid-phase oligonucleotide synthesis machines with 2′-acetoxyethyl orthoester (2′-ACE) (Scaringe et al., J. Am. Chem. Soc. (1998) 120:11820-11821; Scaringe, Methods Enzymol. (2000) 317:3-18) or 2′-thionocarbamate (2′-TC) chemistry (Dellinger et al., J. Am. Chem. Soc. (2011) 133:11540-11546; Hendel et al., Nat. Biotechnol. (2015) 33:985-989).

[0222] In one embodiment, the nucleic acid component molecule comprises non-naturally occurring nucleic acids and/or non-naturally occurring nucleotides and/or nucleotide analogs, and/or chemically modifications. Preferably, these non-naturally occurring nucleic acids and non-naturally occurring nucleotides are located outside the Nucleic acid component sequence. Non-naturally occurring nucleic acids can include, for example, mixtures of naturally and non-naturally occurring nucleotides. Non-naturally occurring nucleotides and/or nucleotide analogs may be modified at the ribose, phosphate, and/or base moiety. In an embodiment of the invention, a Nucleic acid component nucleic acid comprises ribonucleotides and non-ribonucleotides. In one such embodiment, a Nucleic acid component comprises one or more ribonucleotides and one or more deoxyribonucleotides. In an embodiment of the invention, the Nucleic acid component comprises one or more non-naturally occurring nucleotide or nucleotide analog such as a nucleotide with phosphorothioate linkage, a locked nucleic acid (LNA) nucleotide comprising a methylene bridge between the 2′ and 4′ carbons of the ribose ring, or bridged nucleic acids (BNA). Other examples of modified nucleotides include 2′-O-methyl analogs, 2′-deoxy analogs, or 2′-fluoro analogs. Further examples of modified bases include, but are not limited to, 2-aminopurine, 5-bromo-uridine, pseudouridine, inosine, 7-methylguanosine. Examples of Nucleic acid component chemical modifications include, without limitation, incorporation of 2′-O-methyl (M), 2′-O-methyl 3′phosphorothioate (MS), S-constrained ethyl (cEt), or 2′-O-methyl 3′thioPACE (MSP) at one or more terminal nucleotides. Such chemically modified Nucleic acid components can comprise increased stability and increased activity as compared to unmodified Nucleic acid components, though on-target vs. off-target specificity is not predictable. (See, Hendel, 2015, Nat Biotechnol. 33 (9): 985-9, doi: 10.1038/nbt.3290, published online 29 Jun. 2015 Ragdarm et al., 0215, PNAS, E7110-E7111; Allerson et al., J. Med. Chem. 2005, 48:901-904; Bramsen et al., Front. Genet., 2012, 3:154; Deng et al., PNAS, 2015, 112:11870-11875; Sharma et al., MedChemComm., 2014, 5:1454-1471; Hendel et al., Nat. Biotechnol. (2015) 33 (9): 985-989; Li et al., Nature Biomedical Engineering, 2017, 1, 0066 DOI: 10.1038/s41551-017-0066). In one embodiment, the 5′ and/or 3′ end of a Nucleic acid component is modified by a variety of functional moieties including fluorescent dyes, polyethylene glycol, cholesterol, proteins, or detection tags. (See Kelly et al., 2016, J. Biotech. 233:74-83). In one embodiment, a Nucleic acid component comprises ribonucleotides in a region that binds to a target sequence and one or more deoxyribonucleotides and/or nucleotide analogs in a region that binds to the Fanzor polypeptide. In an embodiment, deoxyribonucleotides and/or nucleotide analogs are incorporated in engineered Nucleic acid component structures. In one embodiment, 3-5 nucleotides at either the 3′ or the 5′ end of a Nucleic acid component is chemically modified. In one embodiment, only minor modifications are introduced in the seed region, such as 2′-F modifications. In one embodiment, 2′-F modification is introduced at the 3′ end of a Nucleic acid component. In one embodiment, three to five nucleotides at the 5′ and/or the 3′ end of the Nucleic acid component are chemically modified with 2′-O-methyl (M), 2′-O-methyl 3′ phosphorothioate (MS), S-constrained ethyl (cEt), or 2′-O-methyl 3′ thioPACE (MSP). Such modification can enhance genome editing efficiency (see Hendel et al., Nat. Biotechnol. (2015) 33 (9): 985-989). In one embodiment, all of the phosphodiester bonds of a Nucleic acid component are substituted with phosphorothioates (PS) for enhancing levels of gene disruption. In one embodiment, more than five nucleotides at the 5′ and/or the 3′ end of the Nucleic acid component are chemically modified with 2′-O-Me, 2′-F or S-constrained ethyl (cEt). Such chemically modified Nucleic acid component can mediate enhanced levels of gene disruption (see Ragdarm et al., 0215, PNAS, E7110-E7111). In an embodiment of the invention, a Nucleic acid component is modified to comprise a chemical moiety at its 3′ and/or 5′ end. Such moieties include, but are not limited to amine, azide, alkyne, thio, dibenzocyclooctyne (DBCO), or Rhodamine. In certain embodiment, the chemical moiety is conjugated to the Nucleic acid component by a linker, such as an alkyl chain. In one embodiment, the chemical moiety of the modified Nucleic acid component can be used to attach the Nucleic acid component to another molecule, such as DNA, RNA, protein, or nanoparticles. Such chemically modified Nucleic acid component can be used to identify or enrich cells generically edited by a Fanzor polypeptide and related systems (see e.g., Lee et al., eLife, 2017, 6: e²⁵³¹², DOI: 10.7554).

[0223] In some embodiments, a sequence can be added to the ωRNA to increase stability and/or otherwise influence 2D or 3D structure, and/or interactions with the Fanzor polypeptide. In some embodiments, such a sequence is added to the 5′ end, 3′ end, or both of the ωRNA or nucleic acid component. In some embodiments, such a sequence is added within the scaffold of an ωRNA or nucleic acid component. In some embodiments, the sequence is a hepatitis delta virus sequence. In some embodiments, the sequence is not a hepatitis delta virus sequence.

[0224] In a particular embodiment, the conserved nucleotide sequence may be modified to comprise one or more protein-binding RNA aptamers. In a particular embodiment, one or more aptamers may be included such as part of optimized secondary structure. Such aptamers may be capable of binding a bacteriophage coat protein as detailed further herein.

[0225] In embodiments, the Fanzor polypeptide utilizes the Nucleic acid component scaffold comprising a polynucleotide sequence that facilitates the interaction with the Fanzor protein, allowing for sequence specific binding and/or targeting of the Nucleic acid component molecule with the target polynucleotide. Chemical synthesis of the Nucleic acid component scaffold is contemplated, using covalent linkage using various bioconjugation reactions, loops, bridges, and non-nucleotide links via modifications of sugar, inter-nucleotide phosphodiester bonds, purine and pyrimidine residues. Sletten et al., Angew. Chem. Int. Ed. (2009) 48:6974-6998; Manoharan, M. Curr. Opin. Chem. Biol. (2004) 8:570-9; Behlke et al., Oligonucleotides (2008) 18:305-19; Watts, et al., Drug. Discov. Today (2008) 13:842-55; Shukla, et al., ChemMedChem (2010) 5:328-49; chemical synthesis using automated, solid-phase oligonucleotide synthesis machines with 2′-acetoxyethyl orthoester (2′-ACE) (Scaringe et al., J. Am. Chem. Soc. (1998) 120:11820-11821; Scaringe, Methods Enzymol. (2000) 317:3-18) or 2′-thionocarbamate (2′-TC) chemistry (Dellinger et al., J. Am. Chem. Soc. (2011) 133:11540-11546; Hendel et al., Nat. Biotechnol. (2015) 33:985-989).

[0226] In certain example embodiments, the scaffold and spacer may be designed as two separate molecules that can hybridize or covalently joined into a single molecule. Covalent linkage can be via a linker (e.g., a non-nucleotide loop) that comprises a moiety such as spacers, attachments, bioconjugates, chromophores, reporter groups, dye labeled RNAs, and non-naturally occurring nucleotide analogues. More specifically, suitable spacers for purposes of this invention include, but are not limited to, polyethers (e.g., polyethylene glycols, polyalcohols, polypropylene glycol or mixtures of ethylene and propylene glycols), polyamines group (e.g., spennine, spermidine and polymeric derivatives thereof), polyesters (e.g., poly(ethyl acrylate)), polyphosphodiesters, alkylenes, and combinations thereof. Suitable attachments include any moiety that can be added to the linker to add additional properties to the linker, such as but not limited to, fluorescent labels. Suitable bioconjugates include, but are not limited to, peptides, glycosides, lipids, cholesterol, phospholipids, diacyl glycerols and dialkyl glycerols, fatty acids, hydrocarbons, enzyme substrates, steroids, biotin, digoxigenin, carbohydrates, polysaccharides. Suitable chromophores, reporter groups, and dye-labeled RNAs include, but are not limited to, fluorescent dyes such as fluorescein and rhodamine, chemiluminescent, electrochemiluminescent, and bioluminescent marker compounds. The design of example linkers conjugating two Nucleic acid components are also described in WO 2004/015075.

[0227] The linker (e.g., a non-nucleotide loop) can be of any length. In one embodiment, the linker has a length equivalent to about 0-16 nucleotides. In one embodiment, the linker has a length equivalent to about 0-8 nucleotides. In one embodiment, the linker has a length equivalent to about 0-4 nucleotides. In one embodiment, the linker has a length equivalent to about 2 nucleotides. Example linker design is also described in International Patent Publication No. WO 2011/008730.

### Escorted Nucleic Acid Components

[0228] In particular embodiments, the compositions or complexes have one or more nucleic acid component molecules with a functional structure designed to improve or otherwise modify a nucleic acid component molecule structure, architecture, stability, genetic expression, delivery, transport or any combination thereof.

[0229] In some embodiments, such a structure can include an aptamer. Aptamers are biomolecules that can be designed or selected to bind tightly to other ligands, for example using a technique called systematic evolution of ligands by exponential enrichment (SELEX; Tuerk C, Gold L: “Systematic evolution of ligands by exponential enrichment: RNA ligands to bacteriophage T4 DNA polymerase.” Science 1990, 249:505-510). Nucleic acid aptamers can for example be selected from pools of random-sequence oligonucleotides, with high binding affinities and specificities for a wide range of biomedically relevant targets, suggesting a wide range of therapeutic utilities for aptamers (Keefe, Anthony D., Supriya Pai, and Andrew Ellington. “Aptamers as therapeutics.” Nature Reviews Drug Discovery 9.7 (2010): 537-550). These characteristics also suggest a wide range of uses for aptamers as drug delivery vehicles (Levy-Nissenbaum, Etgar, et al. “Nanotechnology and aptamers: applications in drug delivery.” Trends in biotechnology 26.8 (2008): 442-449; and Hicke BJ, Stephens A W. “Escort aptamers: a delivery service for diagnosis and therapy.” J Clin Invest 2000, 106:923-928.). Aptamers may also be constructed that function as molecular switches, responding to a que by changing properties, such as RNA aptamers that bind fluorophores to mimic the activity of green fluorescent protein (Paige, Jeremy S., Karen Y. Wu, and Samie R. Jaffrey. “RNA mimics of green fluorescent protein.” Science 333.6042 (2011): 642-646). It has also been suggested that aptamers may be used as components of targeted siRNA therapeutic delivery systems, for example targeting cell surface proteins (Zhou, Jichua, and John J. Rossi. “Aptamer-targeted cell-specific RNA interference.” Silence 1.1 (2010): 4).

[0230] Accordingly, in particular embodiments, the nucleic acid component molecule is modified, e.g., by one or more aptamer(s) designed to improve nucleic acid component molecule delivery, including delivery across the cellular membrane, to intracellular compartments, or into the nucleus. Such a structure can include, either in addition to the one or more aptamer(s) or without such one or more aptamer(s), moiety (ies) so as to render the nucleic acid component molecule deliverable, inducible or responsive to a selected effector. In some embodiments, the nucleic acid component molecule is responsive to a one or more particular conditions, such as normal or pathological physiological conditions, including without limitation pH, hypoxia, O₂ concentration, temperature, protein concentration, enzymatic concentration, lipid structure, light exposure, mechanical disruption (e.g., ultrasound waves), magnetic fields, electric fields, electromagnetic radiation, or any combination thereof. Such responsiveness can also be referred to as an inducible system.

[0231] In some example embodiments, light responsiveness of an inducible system may be achieved via the activation and binding of cryptochrome-2 and CIB1. Blue light stimulation induces an activating conformational change in cryptochrome-2, resulting in recruitment of its binding partner CIB1. This binding is fast and reversible, achieving saturation in <15 sec following pulsed stimulation and returning to baseline <15 min after the end of stimulation. These rapid binding kinetics result in a system temporally bound only by the speed of transcription/translation and transcript/protein degradation, rather than uptake and clearance of inducing agents. Crytochrome-2 activation is also highly sensitive, allowing for the use of low light intensity stimulation and mitigating the risks of phototoxicity. Further, in a context such as the intact mammalian brain, variable light intensity may be used to control the size of a stimulated region, allowing for greater precision than vector delivery alone may offer.

[0232] Energy sources such as electromagnetic radiation, sound energy or thermal energy may induce the Nucleic acid component molecule. Advantageously, the electromagnetic radiation is a component of visible light. In a preferred embodiment, the light is a blue light with a wavelength of about 450 to about 495 nm. In an especially preferred embodiment, the wavelength is about 488 nm. In another preferred embodiment, the light stimulation is via pulses. The light power may range from about 0-9 mW/cm2. In a preferred embodiment, a stimulation paradigm of as low as 0.25 sec every 15 sec should result in maximal activation.

[0233] The chemical or energy sensitive Nucleic acid component may undergo a conformational change upon induction by the binding of a chemical source or by the energy allowing it act as a nucleic acid component and have the Fanzor polypeptide system or complex function. The invention can involve applying the chemical source or energy so as to have the nucleic acid component function and the Fanzor polypeptide system or complex function; and optionally further determining that the expression of the genomic locus is altered.

[0234] There are several different designs of this chemical inducible system: 1. ABI-PYL based system inducible by Abscisic Acid (ABA) (see, e.g., stke.sciencemag.org/cgi/content/abstract/sigtrans; 4/164/rs2), 2. FKBP-FRB based system inducible by rapamycin (or related chemicals based on rapamycin) (see, e.g., nature.com/nmeth/journal/v2/n6/full/nmeth763.html), 3. GID1-GAI based system inducible by Gibberellin (GA) (see, e.g., nature.com/nchembio/journal/v8/n5/full/nchembio.922.html).

[0235] A chemical inducible system can be an estrogen receptor (ER) based system inducible by 4-hydroxytamoxifen (4OHT) (see, e.g., pnas.org/content/1Apr. 3, 1027.abstract). A mutated ligand-binding domain of the estrogen receptor called ERT2 translocates into the nucleus of cells upon binding of 4-hydroxytamoxifen. In further embodiments of the invention any naturally occurring or engineered derivative of any nuclear receptor, thyroid hormone receptor, retinoic acid receptor, estrogen receptor, estrogen-related receptor, glucocorticoid receptor, progesterone receptor, androgen receptor may be used in inducible systems analogous to the ER based inducible system.

[0236] Another inducible system is based on the design using Transient receptor potential (TRP) ion channel-based system inducible by energy, heat or radio-wave (see, e.g., sciencemag.org/content/336/6081/604). These TRP family proteins respond to different stimuli, including light and heat. When this protein is activated by light or heat, the ion channel will open and allow the entering of ions such as calcium into the plasma membrane. This influx of ions will bind to intracellular ion interacting partners linked to a polypeptide including the nucleic acid component and the other components of the Fanzor polypeptide/Nucleic acid component molecule complex or system, and the binding will induce the change of sub-cellular localization of the polypeptide, leading to the entire polypeptide entering the nucleus of cells. Once inside the nucleus, the nucleic acid component protein, and the other components of the Fanzor polypeptide/Nucleic acid component molecule complex will be active and modulating target gene expression in cells.

[0237] While light activation may be an advantageous embodiment, sometimes it may be disadvantageous especially for in vivo applications in which the light may not penetrate the skin or other organs. In this instance, other methods of energy activation are contemplated, in particular, electric field energy and/or ultrasound which have a similar effect.

[0238] Electric field energy is preferably administered substantially as described in the art, using one or more electric pulses of from about 1 Volt/cm to about 10 kVolts/cm under in vivo conditions. Instead of or in addition to the pulses, the electric field may be delivered in a continuous manner. The electric pulse may be applied for between 1 us and 500 milliseconds, preferably between 1 us and 100 milliseconds. The electric field may be applied continuously or in a pulsed manner for 5 about minutes.

[0239] As used herein, ‘electric field energy’ is the electrical energy to which a cell is exposed. Preferably the electric field has a strength of from about 1 Volt/cm to about 10 k Volts/cm or more under in vivo conditions (see WO97/49450).

[0240] As used herein, the term “electric field” includes one or more pulses at variable capacitance and voltage and including exponential and/or square wave and/or modulated wave and/or modulated square wave forms. References to electric fields and electricity should be taken to include reference the presence of an electric potential difference in the environment of a cell. Such an environment may be set up by way of static electricity, alternating current (AC), direct current (DC), etc., as known in the art. The electric field may be uniform, non-uniform or otherwise, and may vary in strength and/or direction in a time dependent manner.

[0241] Single or multiple applications of electric field, as well as single or multiple applications of ultrasound are also possible, in any order and in any combination. The ultrasound and/or the electric field may be delivered as single or multiple continuous applications, or as pulses (pulsatile delivery).

[0242] Electroporation has been used in both in vitro and in vivo procedures to introduce foreign material into living cells. With in vitro applications, a sample of live cells is first mixed with the agent of interest and placed between electrodes such as parallel plates. Then, the electrodes apply an electrical field to the cell/implant mixture. Examples of systems that perform in vitro electroporation include the Electro Cell Manipulator ECM600 product, and the Electro Square Porator T820, both made by the BTX Division of Genetronics, Inc (see U.S. Pat. No. 5,869,326).

[0243] The known electroporation techniques (both in vitro and in vivo) function by applying a brief high voltage pulse to electrodes positioned around the treatment region. The electric field generated between the electrodes causes the cell membranes to temporarily become porous, whereupon molecules of the agent of interest enter the cells. In known electroporation applications, this electric field comprises a single square wave pulse on the order of 1000 V/cm, of about 100.mu.s duration. Such a pulse may be generated, for example, in known applications of the Electro Square Porator T820.

[0244] Preferably, the electric field has a strength of from about 1 V/cm to about 10 kV/cm under in vitro conditions. Thus, the electric field may have a strength of 1 V/cm, 2 V/cm, 3 V/cm, 4 V/cm, 5 V/cm, 6 V/cm, 7 V/cm, 8 V/cm, 9 V/cm, 10 V/cm, 20 V/cm, 50 V/cm, 100 V/cm, 200 V/cm, 300 V/cm, 400 V/cm, 500 V/cm, 600 V/cm, 700 V/cm, 800 V/cm, 900 V/cm, 1 kV/cm, 2 kV/cm, 5 kV/cm, 10 kV/cm, 20 kV/cm, 50 kV/cm or more. More preferably from about 0.5 kV/cm to about 4.0 kV/cm under in vitro conditions. Preferably the electric field has a strength of from about 1 V/cm to about 10 kV/cm under in vivo conditions. However, the electric field strengths may be lowered where the number of pulses delivered to the target site are increased. Thus, pulsatile delivery of electric fields at lower field strengths is envisaged.

[0245] Preferably, the application of the electric field is in the form of multiple pulses such as double pulses of the same strength and capacitance or sequential pulses of varying strength and/or capacitance. As used herein, the term “pulse” includes one or more electric pulses at variable capacitance and voltage and including exponential and/or square wave and/or modulated wave/square wave forms.

[0246] Preferably, the electric pulse is delivered as a waveform selected from an exponential wave form, a square wave form, a modulated wave form and a modulated square wave form.

[0247] A preferred embodiment employs direct current at low voltage. Thus, Applicants disclose the use of an electric field which is applied to the cell, tissue or tissue mass at a field strength of between 1V/cm and 20V/cm, for a period of 100 milliseconds or more, preferably 15 minutes or more.

[0248] Ultrasound is advantageously administered at a power level of from about 0.05 W/cm2 to about 100 W/cm². Diagnostic or therapeutic ultrasound may be used, or combinations thereof.

[0249] As used herein, the term “ultrasound” refers to a form of energy which consists of mechanical vibrations the frequencies of which are so high they are above the range of human hearing. Lower frequency limit of the ultrasonic spectrum may generally be taken as about 20 kHz. Most diagnostic applications of ultrasound employ frequencies in the range 1 and 15 MHz′ (From Ultrasonics in Clinical Diagnosis, P. N. T. Wells, ed., 2nd. Edition, Publ. Churchill Livingstone [Edinburgh, London & NY, 1977]).

[0250] Ultrasound has been used in both diagnostic and therapeutic applications. When used as a diagnostic tool (“diagnostic ultrasound”), ultrasound is typically used in an energy density range of up to about 100 mW/cm2 (FDA recommendation), although energy densities of up to 750 mW/cm2 have been used. In physiotherapy, ultrasound is typically used as an energy source in a range up to about 3 to 4 W/cm2 (WHO recommendation). In other therapeutic applications, higher intensities of ultrasound may be employed, for example, HIFU at 100 W/cm up to 1 kW/cm2 (or even higher) for short periods of time. The term “ultrasound” as used in this specification is intended to encompass diagnostic, therapeutic and focused ultrasound.

[0251] Focused ultrasound (FUS) allows thermal energy to be delivered without an invasive probe (see Morocz et al 1998 Journal of Magnetic Resonance Imaging Vol. 8, No. 1, pp. 136-142. Another form of focused ultrasound is high intensity focused ultrasound (HIFU) which is reviewed by Moussatov et al in Ultrasonics (1998) Vol. 36, No. 8, pp. 893-900 and TranHuuHue et al in Acustica (1997) Vol. 83, No. 6, pp. 1103-1106.

[0252] Preferably, a combination of diagnostic ultrasound and a therapeutic ultrasound is employed. This combination is not intended to be limiting, however, and the skilled reader will appreciate that any variety of combinations of ultrasound may be used. Additionally, the energy density, frequency of ultrasound, and period of exposure may be varied.

[0253] Preferably, the exposure to an ultrasound energy source is at a power density of from about 0.05 to about 100 Wcm−2. Even more preferably, the exposure to an ultrasound energy source is at a power density of from about 1 to about 15 Wcm−2.

[0254] Preferably, the exposure to an ultrasound energy source is at a frequency of from about 0.015 to about 10.0 MHz. More preferably the exposure to an ultrasound energy source is at a frequency of from about 0.02 to about 5.0 MHz or about 6.0 MHz. Most preferably, the ultrasound is applied at a frequency of 3 MHZ.

[0255] Preferably the exposure is for periods of from about 10 milliseconds to about 60 minutes. Preferably the exposure is for periods of from about 1 second to about 5 minutes. More preferably, the ultrasound is applied for about 2 minutes. Depending on the particular target cell to be disrupted, however, the exposure may be for a longer duration, for example, for 15 minutes.

[0256] Advantageously, the target tissue is exposed to an ultrasound energy source at an acoustic power density of from about 0.05 Wcm−2 to about 10 Wcm−2 with a frequency ranging from about 0.015 to about 10 MHz (see WO 98/52609). However, alternatives are also possible, for example, exposure to an ultrasound energy source at an acoustic power density of above 100 Wcm−2, but for reduced periods of time, for example, 1000 Wcm−2 for periods in the millisecond range or less.

[0257] Preferably, the application of the ultrasound is in the form of multiple pulses; thus, both continuous wave and pulsed wave (pulsatile delivery of ultrasound) may be employed in any combination. For example, continuous wave ultrasound may be applied, followed by pulsed wave ultrasound, or vice versa. This may be repeated any number of times, in any order and combination. The pulsed wave ultrasound may be applied against a background of continuous wave ultrasound, and any number of pulses may be used in any number of groups.

[0258] Preferably, the ultrasound may comprise pulsed wave ultrasound. In a highly preferred embodiment, the ultrasound is applied at a power density of 0.7 Wcm−2 or 1.25 Wcm-2 as a continuous wave. Higher power densities may be employed if pulsed wave ultrasound is used.

[0259] Use of ultrasound is advantageous as, like light, it may be focused accurately on a target. Moreover, ultrasound is advantageous as it may be focused more deeply into tissues unlike light. It is therefore better suited to whole-tissue penetration (such as but not limited to a lobe of the liver) or whole organ (such as but not limited to the entire liver or an entire muscle, such as the heart) therapy. Another important advantage is that ultrasound is a non-invasive stimulus which is used in a wide variety of diagnostic and therapeutic applications. By way of example, ultrasound is well known in medical imaging techniques and, additionally, in orthopedic therapy. Furthermore, instruments suitable for the application of ultrasound to a subject vertebrate are widely available and their use is well known in the art.

[0260] In particular embodiments, the Nucleic acid component molecule is modified by a secondary structure to increase the specificity of the Fanzor polypeptide and related system, and the secondary structure can protect against exonuclease activity and allow for 5′ additions to the nucleic acid component sequence also referred to herein as a protected nucleic acid component molecule.

[0261] In one aspect, the invention provides for hybridizing a “protector RNA” to a sequence of the nucleic acid component molecule, wherein the “protector RNA” is an RNA strand complementary to the 3′ end of the nucleic acid component molecule to thereby generate a partially double-stranded nucleic acid component. In an embodiment of the invention, protecting mismatched bases (i.e., the bases of the nucleic acid component molecule which do not form part of the nucleic acid component sequence) with a perfectly complementary protector sequence decreases the likelihood of target DNA binding to the mismatched base pairs at the 3′ end. In particular embodiments of the invention, additional sequences comprising an extended length may also be present within the nucleic acid component molecule such that the nucleic acid component comprises a protector sequence within the nucleic acid component molecule. This “protector sequence” ensures that the nucleic acid component molecule comprises a “protected sequence” in addition to an “exposed sequence” (comprising the part of the nucleic acid component sequence hybridizing to the target sequence). In particular embodiments, the nucleic acid component molecule is modified by the presence of the protector nucleic acid component to comprise a secondary structure such as a hairpin. Advantageously there are three or four to thirty or more, e.g., about 10 or more, contiguous base pairs having complementarity to the protected sequence, the nucleic acid component sequence or both. It is advantageous that the protected portion does not impede thermodynamics of the Fanzor polypeptide and related system interacting with its target. By providing such an extension including a partially double stranded nucleic acid component molecule, the nucleic acid component molecule is considered protected and results in improved specific binding of the Fanzor polypeptide/nucleic acid component molecule complex, while maintaining specific activity.

[0262] In particular embodiments, use is made of a truncated nucleic acid component (tru-nucleic acid component), i.e., a nucleic acid component molecule which comprises a nucleic acid component sequence which is truncated in length with respect to the canonical nucleic acid component sequence length. As described by Nowak et al. (Nucleic Acids Res (2016) 44 (20): 9555-9564), such nucleic acid component molecules may allow catalytically active Fanzor polypeptide to bind its target without cleaving the target DNA. In particular embodiments, a truncated nucleic acid component is used which allows the binding of the target but retains only nickase activity of the Fanzor polypeptide.

[0263] In one embodiment, conjugation of triantennary N-acetyl galactosamine (GalNAc) to oligonucleotide components may be used to improve delivery, for example delivery to select cell types, for example hepatocytes (see International Patent Publication No. WO 2014/118272 incorporated herein by reference; Nair, J K et al., 2014, Journal of the American Chemical Society 136 (49), 16958-16961). This is considered to be a sugar-based particle and further details on other particle delivery systems and/or formulations are provided herein. GalNAc can therefore be considered to be a particle in the sense of the other particles described herein, such that general uses and other considerations, for instance delivery of said particles, apply to GalNAc particles as well. A solution-phase conjugation strategy may for example be used to attach triantennary GalNAc clusters (mol. wt. ˜ 2000) activated as PFP (pentafluorophenyl) esters onto 5′-hexylamino modified oligonucleotides (5′-HA ASOs, mol. wt. ˜ 8000 Da; Østergaard et al., Bioconjugate Chem., 2015, 26 (8), pp 1451-1455). Similarly, poly (acrylate) polymers have been described for in vivo nucleic acid delivery (see WO2013158141 incorporated herein by reference). In further alternative embodiments, pre-mixing Fanzor polypeptide nanoparticles (or protein complexes) with naturally occurring serum proteins may be used in order to improve delivery (Akinc A et al, 2010, Molecular Therapy vol. 18 no. 7, 1357-1364).

[0264] Screening techniques are available to identify delivery enhancers, for example by screening chemical libraries (Gilleron J. et al., 2015, Nucl. Acids Res. 43 (16): 7984-8001). Approaches have also been described for assessing the efficiency of delivery vehicles, such as lipid nanoparticles, which may be employed to identify effective delivery vehicles for components (see Sahay G. et al., 2013, Nature Biotechnology 31, 653-658).

### Target Adjacent Motifs (TAMs)

[0265] The Fanzor systems disclosed may recognize a target adjacent motif (TAM) in order to recognize and bind a target sequence on a target polynucleotide. In one embodiment, the nucleic acid-guided nucleases described herein (e.g., a Fanzor polypeptide and/or system) and related compositions do not contain a TAM requirement. The precise sequence and length requirements for the TAM will differ depending on the nucleic acid-guided nucleases used. In some examples, TAMs are typically 2-5 base pair sequences adjacent the protospacer (that is, the target sequence). In one example embodiment, the TAM is 3′ adjacent to the target polynucleotide. In another example embodiment, the TAM is 5′ adjacent to the target sequence of the target polynucleotide.

[0266] In one embodiment, the cleavage site is distant from the Target Adjacent Motif (TAM), e.g., the cleavage occurs after the nth nucleotide on the non-target strand and after the nucleotide on the targeted strand. In one embodiment, the cleavage site occurs after an identified nucleotide (counted from the TAM) on the non-target strand and after the further identified nucleotide (counted from the TAM) on the targeted strand. In one embodiment, a vector encodes a nucleic acid-targeting effector protein that may be mutated with respect to a corresponding wild-type enzyme such that the mutated nucleic acid-targeting effector protein lacks the ability to cleave one or both DNA and RNA strands of a target polynucleotide containing a target sequence.

[0267] In one example embodiment the TAM sequence is TCAG. In another example embodiment, the TAM sequence is TCAA. In some embodiments, the TAM sequence is or comprises TAA. In some embodiments, the TAM sequences is or comprises TTAA. In some embodiments, the TAM sequence is or comprises TAG. In some embodiments, the TAM sequence is 5′-NNTTAAN-3′. In some embodiments, the TAM sequence is 5′-NNTTAA-3′. In some embodiments, the TAM sequence is 5′-NNNTAG-3′. In some embodiments, the TAM sequence is 5′-(A)NCCG-3′ TAM identification and specificity may be identified, for example, using the methods disclosed in the Examples section below.

### HDR Donor Templates

[0268] In one embodiment, the compositions and systems herein may further comprise one or more nucleic acid templates. In some cases, the nucleic acid template may comprise one or more polynucleotides. In certain cases, the nucleic acid template may comprise coding sequences for one or more polynucleotides. The nucleic acid template may be a DNA template.

[0269] The donor polynucleotide may be used for editing the target polynucleotide. In some cases, the donor polynucleotide comprises one or more mutations to be introduced into the target polynucleotide. Examples of such mutations include substitutions, deletions, insertions, or a combination thereof. The mutations may cause a shift in an open reading frame on the target polynucleotide. In some cases, the donor polynucleotide alters a stop codon in the target polynucleotide. For example, the donor polynucleotide may correct a premature stop codon. The correction may be achieved by deleting the stop codon or introduces one or more mutations to the stop codon. In other example embodiments, the donor polynucleotide addresses loss of function mutations, deletions, or translocations that may occur, for example, in certain disease contexts by inserting or restoring a functional copy of a gene, or functional fragment thereof, or a functional regulatory sequence or functional fragment of a regulatory sequence. A functional fragment refers to less than the entire copy of a gene by providing sufficient nucleotide sequence to restore the functionality of a wild type gene or non-coding regulatory sequence (e.g., sequences encoding long non-coding RNA). In certain example embodiments, the systems disclosed herein may be used to replace a single allele of a defective gene or defective fragment thereof. In another example embodiment, the systems disclosed herein may be used to replace both alleles of a defective gene or defective gene fragment. A “defective gene” or “defective gene fragment” is a gene or portion of a gene that when expressed fails to generate a functioning protein or non-coding RNA with functionality of a corresponding wild-type gene. In certain example embodiments, these defective genes may be associated with one or more disease phenotypes. In certain example embodiments, the defective gene or gene fragment is not replaced but the systems described herein are used to insert donor polynucleotides that encode gene or gene fragments that compensate for or override defective gene expression such that cell phenotypes associated with defective gene expression are eliminated or changed to a different or desired cellular phenotype.

[0270] In an embodiment of the invention, the donor polynucleotide may include, but not be limited to, genes or gene fragments, encoding proteins or RNA transcripts to be expressed, regulatory elements, repair templates, and the like. According to the invention, the donor polynucleotides may comprise left end and right end sequence elements that function with transposition components that mediate insertion.

[0271] In certain cases, the donor polynucleotide manipulates a splicing site on the target polynucleotide. In some examples, the donor polynucleotide disrupts a splicing site. The disruption may be achieved by inserting the polynucleotide to a splicing site and/or introducing one or more mutations to the splicing site. In certain examples, the donor polynucleotide may restore a splicing site. For example, the polynucleotide may comprise a splicing site sequence.

[0272] The donor polynucleotide to be inserted may has a size from 10 base pair or nucleotides to 50 kb in length, e.g., from 50 to 40k, from 100 and 30 k, from 100 to 10000, from 100 to 300, from 200 to 400, from 300 to 500, from 400 to 600, from 500 to 700, from 600 to 800, from 700 to 900, from 800 to 1000, from 900 to from 1100, from 1000 to 1200, from 1100 to 1300, from 1200 to 1400, from 1300 to 1500, from 1400 to 1600, from 1500 to 1700, from 600 to 1800, from 1700 to 1900, from 1800 to 2000 base pairs (bp) or nucleotides in length.

### Systems and Complexes

[0273] In one aspect, the present disclosure provides nucleic acid-targeting systems. Such systems may be used to target, modify, and otherwise manipulate a nucleic acid. In one embodiment, the systems comprise the Fanzor polypeptide and one or more ωRNAs. The Fanzor polypeptide may have nuclease activity, e.g., capable of cleaving DNA. In some embodiments the Fanzor polypeptide may, or be engineered to have nickase activity, e.g., capable of generating a single-strand break on a double-strand nucleic acid such as dsDNA or dsRNA.

[0274] In some examples, two or more of the components in a system herein may form a complex. For example, the components are separate molecules but interact with each other directly or indirectly. In certain two or more of the components in a system herein may be comprised in a fusion protein.

[0275] As used herein, “target sequence” refers to a sequence to which a ωRNA is designed to have complementarity, where hybridization between a target sequence and a ωRNA promotes the formation of a polynucleotide targeting complex. Full complementarity is not necessarily required, provided there is sufficient complementarity to cause hybridization and promote formation of a nucleic acid-targeting complex. A target sequence may comprise DNA polynucleotides. In one embodiment, a target sequence is located in the nucleus or cytoplasm of a cell. In one embodiment, the target sequence may be within an organelle of a eukaryotic cell, for example, mitochondrion or chloroplast. A sequence or template that may be used for recombination into the targeted locus comprising the target sequences is referred to as an “editing template” or “editing sequence”. In aspects of the invention, an exogenous template may be referred to as an editing template. In an aspect the recombination is homologous recombination.

[0276] In one embodiment, formation of a nucleic acid-targeting complex (comprising a guide RNA hybridized to a target sequence and complexed with one or more nucleic acid-targeting effector proteins) results in cleavage of one or both nucleic acid strands in or near (e.g., within 1, 2, 3, 4, 5, 6, 7, 8, 9, 10, 20, 50, or more base pairs from) the target sequence. In one embodiment, one or more vectors driving expression of one or more elements of a nucleic acid-targeting system are introduced into a host cell such that expression of the elements of the nucleic acid-targeting system direct formation of a nucleic acid-targeting complex at one or more target sites. For example, a Fanzor polypeptide and a ωRNA could each be operably linked to separate regulatory elements on separate vectors. Alternatively, two or more of the elements expressed from the same or different regulatory elements, may be combined in a single vector, with one or more additional vectors providing any components of the nucleic acid-targeting system not included in the first vector. Fanzor system elements combined in a single vector may be arranged in any suitable orientation, such as one element located 5′ with respect to (“upstream” of) or 3′ with respect to (“downstream” of) a second element. The coding sequence of one element may be located on the same or opposite strand of the coding sequence of a second element, and oriented in the same or opposite direction. In one embodiment, a single promoter drives expression of a transcript encoding a Fanzor and a ωRNA embedded within one or more intron sequences (e.g., each in a different intron, two or more in at least one intron, or all in a single intron). In one embodiment, the Fanzor polypeptide and ωRNAs are operably linked to and expressed from the same promoter.

[0277] The present disclosure encompasses computational methods and algorithms to predict new Fanzor polypeptides, identify the components, and new Fanzor systems therein. In some examples, a computational method of identifying novel Fanzor polypeptide loci analysis of the candidates may be conducted by searching metagenomics databases for additional homologs.

[0278] In one aspect the identifying all predicted protein coding genes is carried out by comparing the identified genes with Fanzor polypeptide specific profiles and annotating them according to NCBI Conserved Domain Database (CDD) which is a protein annotation resource that consists of a collection of well-annotated multiple sequence alignment models for ancient domains and full-length proteins. These are available as position-specific score matrices (PSSMs) for fast identification of conserved domains in protein sequences via RPS-BLAST. CDD content includes NCBI-curated domains, which use 3D-structure information to explicitly define domain boundaries and provide insights into sequence/structure/function relationships, as well as domain models imported from a number of external source databases (Pfam, SMART, COG, PRK, TIGRFAM).

[0279] In a further aspect, the case-by-case analysis is performed using PSI-BLAST (Position-Specific Iterative Basic Local Alignment Search Tool). PSI-BLAST derives a position-specific scoring matrix (PSSM) or profile from the multiple sequence alignment of sequences detected above a given score threshold using protein-protein BLAST. This PSSM is used to further search the database for new matches and is updated for subsequent iterations with these newly detected sequences. Thus, PSI-BLAST provides a means of detecting distant relationships between proteins.

[0280] In another aspect, the case-by-case analysis is performed using HHpred, a method for sequence database searching and structure prediction that is as easy to use as BLAST or PSI-BLAST and that is at the same time much more sensitive in finding remote homologs. In fact, HHpred's sensitivity is competitive with the most powerful servers for structure prediction currently available. HHpred is the first server that is based on the pairwise comparison of profile hidden Markov models (HMMs). Whereas most conventional sequence search methods search sequence databases such as UniProt or the NR, HHpred searches alignment databases, like Pfam or SMART. This greatly simplifies the list of hits to a number of sequence families instead of a clutter of single sequences. All major publicly available profile and alignment databases are available through HHpred. HHpred accepts a single query sequence or a multiple alignment as input. Within only a few minutes it returns the search results in an easy-to-read format similar to that of PSI-BLAST. Search options include local or global alignment and scoring secondary structure similarity. HHpred can produce pairwise query-template sequence alignments, merged query-template multiple alignments (e.g., for transitive searches), as well as 3D structural models calculated by the MODELLER software from HHpred alignments.

### Specialized Systems

[0281] In one embodiment, the system is a Fanzor-based system that is capable of performing a specialized function or activity. For example, the Fanzor protein may be fused, operably coupled to, or otherwise associated with one or more heterologous functionals domains. In certain example embodiments, the Fanzor protein may be a catalytically dead Fanzor protein and/or have nickase activity. A nickase is an Fanzor protein that cuts only one strand of a double stranded target. In such embodiments, the catalytically inactive Fanzor or nickase provide a sequence specific targeting functionality via the Nucleic acid component that delivers the functional domain to or proximate a target sequence.

[0282] It is also envisaged that the Fanzor complex as a whole may be associated with two or more functional domains. For example, there may be two or more functional domains associated with the Fanzor polypeptide, or there may be two or more functional domains associated with the nucleic acid component (via one or more adaptor proteins or aptamers), or there may be one or more functional domains associated with the Fanzor polypeptide and one or more functional domains associated with the nucleic acid component.

[0283] In one embodiment, one or more functional domains are associated with a Fanzor polypeptide via an adaptor protein, for example as used with the modified guides of Konnerman et al. (Nature 517, 583-588, 29 Jan. 2015). In one embodiment, the one or more functional domains is attached to the adaptor protein so that upon binding of the Fanzor polypeptide to the RNA molecule and target, the functional domain is in a spatial orientation allowing for the functional domain to function in its attributed function.

[0284] In one embodiment, one or more functional domains are associated with a dead nucleic acid component. In one embodiment, a complex with active Fanzor polypeptide directs gene regulation by a functional domain at on gene locus while a functional domain associated with the nucleic acid component directs DNA cleavage by the active Fanzor polypeptide at another. In one embodiment, nucleic acid components are selected to maximize selectivity of regulation for a gene locus of interest compared to off-target regulation. In one embodiment, nucleic acid components are selected to maximize target gene regulation and minimize target cleavage. Loops of the nucleic acid component may be extended, without colliding with the Fanzor polypeptide by the insertion of distinct loop(s) or distinct sequence(s) that may recruit adaptor proteins that can bind to the distinct loop(s) or distinct sequence(s). The adaptor proteins may include but are not limited to orthogonal polynucleotide-binding protein/aptamer combinations that exist within the diversity of bacteriophage coat proteins. A list of such coat proteins includes, but is not limited to: QB, F2, GA, fr, JP501, M12, R17, BZ13, JP34, JP500, KU1, M11, MX1, TW18, VK, SP, FI, ID2, NL95, TW19, AP205, 4Cb5, ¢Cb8r, ¢Cb12r, ¢Cb23r, 7s and PRR1. These adaptor proteins or orthogonal RNA binding proteins can further recruit effector proteins or fusions which comprise one or more functional domains.

[0285] Example functional domains that may be fused to, operably coupled to, or otherwise associated with an Fanzor protein can be or include, but are not limited to a nuclear localization signal (NLS) domain, a nuclear export signal (NES) domain, a translational activation domain, a transcriptional activation domain (e.g. VP64, p65, MyoD1, HSF1, RTA, and SET7/9), a translation initiation domain, a transcriptional repression domain (e.g., a KRAB domain, NuE domain, NcoR domain, and a SID domain such as a SID4X domain), a nuclease domain (e.g., FokI), a histone modification domain (e.g., a histone acetyltransferase), a light inducible/controllable domain, a chemically inducible/controllable domain, a transposase domain, a homologous recombination machinery domain, a recombinase domain, a ligase domain, a topoisomerase domain, an integrase domain, and combinations thereof. Methods for generating catalytically dead Fanzor or a nickase Fanzor can be adapted from approaches in Cas9 proteins, see, for example, WO 2014/204725, Ran et al. Cell. 2013 Sep. 12; 154 (6): 1380-1389, known in the art and incorporated herein by reference Briefly, one or more mutations in the catalytic domain of the RuvC domain and/or the HNH domain of the Fanzor protein can be introduced that may reduce or abolish NHEJ activity. In an aspect, at least one mutation in the RuvC domain and at least one mutation in the HNH domain is provided.

[0286] In one embodiment, the functional domains can have one or more of the following activities: nucleobase deaminse activity, reverse transcriptase activity, retrotransposase activity, transposase activity, integrase activity, recombinase activity, topoisomerase activity, ligase activity, polymerase activity, helicase activity, methylase activity, demethylase activity, translation activation activity, translation initiation activity, translation repression activity, transcription activation activity, transcription repression activity, transcription release factor activity, histone modification activity, nuclease activity (e.g. VirD2), single-strand RNA cleavage activity, double-strand RNA cleavage activity, single-strand DNA cleavage activity, double-strand DNA cleavage activity, molecular switch activity, chemical inducibility, light inducibility, and nucleic acid binding activity. In one embodiment, the one or more functional domains may comprise epitope tags or reporters. Non-limiting examples of epitope tags include histidine (His) tags, V5 tags, FLAG tags, influenza hemagglutinin (HA) tags, Myc tags, VSV-G tags, and thioredoxin (Trx) tags. Examples of reporters include, but are not limited to, glutathione-S-transferase (GST), horseradish peroxidase (HRP), chloramphenicol acetyltransferase (CAT) beta-galactosidase, beta-glucuronidase, luciferase, green fluorescent protein (GFP), HcRed, DsRed, cyan fluorescent protein (CFP), yellow fluorescent protein (YFP), and auto-fluorescent proteins including blue fluorescent protein (BFP).

[0287] The one or more functional domain(s) may be positioned at, near, and/or in proximity to a terminus of the effector protein (e.g., a Fanzor protein). In embodiments having two or more functional domains, each of the two can be positioned at or near or in proximity to a terminus of the effector protein (e.g., a Fanzor protein). In one embodiment, such as those where the functional domain is operably coupled to the effector protein, the one or more functional domains can be tethered or linked via a suitable linker (including, but not limited to, GlySer linkers) to the effector protein (e.g., a Fanzor protein). When there is more than one functional domain, the functional domains can be same or different. In one embodiment, all the functional domains are the same. In one embodiment, all of the functional domains are different from each other. In one embodiment, at least two of the functional domains are different from each other. In one embodiment, at least two of the functional domains are the same as each other.

[0288] Histone modifying domains are also preferred In one embodiment. Exemplary histone modifying domains are discussed below. Transposase domains, HR (Homologous Recombination) machinery domains, recombinase domains, and/or integrase domains are also preferred as the present functional domains. In one embodiment, DNA integration activity includes HR machinery domains, integrase domains, recombinase domains and/or transposase domains.

[0289] In one embodiment, the DNA cleavage activity is due to a nuclease. In one embodiment, the nuclease comprises a Fokl nuclease. See, “Dimeric CRISPR RNA-guided FokI nucleases for highly specific genome editing”, Shengdar Q. Tsai, Nicolas Wyvekens, Cyd Khayter, Jennifer A. Foden, Vishal Thapar, Deepak Reyon, Mathew J. Goodwin, Martin J. Aryee, J. Keith Joung Nature Biotechnology 32 (6): 569-77 (2014), relates to dimeric RNA-guided FokI Nucleases that recognize extended sequences and can edit endogenous genes with high efficiencies in human cells.

[0290] Functional domains may be used to regulate transcription, e.g., transcriptional repression. Transcriptional repression is often mediated by chromatin modifying enzymes such as histone methyltransferases (HMTs) and deacetylases (HDACs). Repressive histone effector domains are known and an exemplary list is provided below. Proteins and functional truncations of small size to facilitate efficient viral packaging (for instance via AAV) are preferred. In general, however, the domains may include HDACs, histone methyltransferases (HMTs), and histone acetyltransferase (HAT) inhibitors, as well as HDAC and HMT recruiting proteins. The functional domain may be or include, In one embodiment, HDAC Effector Domains, HDAC Recruiter Effector Domains, Histone Methyltransferase (HMT) Effector Domains, Histone Methyltransferase (HMT) Recruiter Effector Domains, or Histone Acetyltransferase Inhibitor Effector Domains.

[0291] In one embodiment, the functional domain may be a Methyltransferase (HMT) Effector Domain. Preferred examples include NUE, vSET, EHMT2/G9A, SUV39H1, dim-5, KYP, SUVR4, SET4, SET1, SETD8, and TgSET8. NUE is exemplified in the present Examples and, although preferred, it is envisaged that others in the class will also be useful.

[0292] In one embodiment, the functional domain may be a Histone Methyltransferase (HMT) Recruiter Effector Domain. Preferred examples include Hpla, PHF19, and NIPP1.

[0293] In one embodiment, the functional domain may be Histone Acetyltransferase Inhibitor Effector Domain. Preferred examples include SET/TAF-1β.

[0294] In some cases, the target endogenous (regulatory) control elements (such as enhancers and silencers) in addition to a promoter or promoter-proximal elements. Thus, the invention can also be used to target endogenous control elements (including enhancers and silencers) in addition to targeting of the promoter. These control elements can be located upstream and downstream of the transcriptional start site (TSS), starting from 200 bp from the TSS to 100 kb away. Targeting of known control elements can be used to activate or repress the gene of interest. In some cases, a single control element can influence the transcription of multiple target genes. Targeting of a single control element could therefore be used to control the transcription of multiple genes simultaneously.

[0295] Targeting of putative control elements on the other hand (e.g., by tiling the region of the putative control element as well as 200 bp up to 100 kB around the element) can be used as a means to verify such elements (by measuring the transcription of the gene of interest) or to detect novel control elements (e.g., by tiling 100 kb upstream and downstream of the TSS of the gene of interest). In addition, targeting of putative control elements can be useful in the context of understanding genetic causes of disease. Many mutations and common SNP variants associated with disease phenotypes are located outside coding regions. Targeting of such regions with either the activation or repression systems described herein can be followed by readout of transcription of either a) a set of putative targets (e.g., a set of genes located in closest proximity to the control element) or b) whole-transcriptome readout by e.g., RNAseq or microarray. This would allow for the identification of likely candidate genes involved in the disease phenotype. Such candidate genes could be useful as novel drug targets.

[0296] In one embodiment the one or more functional domains comprise an acetyltransferase, preferably a histone acetyltransferase. These are useful in the field of epigenomics, for example in methods of interrogating the epigenome. Methods of interrogating the epigenome may include, for example, targeting epigenomic sequences. Targeting epigenomic sequences may include the Nucleic acid component being directed to an epigenomic target sequence. Epigenomic target sequence may include, In one embodiment,

[0297] include a promoter, silencer or an enhancer sequence. The functional domains may be acetyltransferases domains. Examples of acetyltransferases are known but may include, In one embodiment, histone acetyltransferases. In one embodiment, the histone acetyltransferase may comprise the catalytic core of the human acetyltransferase p300 (Gerbasch & Reddy, Nature Biotech 6th April 2015).

[0298] Further examples of specialized Fanzor systems are discussed in further detail below.

### Fanzor Base Editing Systems

[0299] The present disclosure also provides for base editing systems. In some example embodiments, the Fanzor system is a base editing system. In some embodiments, the Fanzor base-editing system is a DNA base editing system. In some embodiments, the Fanzor base-editing system is an RNA base editing system. In general, such a system may comprise a n deaminase (e.g., an adenosine deaminase or cytidine deaminase) associated or coupled with (e.g., fused or linked to) with a Fanzor polypeptide. The Fanzor polypeptide may be a catalytically inactive, or dead Fanzor polypeptide, dFanzor. In certain examples, the nucleobase deaminase is a mutated form of an adenosine deaminase. The mutated form of the adenosine deaminase may have both adenosine deaminase and cytidine deaminase activities.

[0300] In some examples, the present disclosure provides an engineered, non-naturally occurring composition comprising: a dFanzor, a nucleobase deaminase associated or coupled with or otherwise capable of forming a complex with the dFanzor, and a ωRNA capable of forming a complex with the Fanzor protein and directing site-specific binding at a target sequence at or adjacent to a single nucleotide or nucleotide base pair to be edited.

[0301] The Fanzor base editor can be a cytosine base editor (CBEs) and/or adenine base editor (ABEs). In general, CBEs convert a C·G base pair into a T·A base pair (Komor et al. 2016. Nature. 533:420-424; Nishida et al. 2016. Science. 353; and Li et al. Nat. Biotech. 36:324-327) and ABEs convert an A·T base pair to a G·C base pair, which is facilitated by the nucleobase daminase associated or coupled with the Fanzor polypeptide. Collectively, CBEs and ABEs can mediate all four possible transition mutations (C to T, A to G, T to C, and G to A). Rees and Liu. 2018. Nat. Rev. Genet. 19 (12): 770-788, particularly at FIGS. 1b, 2a-2c, 3a-3f, and Table 1.

[0302] Generally, a Fanzor CBEs contain a cytidine deaminase that is fused or otherwise coupled to (e.g., linked or tethered) to a Fanzor protein and Fanzor ABEs contain an adenosine deaminase fused or otherwise coupled to (linked or tethered) to Fanzor protein. In some embodiments, a polynucleotide can be modified using a Fanzor base editing system.

[0303] In some embodiments, the nucleobase deaminase is fused or otherwise coupled to the N-terminus of a Fanzor polypeptide, the C-terminus of a Fanzor polypeptide, or both. In some embodiments, the deaminase is fused or otherwise coupled at an amino acid or between two contiguous amino acids of a Fanzor polypeptide between the N- and C-terminus of the fanzor polypeptide.

[0304] In some examples, the base editing systems may comprise an intein-mediated trans-splicing system that enables in vivo delivery of a base editor, e.g., a split-intein cytidine base editors (CBE) or adenine base editor (ABE) engineered to trans-splice. Examples of such base editing systems include those described in Colin K.W. Lim et al., Treatment of a Mouse Model of ALS by In Vivo Base Editing, Mol Ther. 2020 Jan. 14. pii: S1525-0016 (20) 30011-3. doi: 10.1016/j.ymthe.2020.01.005; and Jonathan M. Levy et al., Cytosine and adenine base editing of the brain, liver, retina, heart and skeletal muscle of mice via adeno-associated viruses, Nature Biomedical Engineering volume 4, pages 97-110 (2020), which are incorporated by reference herein in their entireties and can be adapted for use with the Fanzor base editing systems of the present invention

[0305] Examples of base editing systems include those described in International Patent Publication Nos. WO 2019/071048 (e.g. paragraphs [0933]-[0938]), WO 2019/084063 (e.g., paragraphs [0173]-[0186], [0323]-[0475], [0893]-[1094]), WO 2019/126716 (e.g., paragraphs [0290]-[0425], [1077]-[1084]), WO 2019/126709 (e.g., paragraphs [0294]-[0453]), WO 2019/126762 (e.g., paragraphs [0309]-[0438]), WO 2019/126774 (e.g., paragraphs [0511]-) [0670], Cox DBT, et al., RNA editing with CRISPR-Cas13, Science. 2017 Nov. 24;358 (6366): 1019-1027; Abudayyeh O O, et al., A cytosine deaminase for programmable single-base RNA editing, Science 26 Jul. 2019: Vol. 365, Issue 6451, pp. 382-386; Gaudelli N M et al., Programmable base editing of A·T to G·C in genomic DNA without DNA cleavage, Nature volume 551, pages 464-471 (23 Nov. 2017); Komor A C, et al., Programmable editing of a target base in genomic DNA without double-stranded DNA cleavage. Nature. 2016 May 19;533 (7603): 420-4; Jordan L. Doman et al., Evaluation and minimization of Cas9-independent off-target DNA editing by cytosine base editors, Nat Biotechnol (2020). doi.org/10.1038/s41587-020-0414-6; and Richter M F et al., Phage-assisted evolution of an adenine base editor with improved Cas domain compatibility and activity, Nat Biotechnol (2020). doi.org/10.1038/s41587-020-0453-z, which are incorporated by reference herein in their entireties and can be used to adapt to the Fanzor polypeptides and systems.

### Exemplary CBEs and Cytidine Deaminases

[0306] As previously discussed, Fanzor CBEs generally contain a cytidine deaminase. The term “cytidine deaminase” or “cytidine deaminase protein” or “cytidine deaminase activity” as used herein refers to a protein, a polypeptide, or one or more functional domain(s) of a protein or a polypeptide that is capable of catalyzing a hydrolytic deamination reaction that converts a cytosine (or an cytosine moiety of a molecule) to an uracil (or a uracil moiety of a molecule), as shown below. In some embodiments, the cytosine-containing molecule is a cytidine (C), and the uracil-containing molecule is an uridine (U). The cytosine-containing molecule can be deoxyribonucleic acid (DNA) or ribonucleic acid (RNA). In certain examples, a cytidine deaminase may be a cytidine deaminase acting on RNA (CDAR).

[0307] In some embodiments, the cytidine deaminase is derived from one or more metazoa species, including but not limited to, mammals, birds, frogs, squids, fish, flies and worms. In some embodiments, the cytidine deaminase is a human, primate, cow, dog rat or mouse cytidine deaminase. In some embodiments, the cytidine deaminase of the base editor system is a human, rat or lamprey cytidine deaminase. In some embodiments, cytidine deaminases that can be used in the base editing system of the present disclosure include, but are not limited to, members of the enzyme family known as apolipoprotein B mRNA-editing complex (APOBEC) family deaminase, an activation-induced deaminase (AID), or a cytidine deaminase 1 (CDA1). In particular embodiments, the deaminase in an APOBEC1 deaminase, an APOBEC2 deaminase, an APOBEC3A deaminase, an APOBEC3B deaminase, an APOBEC3C deaminase, and

[0308] APOBEC3D deaminase, an APOBEC3E deaminase, an APOBEC3F deaminase an APOBEC3G deaminase, an APOBEC3H deaminase, or an APOBEC4 deaminase.

[0309] In some embodiments, the cytidine deaminase is an apolipoprotein B mRNA-editing complex (APOBEC) family deaminase, an activation-induced deaminase (AID), or a cytidine deaminase 1 (CDA1). In particular embodiments, the deaminase in an APOBEC1 deaminase, an APOBEC2 deaminase, an APOBEC3A deaminase, an APOBEC3B deaminase, an APOBEC3C deaminase, and APOBEC3D deaminase, an APOBEC3E deaminase, an APOBEC3F deaminase an APOBEC3G deaminase, an APOBEC3H deaminase, or an APOBEC4 deaminase. In some embodiments, the cytidine deaminase is a human APOBEC, including, but not limited to, hAPOBEC1 or hAPOBEC3. In some embodiments, the cytidine deaminase is a human AID.

[0310] In some embodiments, the cytidine deaminase comprises human APOBEC1 full protein (hAPOBEC1) or the deaminase domain thereof (hAPOBEC1-D) or a C-terminally truncated version thereof (hAPOBEC-T). In some embodiments, the cytidine deaminase is an APOBEC family member that is homologous to hAPOBEC1, hAPOBEC-D or hAPOBEC-T.

[0311] In some embodiments, the cytidine deaminase comprises human AID1 full protein (hAID) or the deaminase domain thereof (hAID-D) or a C-terminally truncated version thereof (hAID-T). In some embodiments, the cytidine deaminase is an AID family member that is homologous to hAID, hAID-D or hAID-T. In some embodiments, the hAID-T is a hAID which is C-terminally truncated by about 20 amino acids.

[0312] In some embodiments, the cytidine deaminase is an APOBEC1 deaminase comprising one or more mutations corresponding to W90A, W90Y, R118A, H121R, H122R, R126A, R126E, or R132E in rat APOBEC1, or an APOBEC3G deaminase comprising one or more mutations corresponding to W285A, W285Y, R313A, D316R, D317R, R320A, R320E, or R326E in human APOBEC3G.

[0313] In some embodiments, the cytidine deaminase comprises the wild-type amino acid sequence of a cytosine deaminase. In some embodiments, the cytidine deaminase comprises one or more mutations in the cytosine deaminase sequence, such that the editing efficiency, and/or substrate editing preference of the cytosine deaminase is changed according to specific needs.

[0314] In some embodiments, the cytidine deaminase or engineered adenosine deaminase with cytidine deaminase activity is capable of targeting cytosine in a DNA single strand. In certain example embodiments the cytidine deaminase activity edits on a single strand present outside of the binding component e.g., bound Fanzor protein. In other example embodiments, the cytidine deaminase may edit at a localized bubble, such as a localized bubble formed by a mismatch at the target edit site but the guide sequence. In certain example embodiments, the cytidine deaminase contains mutations that help focus the area of activity (e.g., editing window) such as those disclosed in Kim et al., Nature Biotechnology (2017) 35 (4): 371-377 (doi: 10.1038/nbt.3803.

[0315] Certain mutations of APOBEC1 and APOBEC3 proteins have been described in Kim et al., Nature Biotechnology (2017) 35 (4): 371-377 (doi: 10.1038/nbt.3803); and Harris et al. Mol. Cell (2002) 10:1247-1253, each of which is incorporated herein by reference in its entirety. In some embodiments, the APOBEC1 and/or APOBEC3 contained in a Fanzor base editing system contain one or more mutaions described in Kim et al., Nature Biotechnology (2017) 35 (4): 371-377 (doi: 10.1038/nbt.3803); and Harris et al. Mol. Cell (2002) 10:1247-1253.

[0316] In some embodiments, the cytidine deaminase is an APOBEC1 deaminase comprising one or more mutations at amino acid positions corresponding to W90, R118, H121, H122, R126, or R132 in rat APOBEC1, or an APOBEC3G deaminase comprising one or more mutations at amino acid positions corresponding to W285, R313, D316, D317X, R320, or R326 in human APOBEC3G.

[0317] In some embodiments, the cytidine deaminase comprises a mutation at tryptophane⁹⁰ of the rat APOBEC1 amino acid sequence, or a corresponding position in a homologous APOBEC protein, such as tryptophane²⁸⁵ of APOBEC3G. In some embodiments, the tryptophane residue at position 90 is replaced by a tyrosine or phenylalanine residue (W90Y or W90F).

[0318] In some embodiments, the cytidine deaminase comprises a mutation at Arginine¹¹⁸ of the rat APOBEC1 amino acid sequence, or a corresponding position in a homologous APOBEC protein. In some embodiments, the arginine residue at position 118 is replaced by an alanine residue (R118A).

[0319] In some embodiments, the cytidine deaminase comprises a mutation at Histidine¹²¹ of the rat APOBEC1 amino acid sequence, or a corresponding position in a homologous APOBEC protein. In some embodiments, the histidine residue at position 121 is replaced by an arginine residue (H121R).

[0320] In some embodiments, the cytidine deaminase comprises a mutation at Histidine¹²² of the rat APOBEC1 amino acid sequence, or a corresponding position in a homologous APOBEC protein. In some embodiments, the histidine residue at position 122 is replaced by an arginine residue (H122R).

[0321] In some embodiments, the cytidine deaminase comprises a mutation at Arginine¹²⁶ of the rat APOBEC1 amino acid sequence, or a corresponding position in a homologous APOBEC protein, such as Arginine³²⁰ of APOBEC3G. In some embodiments, the arginine residue at position 126 is replaced by an alanine residue (R126A) or by a glutamic acid (R126E).

[0322] In some embodiments, the cytidine deaminase comprises a mutation at arginine¹³² of the APOBEC1 amino acid sequence, or a corresponding position in a homologous APOBEC protein. In some embodiments, the arginine residue at position 132 is replaced by a glutamic acid residue (R132E).

[0323] In some embodiments, to narrow the width of the editing window, the cytidine deaminase may comprise one or more of the mutations: W90Y, W90F, R126E and R132E, based on amino acid sequence positions of rat APOBEC1, and mutations in a homologous APOBEC protein corresponding to the above.

[0324] In some embodiments, to reduce editing efficiency, the cytidine deaminase may comprise one or more of the mutations: W90A, R118A, R132E, based on amino acid sequence positions of rat APOBEC1, and mutations in a homologous APOBEC protein corresponding to the above. In particular embodiments, it can be of interest to use a cytidine deaminase enzyme with reduced efficicay to reduce off-target effects.

[0325] In some embodiments, the cytidine deaminase is wild-type rat APOBEC1 (rAPOBEC1, or a catalytic domain thereof. In some embodiments, the cytidine deaminase comprises one or more mutations in the rAPOBEC1 sequence, such that the editing efficiency, and/or substrate editing preference of rAPOBEC1 is changed according to specific needs.

rAPOBEC1:
(SEQ ID NO: 554)
[sequence omitted]

[0326] In some embodiments, the cytidine deaminase is wild-type human APOBEC1 (hAPOBEC1) or a catalytic domain thereof. In some embodiments, the cytidine deaminase comprises one or more mutations in the hAPOBEC1 sequence, such that the editing efficiency, and/or substrate editing preference of hAPOBEC1 is changed according to specific needs.

APOBEC1:
(SEQ ID NO: 555)
MTSEKGPSTGDPTLRRRIEPWEFDVFYDPRELRKEACLLYEIKWGMSRK
IWRSSGKNTTNHVEVNFIKKFTSERDFHPSMSCSITWFLSWSPCWECSQ
AIREFLSRHPGVTLVIYVARLFWHMDQQNRQGLRDLVNSGVTIQIMRAS
EYYHCWRNFVNYPPGDEAHWPQYPPLWMMLYALELHCIILSLPPCLKIS
RRWQNHLTFFRLHLQNCHYQTIPPHILLATGLIHPSVAWR.

[0327] In some embodiments, the cytidine deaminase is wild-type human APOBEC3G (hAPOBEC3G) or a catalytic domain thereof. In some embodiments, the cytidine deaminase comprises one or more mutations in the hAPOBEC3G sequence, such that the editing efficiency, and/or substrate editing preference of hAPOBEC3G is changed according to specific needs.

hAPOBEC3G:
(SEQ ID NO: 556)
MELKYHPEMRFFHWFSKWRKLHRDQEYEVTWYISWSPCTKCTRDMATFL
AEDPKVTLTIFVARLYYFWDPDYQEALRSLCQKRDGPRATMKIMNYDEF
QHCWSKFVYSQRELFEPWNNLPKYYILLHIMLGEILRHSMDPPTFTFNF
NNEPWVRGRHETYLCYEVERMHNDTWVLLNQRRGFLCNQAPHKHGFLEG
RHAELCFLDVIPFWKLDLDQDYRVTCFTSWSPCFSCAQEMAKFISKNKH
VSLCIFTARIYDDQGRCQEGLRTLAEAGAKISIMTYSEFKHCWDTFVDH
QGCPFQPWDGLDEHSQDLSGRLRAILQNQEN.

[0328] In some embodiments, the cytidine deaminase is wild-type Petromyzon marinus CDA1 (pmCDA1) or a catalytic domain thereof. In some embodiments, the cytidine deaminase comprises one or more mutations in the pmCDA1 sequence, such that the editing efficiency, and/or substrate editing preference of pmCDA1 is changed according to specific needs.

pmCDA1:
(SEQ ID NO: 557)
MTDAEYVRIHEKLDIYTFKKQFFNNKKSVSHRCYVLFELKRRGERRACF
WGYAVNKPQSGTERGIHAEIFSIRKVEEYLRDNPGQFTINWYSSWSPCA
DCAEKILEWYNQELRGNGHTLKIWACKLYYEKNARNQIGLWNLRDNGVG
LNVMVSEHYQCCRKIFIQSSHNQLNENRWLEKTLKRAEKRRSELSIMIQ
VKILHTTKSPAV.

[0329] In some embodiments, the cytidine deaminase is wild-type human AID (hAID) or a catalytic domain thereof. In some embodiments, the cytidine deaminase comprises one or more mutations in the pmCDA1 sequence, such that the editing efficiency, and/or substrate editing preference of pmCDA1 is changed according to specific needs.

hAID:
(SEQ ID NO: 558)
MDSLLMNRRKFLYQFKNVRWAKGRRETYLCYVVKRRDSATSFSLDFGYL
RNKNGCHVELLFLRYISDWDLDPGRCYRVTWFTSWSPCYDCARHVADFL
RGNPYLSLRIFTARLYFCEDRKAEPEGLRRLHRAGVQIAIMTFKDYFYC
WNTFVENHERTFKAWEGLHENSVRLSRQLRRILLPLYEVDDLRDAFRTL
GLLD.

[0330] In some embodiments, the cytidine deaminase is truncated version of hAID (hAID-DC) or a catalytic domain thereof. In some embodiments, the cytidine deaminase comprises one or more mutations in the hAID-DC sequence, such that the editing efficiency, and/or substrate editing preference of hAID-DC is changed according to specific needs.

hAID-DC:
(SEQ ID NO: 559)
MDSLLMNRRKFLYQFKNVRWAKGRRETYLCYVVKRRDSATSFSLDFGYL
RNKNGCHVELLFLRYISDWDLDPGRCYRVTWFTSWSPCYDCARHVADFL
RGNPNLSLRIFTARLYFCEDRKAEPEGLRRLHRAGVQIAIMTFKDYFYC
WNTFVENHERTFKAWEGLHENSVRLSRQLRRILL.

[0331] Additional embodiments of the cytidine deaminase are disclosed in WO WO2017/070632, titled “Nucleobase Editor and Uses Thereof,” which is incorporated herein by reference in its entirety.

[0332] In some embodiments, the cytidine deaminase has an efficient deamination window that encloses the nucleotides susceptible to deamination editing. Accordingly, in some embodiments, the “editing window width” refers to the number of nucleotide positions at a given target site for which editing efficiency of the cytidine deaminase exceeds the half-maximal value for that target site. In some embodiments, the cytidine deaminase has an editing window width in the range of about 1 to about 6 nucleotides. In some embodiments, the editing window width of the cytidine deaminase is 1, 2, 3, 4, 5, or 6 nucleotides.

[0333] Not intended to be bound by theory, it is contemplated that in some embodiments, the length of a linker sequence (such as that coupling a deaminase and a Fanzor) can affect the editing window width. In some embodiments, the editing window width increases (e.g., from about 3 to about 6 nucleotides) as the linker length extends (e.g., from about 3 to about 21 amino acids). In a non-limiting example, a 16-residue linker offers an efficient deamination window of about 5 nucleotides. In some embodiments, the length of the guide molecule (e.g., omega RNA) affects the editing window width. In some embodiments, shortening the guide molecule (e.g., omega RNA) leads to a narrowed efficient deamination window of the cytidine deaminase.

[0334] In some embodiments, mutations to the cytidine deaminase affect the editing window width. In some embodiments, the cytidine deaminase component of a Fanzor CBE comprises one or more mutations that reduce the catalytic efficiency of the cytidine deaminase, such that the deaminase is prevented from deamination of multiple cytidines per DNA binding event. In some embodiments, tryptophan at residue 90 (W90) of APOBEC1 or a corresponding tryptophan residue in a homologous sequence is mutated. In some embodiments, the Fanzor polylpeptide is fused to or linked to an APOBEC1 mutant that comprises a W90Y or W90F mutation. In some embodiments, tryptophan at residue 285 (W285) of APOBEC3G, or a corresponding tryptophan residue in a homologous sequence is mutated. In some embodiments, the Fanzor polypeptide is fused to or linked to an APOBEC3G mutant that comprises a W285Y or W285F mutation.

[0335] In some embodiments, the cytidine deaminase component of a Fanzor base editor system comprises one or more mutations that reduce tolerance for non-optimal presentation of a cytidine to the deaminase active site. In some embodiments, the cytidine deaminase comprises one or more mutations that alter substrate binding activity of the deaminase active site. In some embodiments, the cytidine deaminase comprises one or more mutations that alter the conformation of DNA to be recognized and bound by the deaminase active site. In some embodiments, the cytidine deaminase comprises one or more mutations that alter the substrate accessibility to the deaminase active site. In some embodiments, arginine at residue 126 (R126) of APOBEC1 or a corresponding arginine residue in a homologous sequence is mutated. In some embodiments, the Fanzor protein is fused to or linked to an APOBEC1 that comprises a R126A or R126E mutation. In some embodiments, tryptophan at residue 320 (R320) of APOBEC3G, or a corresponding arginine residue in a homologous sequence is mutated. In some embodiments, the FAnzor protein is fused to or linked to an APOBEC3G mutant that comprises a R320A or R320E mutation. In some embodiments, arginine at residue 132 (R132) of APOBEC1 or a corresponding arginine residue in a homologous sequence is mutated. In some embodiments, the Fanzor protein is fused to or linked to an APOBEC1 mutant that comprises a R132E mutation.

[0336] In some embodiments, the APOBEC1 domain of the base editor system comprises one, two, or three mutations selected from W90Y, W90F, R126A, R126E, and R132E. In some embodiments, the APOBEC1 domain comprises double mutations of W90Y and R126E. In some embodiments, the APOBEC1 domain comprises double mutations of W90Y and R132E. In some embodiments, the APOBEC1 domain comprises double mutations of R126E and R132E. In some embodiments, the APOBEC1 domain comprises three mutations of W90Y, R126E and R132E.

[0337] Exemplary reference APOBEC sequences are SEQ ID NO: 195-200 of WO 2019/005886.

[0338] In some embodiments, one or more mutations in the cytidine deaminase as disclosed herein reduce the editing window width to about 2 nucleotides. In some embodiments, one or more mutations in the cytidine deaminase as disclosed herein reduce the editing window width to about 1 nucleotide. In some embodiments, one or more mutations in the cytidine deaminase as disclosed herein reduce the editing window width while only minimally or modestly affecting the editing efficiency of the enzyme. In some embodiments, one or more mutations in the cytidine deaminase as disclosed herein reduce the editing window width without reducing the editing efficiency of the enzyme. In some embodiments, one or more mutations in the cytidine deaminase as disclosed herein enable discrimination of neighboring cytidine nucleotides, which would be otherwise edited with similar efficiency by the cytidine deaminase.

[0339] In some embodiments, the Fanzor CBE comprises one or more copies of the UNG inhibitor, UGI, linked to the Fanzor protein similarly to CRISPR-Cas-based fourth generation Base editors (BE4s). In some embodiments, the FAnzor CBE comprises extended Fanzor-UGI linkers, which, without being bound by theory, can result in the improved product purity. In some embodiments, the Fanzor CBE further contains a Gam protein coupled to the N-terminus of BE4. See e.g., Komor et al., Sci. Adv. 3 (8) doi: 10.1126/sciadv.aao4774 (2017).

[0340] Not intended to be bound by theory, it is contemplated that the cytidine deaminase domain functions to recognize and convert one or more target cytosine (C) residue(s) contained in a single-stranded bubble of n RNA duplex, DNA duplex, or RNA/DNA duplex into (an) uracil (U) residue(s). In some embodiments, the deaminase domain comprises an active center.

[0341] In some embodiments, the active center comprises a zinc ion. In some embodiments, amino acid residues in or near the active center interact with one or more nucleotide(s) 5′ to a target cytosine residue. In some embodiments, amino acid residues in or near the active center interact with one or more nucleotide(s) 3′ to a target cytosine residue. In some embodiments, the cytidine deaminase protein recognizes and converts one or more target cytosine residue(s) in a single-stranded bubble of an RNA duplex, DNA duplex, or RNA/DNA duplex into uracil residues(s). In some embodiments, the cytidine deaminase protein recognizes a binding window on the single-stranded bubble of an RNA duplex, DNA duplex, or RNA/DNA duplex. In some embodiments, the binding window contains at least one target cytosine residue(s). In some embodiments, the binding window is in the range of about 3 bp to about 100 bp. In some embodiments, the binding window is in the range of about 5 bp to about 50 bp. In some embodiments, the binding window is in the range of about 10 bp to about 30 bp. In some embodiments, the binding window is about 1 bp, 2 bp, 3 bp, 5 bp, 7 bp, 10 bp, 15 bp, 20 bp, 25 bp, 30 bp, 40 bp, 45 bp, 50 bp, 55 bp, 60 bp, 65 bp, 70 bp, 75 bp, 80 bp, 85 bp, 90 bp, 95 bp, or 100 bp.

### Exemplary Fanzor ABEs and Adenosine Deaminases

[0342] As previously discussed, Fanzor ABEs generally contain an adenosine deaminase. See e.g., Guadellie et al., Nature 551:464-471 (2017). The term “adenosine deaminase” or “adenosine deaminase protein” as used herein refers to a protein, a polypeptide, or one or more functional domain(s) of a protein or a polypeptide that is capable of catalyzing a hydrolytic deamination reaction that converts an adenine (or an adenine moiety of a molecule) to a hypoxanthine (or a hypoxanthine moiety of a molecule), as shown below. In some embodiments, the adenine-containing molecule is an adenosine (A), and the hypoxanthine-containing molecule is an inosine (I). The adenine-containing molecule (such as a target polynucleotide) can be deoxyribonucleic acid (DNA) or ribonucleic acid (RNA).

[0343] Without limitation, described herein are exemplary ABEs and adenosine deaminases that can be included in BE system described herein. In some embodiments, the ABE comprises ABEmaxAW, SECURE-ABE, ABE7.10, ABE7.10F148A ABE8,, ABE8 (V106W), ABE8e, ABE8e (V106W), ABE8/ABE8e, ABE7.9, CP1041, CP1028, dCasMINI-ABE, CP-ABEs. In some embodiments, the adenosine deaminase is an ADAR.

[0344] In one aspect, the present disclosure provides an engineered adenosine deaminase, which can be coupled to (e.g., fused to or linked to) the Fanzor protein. The engineered adenosine deaminase may comprise one or more mutations herein. In one embodiment, the engineered adenosine deaminase has cytidine deaminase activity. In certain examples, the engineered adenosine deaminase has both cytidine deaminase activity and adenosine deaminase. In some cases, the modifications by base editors herein may be used for targeting post-translational signaling or catalysis. In one embodiment, compositions herein comprise nucleotide sequence comprising encoding sequences for one or more components of a base editing system. A base-editing system may comprise a deaminase (e.g., an adenosine deaminase or cytidine deaminase) fused with a Fanzor polypeptide or a variant thereof. In some cases, the target polynucleotide is edited at one or more bases to introduce a G→A or C→T mutation.

[0345] In some embodiments, the adenosine deaminases included in the Fanzor base editor are members of the enzyme family known as adenosine deaminases that act on RNA (ADARs), members of the enzyme family known as adenosine deaminases that act on tRNA (ADATs), and other adenosine deaminase domain-containing (ADAD) family members. According to the present disclosure, the adenosine deaminase is capable of targeting adenine in a RNA/DNA and RNA duplexes. Indeed, Zheng et al. (Nucleic Acids Res. 2017, 45 (6): 3369-3377) demonstrate that ADARs can carry out adenosine to inosine editing reactions on RNA/DNA and RNA/RNA duplexes. In particular embodiments, the adenosine deaminase has been modified to increase its ability to edit DNA in an RNA/DNA heteroduplex (such as that formed between a guide molecule and target DNA and is also referred to herein as the “RNA/DNA hybrid”, “DNA/RNA hybrid” or “double-stranded substrate”) or in an RNA duplex as detailed herein. In particular embodiments, the effector domain comprises the adenosine deaminase acting on RNA (ADAR) family of enzymes. In some embodiments, the adenosine deaminase is derived from one or more metazoa species, including but not limited to, mammals, birds, frogs, squids, fish, flies and worms. In some embodiments, the adenosine deaminase is a human, squid or Drosophila adenosine deaminase. In particular embodiments, the adenosine deaminase protein or catalytic domain thereof is capable of deaminating adenosine or cytidine in RNA or is an RNA specific adenosine deaminase and/or is a bacterial, human, cephalopod, or Drosophila adenosine deaminase protein or catalytic domain thereof, preferably TadA, more preferably ADAR, optionally huADAR, optionally (hu) ADAR1 or (hu) ADAR2, preferably huADAR2 or catalytic domain thereof. In some embodiments, the adenosine deaminase is a human ADAR, including hADAR1, hADAR2, hADAR3. In some embodiments, the adenosine deaminase is a Caenorhabditis elegans ADAR protein, including ADR-1 and ADR-2. In some embodiments, the adenosine deaminase is a Drosophila ADAR protein, including dAdar. In some embodiments, the adenosine deaminase is a squid Loligo pealeii ADAR protein, including sqADAR2a and sqADAR2b. In some embodiments, the adenosine deaminase is a human ADAT protein. In some embodiments, the adenosine deaminase is a Drosophila ADAT protein. In some embodiments, the adenosine deaminase is a human ADAD protein, including TENR (hADAD1) and TENRL (hADAD2).

[0346] In some embodiments, the adenosine deaminase is a TadA protein such as E. coli TadA. See Kim et al., Biochemistry 45:6407-6416 (2006); Wolf et al., EMBO J. 21:3841-3851 (2002). In some embodiments, the adenosine deaminase is mouse ADA. See Grunebaum et al., Curr. Opin. Allergy Clin. Immunol. 13:630-638 (2013). In some embodiments, the adenosine deaminase is human ADAT2. See Fukui et al., J. Nucleic Acids 2010:260512 (2010). In some embodiments, the deaminase (e.g., adenosine or cytidine deaminase) is one or more of those described in Cox et al., Science. 2017 November 24; 358 (6366): 1019-1027; Komore et al., Nature. 2016 May 19;533 (7603): 420-4; and Gaudelli et al., Nature. 2017 Nov. 23;551 (7681): 464-471.

[0347] The term “editing selectivity” as used herein refers to the fraction of all sites on a double-stranded substrate that is edited by an adenosine deaminase. Without being bound by theory, it is contemplated that editing selectivity of an adenosine deaminase is affected by the double-stranded substrate's length and secondary structures, such as the presence of mismatched bases, bulges and/or internal loops.

[0348] In some embodiments, when the substrate is a perfectly base-paired duplex longer than 50 bp, the adenosine deaminase may be able to deaminate multiple adenosine residues within the duplex (e.g., 50% of all adenosine residues). In some embodiments, when the substrate is shorter than 50 bp, the editing selectivity of an adenosine deaminase is affected by the presence of a mismatch at the target adenosine site. Particularly, in some embodiments, adenosine (A) residue having a mismatched cytidine (C) residue on the opposite strand is deaminated with high efficiency. In some embodiments, adenosine (A) residue having a mismatched guanosine (G) residue on the opposite strand is skipped without editing.

[0349] In some embodiments, the adenosine deaminase protein recognizes and converts one or more target adenosine residue(s) in a double-stranded nucleic acid substrate into inosine residues(s). In some embodiments, the double-stranded nucleic acid substrate is a RNA-DNA hybrid duplex. In some embodiments, the adenosine deaminase protein recognizes a binding window on the double-stranded substrate. In some embodiments, the binding window contains at least one target adenosine residue(s). In some embodiments, the binding window is in the range of about 3 bp to about 100 bp. In some embodiments, the binding window is in the range of about 5 bp to about 50 bp. In some embodiments, the binding window is in the range of about 10 bp to about 30 bp. In some embodiments, the binding window is about 1 bp, 2 bp, 3 bp, 5 bp, 7 bp, 10 bp, 15 bp, 20 bp, 25 bp, 30 bp, 40 bp, 45 bp, 50 bp, 55 bp, 60 bp, 65 bp, 70 bp, 75 bp, 80 bp, 85 bp, 90 bp, 95 bp, or 100 bp.

[0350] In some embodiments, the adenosine deaminase protein comprises one or more deaminase domains. Not intended to be bound by a particular theory, it is contemplated that the deaminase domain functions to recognize and convert one or more target adenosine (A) residue(s) contained in a double-stranded nucleic acid substrate into inosine (I) residue(s). In some embodiments, the deaminase domain comprises an active center. In some embodiments, the active center comprises a zinc ion. In some embodiments, during the A-to-I editing process, base pairing at the target adenosine residue is disrupted, and the target adenosine residue is “flipped” out of the double helix to become accessible by the adenosine deaminase. In some embodiments, amino acid residues in or near the active center interact with one or more nucleotide(s) 5′ to a target adenosine residue. In some embodiments, amino acid residues in or near the active center interact with one or more nucleotide(s) 3′ to a target adenosine residue. In some embodiments, amino acid residues in or near the active center further interact with the nucleotide complementary to the target adenosine residue on the opposite strand. In some embodiments, the amino acid residues form hydrogen bonds with the 2′ hydroxyl group of the nucleotides.

[0351] In some embodiments, the adenosine deaminase comprises human ADAR2 full protein (hADAR2) or the deaminase domain thereof (hADAR2-D). In some embodiments, the adenosine deaminase is an ADAR family member that is homologous to hADAR2 or hADAR2-D.

[0352] Particularly, in some embodiments, the homologous ADAR protein is human ADAR1 (hADAR1) or the deaminase domain thereof (hADAR1-D). In some embodiments, glycine 1007 of hADAR1-D corresponds to glycine 487 hADAR2-D, and glutamic Acid 1008 of hADAR1-D corresponds to glutamic acid 488 of hADAR2-D.

[0353] In some embodiments, the adenosine deaminase comprises the wild-type amino acid sequence of hADAR2-D. In some embodiments, the adenosine deaminase comprises one or more mutations in the hADAR2-D sequence, such that the editing efficiency, and/or substrate editing preference of hADAR2-D is changed according to specific needs. The engineered adenosine deaminase may be fused with a Cas protein, e.g., Cas9, or an engineered form of the Cas protein (e.g., an invective, dead form, a nickase form). In some examples, provided herein include an engineered adenosine deaminase fused with a dead Cas protein or Cas nickase.

[0354] Certain mutations of hADAR1 and hADAR2 proteins have been described in Kuttan et al., Proc Natl Acad Sci USA. (2012) 109 (48): E3295-304; Want et al. ACS Chem Biol. (2015) 10 (11): 2512-9; and Zheng et al. Nucleic Acids Res. (2017) 45 (6): 3369-337, each of which is incorporated herein by reference in its entirety.

### Modified Adenosine Deaminase Having C to U Deamination Activity

[0355] In certain example embodiments, directed evolution may be used to design modified ADAR proteins capable of catalyzing additional reactions besides deamination of an adenine to a hypoxanthine. For example, the modified ADAR protein may be capable of catalyzing deamination of a cytidine to a uracil. While not bound by a particular theory, mutations that improve C to U activity may alter the shape of the binding pocket to be more amenable to the smaller cytidine base. In some cases, the modified ADAR comprise mutations on residues the catalytic core and/or residues that contact the RNA target. Examples of mutations on residues in the catalytic core include V351G and K350I., based on amino acid sequence positions of hADAR2-D, and mutations in a homologous ADAR protein corresponding to the above. Examples of mutations on residues on the residues that contact with the RNA target include S486A and S495N, based on amino acid sequence positions of hADAR2-D, and mutations in a homologous ADAR protein corresponding to the above.

[0356] In certain embodiments the adenosine deaminase is engineered to convert the activity to cytidine deaminase. Such engineered adenosine deaminase may also retain its adenosine deaminase activity, i.e., such mutated adenosine deaminase may have both adenosine deaminase and cytidine deaminase activities. Accordingly in some embodiments, the adenosine deaminase comprises one or more mutations in positions selected from E396, C451, V351, R455, T375, K376, S486, Q488, R510, K594, R348, G593, S397, H443, L444, Y445, F442, E438, T448, A353, V355, T339, P539, T339, P539, V525 1520, P462 and N579. In particular embodiments, the adenosine deaminase comprises one or more mutations in a position selected from V351, L444, V355, V525 and 1520. In some embodiments, the adenosine deaminase may comprise one or more of mutations at E488, V351, S486, T375, S370, P462, N597, based on amino acid sequence positions of hADAR2-D, and mutations in a homologous ADAR protein corresponding to the above.

[0357] In some cases, the adenosine deaminase is double-stranded RNA-specific adenosine deaminase (ADAR). Examples of ADARs include those described Yiannis A Savva et al., The ADAR protein family, Genome Biol. 2012; 13 (12): 252, which is incorporated by reference in its entirety. In some examples, the ADAR may be hADAR1. In certain examples, the ADAR may be hADAR2. The sequence of hADAR2 may be that described under Accession No. AF525422.1.

[0358] In some cases, the deaminase may be a deaminase domain, e.g., a deaminase domain of ADAR (“ADAR-D”). In one example, the deaminase may be the deaminase domain of hADAR2 (“hADAR2-D), e.g., as described in Phelps K J et al., Recognition of duplex RNA by the deaminase domain of the RNA editing enzyme ADAR2. Nucleic Acids Res. 2015 January; 43 (2): 1123-32, which is incorporated by reference herein in its entirety. In a particular example, the hADAR2-D has a sequence comprising amino acid 299-701 of hADAR2-D, e.g., amino acid 299-701 of the sequence under Accession No. AF525422.1.

[0359] In certain examples, the system comprises a mutated form of an adenosine deaminase fused with a dFanzor. The mutated form of the adenosine deaminase may have both adenosine deaminase and cytidine deaminase activities. In one embodiment, the adenosine deaminase may comprise one or more of the mutations: E488Q based on amino acid sequence positions of hADAR2-D, and mutations in a homologous ADAR protein corresponding to the above. In one embodiment, the adenosine deaminase may comprise one or more of the mutations: E488Q, V351G, based on amino acid sequence positions of hADAR2-D, and mutations in a homologous ADAR protein corresponding to the above. In one embodiment, the adenosine deaminase may comprise one or more of the mutations: E488Q, V351G, S486A, based on amino acid sequence positions of hADAR2-D, and mutations in a homologous ADAR protein corresponding to the above. In one embodiment, the adenosine deaminase may comprise one or more of the mutations: E488Q, V351G, S486A, T375S, based on amino acid sequence positions of hADAR2-D, and mutations in a homologous ADAR protein corresponding to the above. In one embodiment, the adenosine deaminase may comprise one or more of the mutations: E488Q, V351G, S486A, T375S, S370C, based on amino acid sequence positions of hADAR2-D, and mutations in a homologous ADAR protein corresponding to the above. In one embodiment, the adenosine deaminase may comprise one or more of the mutations: E488Q, V351G, S486A, T375S, S370C, P462A, based on amino acid sequence positions of hADAR2-D, and mutations in a homologous ADAR protein corresponding to the above. In one embodiment, the adenosine deaminase may comprise one or more of the mutations: E488Q, V351G, S486A, T375S, S370C, P462A, N597I, based on amino acid sequence positions of hADAR2-D, and mutations in a homologous ADAR protein corresponding to the above. In one embodiment, the adenosine deaminase may comprise one or more of the mutations: E488Q, V351G, S486A, T375S, S370C, P462A, N597I, L332I, based on amino acid sequence positions of hADAR2-D, and mutations in a homologous ADAR protein corresponding to the above. In one embodiment, the adenosine deaminase may comprise one or more of the mutations: E488Q, V351G, S486A, T375S, S370C, P462A, N597I, L332I, 1398V, based on amino acid sequence positions of hADAR2-D, and mutations in a homologous ADAR protein corresponding to the above. In one embodiment, the adenosine deaminase may comprise one or more of the mutations: E488Q, V351G, S486A, T375S, S370C, P462A, N597I, L332I, 1398V, K350I, based on amino acid sequence positions of hADAR2-D, and mutations in a homologous ADAR protein corresponding to the above. In one embodiment, the adenosine deaminase may comprise one or more of the mutations: E488Q, V351G, S486A, T375S, S370C, P462A, N597I, L332I, 1398V, K350I, M383L, based on amino acid sequence positions of hADAR2-D, and mutations in a homologous ADAR protein corresponding to the above. In one embodiment, the adenosine deaminase may comprise one or more of the mutations: E488Q, V351G, S486A, T375S, S370C, P462A, N597I, L332I, 1398V, K350I, M383L, D619G, based on amino acid sequence positions of hADAR2-D, and mutations in a homologous ADAR protein corresponding to the above. In one embodiment, the adenosine deaminase may comprise one or more of the mutations: E488Q, V351G, S486A, T375S, S370C, P462A, N597I, L332I, 1398V, K350I, M383L, D619G, S582T, based on amino acid sequence positions of hADAR2-D, and mutations in a homologous ADAR protein corresponding to the above. In one embodiment, the adenosine deaminase may comprise one or more of the mutations: E488Q, V351G, S486A, T375S, S370C, P462A, N597I, L3321, 1398V, K350I, M383L, D619G, S582T, V440I based on amino acid sequence positions of hADAR2-D, and mutations in a homologous ADAR protein corresponding to the above. In one embodiment, the adenosine deaminase may comprise one or more of the mutations: E488Q, V351G, S486A, T375S, S370C, P462A, N597I, L332I, I398V, K350I, M383L, D619G, S582T, V440I, S495N based on amino acid sequence positions of hADAR2-D, and mutations in a homologous ADAR protein corresponding to the above. In one embodiment, the adenosine deaminase may comprise one or more of the mutations: E488Q, V351G, S486A, T375S, S370C, P462A, N597I, L332I, 1398V, K350I, M383L, D619G, S582T, V440I, S495N, K418E based on amino acid sequence positions of hADAR2-D, and mutations in a homologous ADAR protein corresponding to the above. In one embodiment, the adenosine deaminase may comprise one or more of the mutations: E488Q, V351G, S486A, T375S, S370C, P462A, N597I, L332I, 1398V, K350I, M383L, D619G, S582T, V440I, S495N, K418E, S661T based on amino acid sequence positions of hADAR2-D, and mutations in a homologous ADAR protein corresponding to the above. In some examples, provided herein includes a mutated adenosine deaminase e.g., an adenosine deaminase comprising one or more mutations of E488Q, V351G, S486A, T375S, S370C, P462A, N597I, L332I, 1398V, K350I, M383L, D619G, S582T, V440I, S495N, K418E, S661T, fused with a dead Fanzor polypeptide or Fanzor polypeptide nickase. In some examples, provided herein includes a mutated adenosine deaminase e.g., an adenosine deaminase comprising E488Q, V351G, S486A, T375S, S370C, P462A, N597I, L332I, 1398V, K350I, M383L, D619G, S582T, V440I, S495N, K418E, and S661T, fused with a dead Fanzor polypeptide or Fanzor polypeptide nickase. In some examples, provided herein includes a mutated adenosine deaminase e.g., an adenosine deaminase comprising E488Q, V351G, S486A, T375S, S370C, P462A, N597I, L332I, 1398V, K350I, M383L, D619G, S582T, V440I, S495N, K418E, S661T, and S375N fused with a dead Fanzor polypeptide or Fanzor polypeptide nickase.

[0360] In one embodiment, the adenosine deaminase may be a tRNA-specific adenosine deaminase or a variant thereof. In one embodiment, the adenosine deaminase may comprise one or more of the mutations: W23L, W23R, R26G, H36L, N37S, P48S, P48T, P48A, 149V, R51L, N72D, L84F, S97C, A106V, D108N, H123Y, G125A, A142N, S146C, D147Y, R152H, R152P, E155V, I156F, K157N, K161T, based on amino acid sequence positions of E. coli TadA, and mutations in a homologous deaminase protein corresponding to the above. In one embodiment, the adenosine deaminase may comprise one or more of the mutations: D108N based on amino acid sequence positions of E. coli TadA, and mutations in a homologous deaminase protein corresponding to the above. In one embodiment, the adenosine deaminase may comprise one or more of the mutations: A106V, D108N, based on amino acid sequence positions of E. coli TadA, and mutations in a homologous deaminase protein corresponding to the above. In one embodiment, the adenosine deaminase may comprise one or more of the mutations: A106V, D108N, D147Y, E155V, based on amino acid sequence positions of E. coli TadA, and mutations in a homologous deaminase protein corresponding to the above. In one embodiment, the adenosine deaminase may comprise one or more of the mutations: A106V, D108N, based on amino acid sequence positions of E. coli TadA, and mutations in a homologous deaminase protein corresponding to the above. In one embodiment, the adenosine deaminase may comprise one or more of the mutations: A106V, D108N, D147Y, E155V, L84F, H123Y, I156F, based on amino acid sequence positions of E. coli TadA, and mutations in a homologous deaminase protein corresponding to the above. In one embodiment, the adenosine deaminase may comprise one or more of the mutations: A106V, D108N, D147Y, E155V, L84F, H123Y, I156F, A142N, based on amino acid sequence positions of E. coli TadA, and mutations in a homologous deaminase protein corresponding to the above. In one embodiment, the adenosine deaminase may comprise one or more of the mutations: A106V, D108N, D147Y, E155V, L84F, H123Y, I156F, H36L, R51L, S146C, K157N, based on amino acid sequence positions of E. coli TadA, and mutations in a homologous deaminase protein corresponding to the above. In one embodiment, the adenosine deaminase may comprise one or more of the mutations: A106V, D108N, D147Y, E155V, L84F, H123Y, I156F, H36L, R51L, S146C, K157N, P48S, based on amino acid sequence positions of E. coli TadA, and mutations in a homologous deaminase protein corresponding to the above. In one embodiment, the adenosine deaminase may comprise one or more of the mutations: A106V, D108N, D147Y, E155V, L84F, H123Y, I156F, H36L, R51L, S146C, K157N, P48S, A142N, based on amino acid sequence positions of E. coli TadA, and mutations in a homologous deaminase protein corresponding to the above. In one embodiment, the adenosine deaminase may comprise one or more of the mutations: A106V, D108N, D147Y, E155V, L84F, H123Y, I156F, H36L, R51L, S146C, K157N, P48S, W23R, P48A, based on amino acid sequence positions of E. coli TadA, and mutations in a homologous deaminase protein corresponding to the above. In one embodiment, the adenosine deaminase may comprise one or more of the mutations: A106V, D108N, D147Y, E155V, L84F, H123Y, I156F, H36L, R51L, S146C, K157N, P48S, W23R, P48A, A142N, based on amino acid sequence positions of E. coli TadA, and mutations in a homologous deaminase protein corresponding to the above. In one embodiment, the adenosine deaminase may comprise one or more of the mutations: A106V, D108N, D147Y, E155V, L84F, H123Y, I156F, H36L, R51L, S146C, K157N, P48S, W23R, P48A, R152P, based on amino acid sequence positions of E. coli TadA, and mutations in a homologous deaminase protein corresponding to the above. In one embodiment, the adenosine deaminase may comprise one or more of the mutations: A106V, D108N, D147Y, E155V, L84F, H123Y, I156F, H36L, R51L, S146C, K157N, P48S, W23R, P48A, R152P, A142N, based on amino acid sequence positions of E. coli TadA, and mutations in a homologous deaminase protein corresponding to the above.

### Fanzor Prime Editing Systems

[0361] In one embodiment, the present disclosure provides compositions and systems may comprise a Fanzor or a dFanzor, one or more nucleic acid components, and a reverse transcriptase. The systems may be used to insert a donor polynucleotide to a target polynucleotide. In some examples, the composition or system comprises a catalytically inactive Fanzor polypeptide, a reverse transcriptase associated with or otherwise capable of forming a complex with the Fanzor polypeptide, and a nucleic acid component molecule capable of forming a complex with the Fanzor polypeptide and directing site-specific binding of the complex to a target sequence of a target polynucleotide, the nucleic acid component molecule further comprising a donor template which functions as a template for insertion of a donor sequence into a target polynucleotide by the reverse transcriptase.

[0362] In some cases, the dFanzor may be a nickase, e.g., a DNA nickase. The Fanzor nickase may comprise or more mutations. In some examples, the Fanzor comprises mutations corresponding to the mutations in the RuvC nuclease.

[0363] A reverse transcriptase domain may be a reverse transcriptase or a fragment thereof. In certain aspects, the reverse transcriptase is Human immunodeficiency virus (HIV) RT, Avian myoblastosis virus (AMV) RT, Moloney murine leukemia virus (M-MLV) RT a group II intron RT, a group II intron-like RT, or a chimeric RT. In certain embodiments, the RT comprises modified forms of these RTs, such as, engineered variants of Avian myoblastosis virus (AMV) RT, Moloney murine leukemia virus (M-MLV) RT, or Human immunodeficiency virus (HIV) RT (see, e.g., Anzalone, et al., Search- and-replace genome editing without double-strand breaks or donor DNA, Nature. 2019 December; 576 (7785): 149-157).

[0364] In some examples, the compositions and systems may comprise the Fanzor protein herein; a reverse transcriptase (RT) polypeptide connected to or otherwise capable of forming a complex with the Fanzor protein; and a ωRNA molecule capable of forming a complex with the Fanzor protein and comprising: a ωRNA sequence capable of directing site-specific binding of the Fanzor complex to a target sequence of a target polynucleotide; a 3′ binding site region capable of binding to a cleaved upstream strand of the target polynucleotide; and a RT template sequence encoding an extended sequence, wherein the extended sequence comprises a variant region and a 3′ homologous sequence capable of hybridization to the downstream cleaved strand of the target polynucleotide.

[0365] A wide variety of reverse transcriptases (RT) may be used in alternative embodiments of the present invention, including prokaryotic and eukaryotic RT, provided that the RT functions within the host to generate a donor polynucleotide sequence from the RNA template. If desired, the nucleotide sequence of a native RT may be modified, for example using known codon optimization techniques, so that expression within the desired host is optimized. A reverse transcriptase (RT) is an enzyme used to generate complementary DNA (cDNA) from an RNA template, a process termed reverse transcription. Reverse transcriptases are used by retroviruses to replicate their genomes, by retrotransposon mobile genetic elements to proliferate within the host genome, by eukaryotic cells to extend the telomeres at the ends of their linear chromosomes, and by some non-retroviruses such as the hepatitis B virus, a member of the Hepadnaviridae, which are dsDNA-RT viruses. Retroviral RT has three sequential biochemical activities: RNA-dependent DNA polymerase activity, ribonuclease H, and DNA-dependent DNA polymerase activity. Collectively, these activities enable the enzyme to convert single-stranded RNA into double-stranded cDNA. In one embodiment, the RT domain of a reverse transcriptase is used in the present invention. The domain may include only the RNA-dependent DNA polymerase activity. In some examples, the RT domain is non-mutagenic, i.e., does not cause mutation in the donor polynucleotide (e.g., during the reverse transcriptase process). In some cases, in some examples, the RT domain may be non-retron RT, e.g., a viral RT or a human endogenous RTs. In some examples, the RT domain may be retron RT or DGRs RT. In some examples, the RT may be less mutagenic than a counterpart wildtype RT. In one embodiment, the RT herein is not mutagenic.

[0366] The reverse transcriptase may be fused to the C-terminus of a Fanzor. Alternatively or additionally, the reverse transcriptase may be fused to the N-terminus of a Fanzor. The fusion may be via a linker and/or an adaptor protein. In some examples, the reverse transcriptase may be an M-MLV reverse transcriptase or variant thereof. The M-MLV reverse transcriptase variant may comprise one or more mutations. For the examples, the M-MLV reverse transcriptase may comprise D200N, L603W, and T330P. In another example, the M-MLV reverse transcriptase may comprise D200N, L603W, T330P, T306K, and W313F. In a particular example, the fusion of Fanzor polypeptide and reverse transcriptase is Fanzor polypeptide with mutation fused with M-MLV reverse transcriptase (D200N+L603W+T330P+T306K+W313F).

[0367] The small sizes of the Fanzor polypeptide herein may allow easier packaging and delivery of the prime editing system, e.g., with a viral vector, e.g., AAV or lentiviral vector.

[0368] A single-strand break (a nick) may be generated on the target DNA by the Fanzor polypeptide at the target site to expose a 3′-hydroxyl group, thus priming the reverse transcription of an edit-encoding extension on the nucleic acid component molecule directly into the target site. These steps may result in a branched intermediate with two redundant single-stranded DNA flaps: a 5′ flap that contains the unedited DNA sequence, and a 3′ flap that contains the edited sequence copied from the nucleic acid component. The 5′ flaps may be removed by a structure-specific endonuclease, e.g., FEN122, which excises 5′ flaps generated during lagging-strand DNA synthesis and long-patch base excision repair. The non-edited DNA strand may be nicked to induce bias DNA repair to preferentially replace the non-edited strand. Examples of prime editing systems and methods include those described in Anzalone A V et al., Search- and-replace genome editing without double-strand breaks or donor DNA, Nature. 2019 Oct. 21. doi: 10.1038/s41586-019-1711-4, which is incorporated by reference herein in its entirety.

[0369] The Fanzor (e.g., the nickase form) may be used to prime-edit a single nucleotide on a target DNA. Alternatively or additionally, the Fanzor polypeptide may be used to prime-edit at least 2, at least 3, at least 4, at least 5, at least 6, at least 7, at least 8, at least 10, at least 11, at least 12, at least 13, at least 14, at least 15, at least 16, at least 17, at least 18, at least 19, at least 20, at least 21, at least 22, at least 23, at least 24, at least 25, at least 26, at least 27, at least 28, at least 29, at least 30, at least 40, at least 50, at least 60, at least 70, at least 80, at least 90, at least 100, at least 200, at least 300, at least 400, at least 500, at least 600, at least 700, at least 800, at least 900, or at least 1000 nucleotides on a target DNA.

[0370] In yet another embodiment, PRIME editing is used first to create a longer 3′ region (e.g., 20 nucleotides). Examples of prime editing systems and methods include those described in Anzalone A V et al., Search- and-replace genome editing without double-strand breaks or donor DNA, Nature. 2019 Oct. 21. doi: 10.1038/s41586-019-1711-4, which is incorporated by reference herein in its entirety. In such cases, the system comprises a Fanzor protein with nickase activity, a reverse transcriptase domain, and a DNA polymerase, and a ωRNA molecule comprising a binding sequence capable of hybridizing to the target polynucleotide and an editing sequence. The generated region may be further extended on a DNA template as described herein. The latter may allow generation of a target-independent sequence, compatible with a generic donor sequence.

[0371] The Fanzor protein is capable of generating a first cleavage in the target sequence and a second cleavage outside the target sequence on the target polynucleotide. In some variations, a second Fanzor-mediated cleavage in vicinity to the target site may be made, which may enable more efficient invasion of the extended DNA.

[0372] In some examples, the compositions and systems of the Fanzor protein herein comprise: a reverse transcriptase (RT) polypeptide connected to or otherwise capable of forming a complex with the Fanzor protein; a first ωRNA molecule capable of forming a first Fanzor-reverse transcriptase complex with the Fanzor protein and comprising: a ωRNA sequence capable of directing site-specific binding of the first Fanzor-reverse transcriptase complex to a first target sequence of a target polynucleotide; a first binding site region capable of binding to a cleaved or nicked strand of the target polynucleotide; and a RT template sequence encoding a first extended sequence; a second ωRNA molecule capable of forming a second Fanzor-reverse transcriptase complex with the Fanzor protein and comprising: a ωRNA sequence capable of directing site specific binding of the second Fanzor-reverse transcriptase complex to a second target sequence of the target polynucleotide; a second binding site region capable of binding to a cleaved or nicked strand of the target polynucleotide; and a RT template sequence encoding a second extended sequence. Such paired systems allow for “double-flap” editing which allow for the excision or insertion of large DNA sequences.

[0373] In some cases, the compositions and systems may further comprise: a donor template; a third ωRNA sequence capable of forming a Fanzor-reverse transcriptase complex-ωRNA with the Fanzor protein and comprising: a ωRNA sequence capable of directing site-specific binding to a target sequence on the donor template; a third binding region capable of binding to a cleaved or nicked strand of the donor template; and a RT template encoding a third extended region complementary to the first extended region generated on the target polynucleotide; and a fourth ωRNA sequence capable of forming a Fanzor-reverse transcriptase complex with the Fanzor protein and comprising: a ωRNA sequence capable of directing site-specific binding to a second target sequence on the donor template; a fourth binding region capable of binding to a cleaved or nicked strand of the donor template; and a RT template encoding a fourth extended region complementary to the second extended region generated on the target polynucleotide.

[0374] In some cases, the compositions and systems may further comprise a site-specific recombinase, and wherein the first and second extended regions are complementary to each other and introduce a serine integrase recombination site; and a donor molecule comprising a donor sequence for insertion into the target polypeptide and the complementary recombination site to the serine integrase recombination site.

[0375] In some examples, the compositions and systems may further comprise a recombinase. The recombinase is connected to or otherwise capable of forming a complex with the Fanzor protein. In certain embodiments, the complex is capable of inserting a recombination site in the DNA loci of interest by extension of RT templates that encode for the recombination site on the 3′ extension of the ωRNA sequences by the reverse transcriptase. In certain embodiments, a donor template comprising a compatible recombination site is provided that can recombine unidirectionally with the inserted recombination site when a recombinase specific for the recombination site is also provided. In certain embodiments, the donor template is a plasmid comprising the complementary recombination site and any sequence for insertion at the DNA loci of interest. In certain embodiments, the recombinase is connected to or capable of forming a complex with the Fanzor enzyme, such that all of the enzymatic proteins are brought into contact at the loci of interest. In certain embodiments, the recombinase is codon optimized for eukaryotic cells (described further herein). In certain embodiments, the recombinase includes a NLS (described further herein). In certain embodiments, the recombinase is provided as a separate protein. The separate recombinase may form a dimer and bind to the donor template recombination site. The recombinase may be targeted to the loci of interest as a result of the insertion of the compatible recombination site that is also recognized by the recombinase. Thus, the recombinase may recognize the recombination site inserted at the DNA loci of interest and the recombination site on the donor and be targeted to the DNA loci of interest without any additional modifications to the recombinase.

[0376] In certain embodiments, a second Fanzor complex connected to a recombinase is targeted to the DNA loci of interest. In certain embodiments, the second Fanzor complex comprises a dead Fanzor protein (dFanzor, described further elsewhere herein), such that the recombinase is targeted to the DNA loci of interest, but the target sequence is not further cleaved. In certain embodiments, the dFanzor targets a sequence generated only after the insertion of the recombination site. In certain embodiments, the recombinase recognizes and binds to the donor template recombination site and the inserted recombination site. In certain embodiments, the recombinase forms a dimer with a recombinase provided as a separate protein.

[0377] As used herein, the term “Recombinase” refers to an enzyme that catalyzes recombination between two or more recombination sites (e.g., an acceptor and donor site). Recombinases useful in the present invention catalyze recombination at specific recombination sites which are specific polynucleotide sequences that are recognized by a particular recombinase. “Uni-directional recombinases” or “integrases” refer to recombinase enzymes whose recognition sites are destroyed after the recombination has taken place. The term “integrase” refers to a type of recombinase. In other words, the sequence recognized by the recombinase is changed into one that is not recognized by the recombinase upon recombination. As a result, once a sequence is subjected to recombination by the uni-directional recombinase, the continued presence of the recombinase cannot reverse the previous recombination event.

[0378] “Recombination sites” are specific polynucleotide sequences that are recognized by the recombinase enzymes described herein. Typically, two different sites are involved (in regards to recombination termed “complementary sites”), one present in the target nucleic acid (e.g., a chromosome or episome of a eukaryote) and another on the nucleic acid that is to be integrated at the target recombination site. The terms “attB” and “attP,” which refer to attachment (or recombination) sites originally from a bacterial target (attachment site of bacteria) and a phage donor (attachment site of phage), respectively, are used herein although recombination sites for particular enzymes may have different names. The two attachment sites can share as little sequence identity as a few base pairs. The recombination sites typically include left and right arms separated by a core or spacer region. Thus, an attB recombination site consists of BOB′, where B and B′ are the left and right arms, respectively, and O is the core region. Similarly, attP is POP′, where P and P′ are the arms and O is again the core region. Upon recombination between the attB and attP sites, and concomitant integration of a nucleic acid at the target, the recombination sites that flank the integrated DNA are referred to as “attL” and “aatR.” The attL and attR sites, using the terminology above, thus consist of BOP′ and POB′, respectively. In some representations herein, the “O” is omitted and attB and attP, for example, are designated as BB′ and PP′, respectively.

### Fanzor-Associated Transposase Systems

[0379] The systems and compositions herein may comprise a Fanzor polypeptide, one or more nucleic acid components, and one or more components of a transposase. In one example embodiment, the Fanzor polypeptide mediates RNA-guided TnpA-catalyzed transposition. In one-example embodiment, Fanzor polypeptide mediates RNA-guided Tn7-catalyzed transposition.

[0380] In an example embodiment, the transposases may comprise TnpA. The transposase may be a Y1 transposase of the IS200/IS605 family, encoded by the insertion sequence (IS) IS608 from Helicobacter pylori, e.g., TnpAIS608, from Deinococcus radiodurans, e.g., ISDra2, from Halanaerobium hydrogeniformans or from Sulfolobus solfataricus. Examples of the transposases include those described in Barabas, O., Ronning, D. R., Guynet, C., Hickman, A. B., TonHoang, B., Chandler, M. and Dyda, F. (2008) Mechanism of IS200/IS605 family DNA transposases: activation and transposon-directed target site selection. Cell, 132, 208-220; in Sadler et al., Genes 2020, 11, 484, doi: 10.3390/genes11050484, and in He et al., (2013) NAR, 41:5, 3302-3313. In certain example embodiments, the transposase is a single stranded DNA transposase. In certain example embodiments, the single stranded DNA transposase is TnpA or a functional fragment thereof.

[0381] In some examples, the one or more transposases or transposase sub-units are, or are derived from, Tn7 transposases. In a particular embodiment, the Tn7 or TN7-like transposase may be a Tn5053 transposase. For example, the Tn5053 transposases include those described in Minakhina S et al., Tn5053 family transposons are res site hunters sensing plasmidal res sites occupied by cognate resolvases. Mol Microbiol. 1999 September; 33 (5): 1059-68; and FIG. 4 and related texts in Partridge S R et al., Mobile Genetic Elements Associated with Antimicrobial Resistance, Clin Microbiol Rev. 2018 Aug. 1;31 (4), both of which are incorporated by reference herein in their entirety. In some cases, the one or more Tn5053 transposases may comprise one or more of TniA, TniB, and TniQ. TniA is also known as TnsB. TniB is also known as TnsC. TniQ is also known as TnsD. Accordingly, In one embodiment these Tn5053 transposase subunits may be referred to as TnsB, TnsC, and TnsD, respectively. In certain cases, the one or more transposases may comprise TnsB, TnsC, and TnsD.

[0382] In one embodiment, the transposases may be one or more Vibrio cholerae Tn6677 transposases. In one example, the transposon may include a terminal operon comprising the tnsA, tnsB, and tnsC genes. The transposon may further comprise a tniQ gene. In one embodiment, the TnsE may be absent in the transposon.

[0383] In certain examples, the transposase includes one or more of Mu-transposase, TniQ, TniB, or functional domains thereof. In certain examples, the transposase includes one or more of TniQ, a TniB, a TnpB, or functional domains thereof. In certain examples, the transposase include one or more of a rve integrase, TniQ, TniB, or functional domains thereof.

[0384] In one embodiment the system, more particularly the transposase does not include an rve integrase. In one embodiment the system, more particularly the transposase does not include one or more of Mu-transposase, TniQ, a TniB, a TnpB, a IstB domain or functional domains thereof.

[0385] In certain examples, the transposase includes one or more of Mu-transposase, TniQ, TniB, or functional domains thereof. In certain examples, the transposase includes one or more of TniQ, a TniB, a TnpB, or functional domains thereof. In certain examples, the transposase includes one or more of a rve integrase, TniQ, TniB, TnpB domain, or functional domains thereof.

[0386] A right end sequence element or a left end sequence element are made in reference to an example Tn7 transposon. The general structure of the left end (LE) and right end (RE) sequence elements of canonical Tn7 is established. Tn7 ends comprise a series of 22-bp TnsB-binding sites. Flanking the most distal TnsB-binding sites is an 8-bp terminal sequence ending with 5′-TGT-3′/3′-ACA-5′. The right end of Tn7 contains four overlapping TnsB-binding sites in the ˜90-bp right end element. The left end contains three TnsB-binding sites dispersed in the ˜150-bp left end of the element. The number and distribution of TnsB-binding sites can vary among Tn7-like elements. End sequences of Tn7-related elements can be determined by identifying the directly repeated 5-bp target site duplication, the terminal 8-bp sequence, and 22-bp TnsB-binding sites (Peters J E et al., 2017). Example Tn7 elements, including right end sequence element and left end sequence element include those described in Parks AR, Plasmid, 2009 January; 61 (1): 1-14.

### Fanzor Recombinase/Integrase Systems

[0387] The systems and compositions herein may comprise a Fanzor system or component(s) thereof, and one or more components of a recombinase or integrase. In an aspect, the Fanzor is naturally catalytically inactive and utilized with one or more nucleic acid components to provide site-specific targeting, and the one or more components of the recombinase to introduce a modification. In an aspect, the Fanzor polypeptide may be catalytically inactivated via mutation of one or more residues of a catalytic domain (e.g., RuvC) or via truncation, and utilized with one or more nucleic acid components to provide site-specific targeting, and the one or more components of the recombinase introduce a modification. In one embodiment, a naturally inactive Fanzor is provided with a recombinase, e.g., an integrase, and optionally a reverse transcriptase. The systems and compositions herein may comprise a Fanzor polypeptide, one or more nucleic acid components, and one or more components of an integrase. In an aspect, the Fanzor polypeptide is a nickase, and utilized with one or more nucleic acid components to provide site-specific targeting, with the one or more components of the integrase introduce a modification. The systems and compositions may be used to insert a donor polynucleotide to a target polynucleotide. The systems and compositions may further comprise a donor polynucleotide.

[0388] In preferred embodiments, the recombinase mediates unidirectional site-specific recombination. In one embodiment, the recombinase is a serine recombinase (SR) also referred to as a serine integrase, encoded, for example, by IS607 family, Tn4451, and bacteriophage phiC31. See, generally, Smith MC, Thorpe HM: Diversity in the serine recombinases. Mol Microbiol. 2002, 44:299-307. 10.1046/j. 1365-2958.2002.02891.x; Li et al., (2018) J. Mol. Biol. 430:21, 4401-4418.

[0389] In an embodiment, the recombinase is a tyrosine recombinase (YR) encoded by IS91, Helitron, IS200/IS605, Crypton or DIRS-retrotransposon families. See, generally, Goodwin T J, Butler M I, Poulter T: Cryptons: a group of tyrosine-recombinase-encoding DNA fungi. transposons from pathogenic Microbiology. 2003, 149:3099-3109. Doi: 10.1099/mic.0.26529-0; Cappello J, Handelsman K, Lodish H F: Sequence of Dictyostelium DIRS-1: an apparent retrotransposon with inverted terminal repeats and an internal circle junction sequence. Cell. 1985, 43:105-115. 10.1016/0092-8674 (85) 90016-9;.

[0390] In an aspect, the recombinase provides site-specific integration of a template that can be provided with the composition, e.g., a donor oligonucleotide. Without being bound by theory, the recombinase allows for integration independent of payload size and can coordinate strand exchange and re-ligation across multiple cell types, allowing integration of long stretches of polynucleotides. In an exemplary embodiment, the serine recombinase is PhiC31 and the target is DNA. In an aspect, the phiC31 allows for integration of a target site comprising an attP or pseudoattP recognition site. See, e.g., systembio.com/wp-content/uploads/phiC31_productsheet-1.pdf. In an embodiment utilizing phiC231, a donor oligonucleotide would be provided with an attB at sequence that facilitates attachment at the attP site of the target genome. Similar approaches of designing donor oligonucleotides with sequences complementary to attachment sites for a recombinase can be designed for use with the present invention. See, e.g., Li et al., (2018) J. Mol. Biol. 430:21, 4401-4418.

[0391] In preferred embodiments, the integrase mediates gene integration at diverse loci by directing insertion with an Fanzor nickase fused to both a reverse transcriptase and an integrase. In one embodiment, the integrase is a serine integrase, encoded, for example, BxbINT. See, generally, Ioannidi et al., “Drag- and-drop genome insertion without DNA cleavage with CRISPR-directed integrases”; doi: 10.1101/2021.11.01.466786m incorporated herein by reference in its entirety. In Ioannidi, Gootenberg, Abudayyeh, and colleagues show integration using a CRISPR-Cas9 nickase fused to a reverse transcriptase and serine integrase termed Programmable Addition via Site-specific Targeting Elements (PASTE) with delivery via a single dose of plasmids with functionality in non-dividing and primary cells, utilizing a guide RNA comprising an AttB landing site, termed attachment site-containing guide RNA were used to insert sequences, including diverse cargo sequences that can be inserted across different loci, varying in size up to about 36 kb. Additional uses of the PASTE system included gene tagging, gene replacement, gene delivery, and protein production and secretion, approaches that are contemplated for use with the Fanzor nickase and integrase approach. In an aspect, the omega RNA may comprise an AttB landing site. In an aspect, the recombinase provides site-specific integration of a template that can be provided with the composition, e.g., a donor oligonucleotide.

[0392] Additional large serine integrases can be used with the Fanzor polypeptide, for example, as identified and described in Durrant et al., Large-scale discovery of recombinases for integrating DNA into the human genome, doi: 10.1101/2021.11.05.467528, incorporated herein by reference. Other integrases include BceINT, SscINT, SacINT. See, e.g., Ioannidi, 2021 at and FIG. 6d, and FIG. 10a.

[0393] Without being bound by theory, the recombinase allows for integration independent of payload size and can coordinate strand exchange and re-ligation across multiple cell types, allowing integration of long stretches of polynucleotides. In an exemplary embodiment, the integrase is BxbINT and the target is DNA. In an aspect, the BxbINT allows for integration of a target site comprising an attP or pseudoattP recognition site. In an embodiment utilizing BxbINT, a donor oligonucleotide would be provided with an attB at sequence that facilitates attachment at the attP site of the target genome. Similar approaches of designing donor oligonucleotides with sequences complementary to attachment sites for an integrase can be designed for use with the present invention, for example a circular double-strand DNA template containing the AttP attachment site, or delivery of large cargo via an adenovirus or other viral vector, as described elsewhere herein. See, e.g., Ioannidi et al., 2021 at FIGS. 1a, 1b and 5b.

### Fanzor Topoisomerase Systems

[0394] The one or more functional domains may be one or more topoisomerase domains. Topoisomerases are a class of enzymes that modify the topological state of DNA via the breakage and rejoining of nucleic acid strands. In some cases, a topoisomerase may be a DNA topoisomerase, which is an enzyme that controls and alters the topologic states of DNA during transcription and catalyzes the transient breaking and rejoining of a single strand of DNA which allows the strands to pass through one another, thus altering the topology of DNA.

[0395] In one embodiment, the topoisomerase domain is capable of ligating the donor polynucleotide with the target polynucleotide. The ligation may be achieved by sticky end or blunt end ligation. In an example, a donor polynucleotide may comprise a overhang comprising a sequence complementary to a region of the target polynucleotide. Examples of ligating the donor polynucleotide with the target polynucleotide include those of TOPO cloning, e.g., those described in “The Technology Behind TOPO Cloning,” at www.thermofisher.com/us/en/home/life-science/cloning/topo/topo-resources/the-technology-behind-topo-cloning.html.

[0396] In one embodiment, the topoisomerase domain may be associated with a donor polynucleotide. For example, the topoisomerase domain is covalently linked to a donor polynucleotide. In one embodiment, a topoisomerase domain may be provided together with, e.g., associated (e.g., fused) with a Fanzor polypeptide or a variant thereof.

[0397] Alternatively or additionally, the topoisomerase domain may be on a molecule different from Fanzor polypeptide. In some cases, the topoisomerase domain may be associated with a donor polynucleotide. For example, the topoisomerase domain may be pre-loaded covalently with a donor DNA molecule. Such deign may allow for efficient ligation of only a specific cargo. The topoisomerase domain may ligate the donor polynucleotide (e.g., a DNA molecule) to a target site on a target polynucleotide (e.g., a free double-stranded DNA end). In one embodiment, the donor polynucleotide may have an overhang that comprises a sequence complementary to a region of the target polynucleotide. For example, the overhang may invade into the target polynucleotide at a cut site generated by the Fanzor polypeptide.

[0398] Examples of topoisomerases include type I, including type IA and type IB topoisomerases, which cleave a single strand of a double-stranded nucleic acid molecule, and type II topoisomerases (e.g., gyrases), which cleave both strands of a double-stranded nucleic acid molecule.

[0399] Type IA and IB topoisomerases cleave one strand of a double-stranded nucleic acid molecule. In some examples, the cleavage of a double-stranded nucleic acid molecule by type IA topoisomerases generates a 5′ phosphate and a 3′ hydroxyl at the cleavage site, with the type IA topoisomerase covalently binding to the 5′ terminus of a cleaved strand. Cleavage of a double-stranded nucleic acid molecule by type IB topoisomerases may generate a 3′ phosphate and a 5′ hydroxyl at the cleavage site, with the type IB topoisomerase covalently binding to the 3′ terminus of a cleaved strand.

[0400] Examples of Type IA topoisomerases include E. coli topoisomerase I, E. coli topoisomerase III, eukaryotic topoisomerase II, archeal reverse gyrase, yeast topoisomerase III, Drosophila topoisomerase III, human topoisomerase III, Streptococcus pneumoniae topoisomerase III, and the like, including other type IA topoisomerases. A DNA-protein adduct is formed with the enzyme covalently binding to the 5′-thymidine residue, with cleavage occurring between the two thymidine residues.

[0401] Examples of Type IB topoisomerases include the nuclear type I topoisomerases present in all eukaryotic cells and those encoded by Vaccinia and other cellular poxviruses. The eukaryotic type IB topoisomerases are exemplified by those expressed in yeast, Drosophila and mammalian cells, including human cells. Viral type IB topoisomerases are exemplified by those produced by the vertebrate poxviruses (Vaccinia, Shope fibroma virus, ORF virus, fowlpox virus, and molluscum contagiosum virus), and the insect poxvirus (Amsacta moorei entomopoxvirus).

[0402] Examples of Type II topoisomerases include, bacterial gyrase, bacterial DNA topoisomerase IV, eukaryotic DNA topoisomerase II, and T-even phage encoded DNA topoisomerases. Type II topoisomerases may have both cleaving and ligating activities. Substrate double-stranded nucleic acid molecules of type II topoisomerase can be prepared such that the type II topoisomerase can form a covalent linkage to one strand at a cleavage site. For example, calf thymus type II topoisomerase can cleave a substrate ds nucleic acid molecule containing a 5′ recessed topoisomerase recognition site positioned three nucleotides from the 5′ end, resulting in dissociation of the three nucleic acid molecule 5′ to the cleavage site and covalent binding of the topoisomerase to the 5′ terminus of the ds nucleic acid molecule. Furthermore, upon contacting such a type II topoisomerase-charged ds nucleic acid molecule with a second nucleic acid molecule containing a 3′ hydroxyl group, the type II topoisomerase can ligate the sequences together, and then is released from the recombinant nucleic acid molecule.

[0403] Structural analysis of topoisomerases indicates that the members of each particular topoisomerase families, including type IA, type IB and type II topoisomerases, share common structural features with other members of the family. In addition, sequence analysis of various type IB topoisomerases indicates that the structures are highly conserved, particularly in the catalytic domain. For example, a domain comprising amino acids 81 to 314 of the 314 amino acid Vaccinia topoisomerase shares substantial homology with other type IB topoisomerases, and the isolated domain has essentially the same activity as the full length topoisomerase, although the isolated domain has a slower turnover rate and lower binding affinity to the recognition site. In addition, a mutant Vaccinia topoisomerase, which is mutated in the amino terminal domain (e.g., at amino acid residues 70 and 72) may display identical properties as the full length topoisomerase. Mutation analysis of Vaccinia type IB topoisomerase reveals a large number of amino acid residues that can be mutated without affecting the activity of the topoisomerase and has identified several amino acids that are required for activity. In view of the high homology shared among the Vaccinia topoisomerase catalytic domain and the other type IB topoisomerases, and the detailed mutation analysis of Vaccinia topoisomerase, it will be recognized that isolated catalytic domains of the type IB topoisomerases and type IB topoisomerases having various amino acid mutations can be used in the methods of the invention and thus are considered to be topoisomerases for purposes of the present invention.

[0404] The various topoisomerases exhibit a range of sequence specificity. For example, type II topoisomerases can bind to a variety of sequences, but cleave at a highly specific recognition site. The type IB topoisomerases may include site specific topoisomerases, which bind to and cleave a specific nucleotide sequence (“topoisomerase recognition site”). Upon cleavage of a double-stranded nucleic acid molecule by a topoisomerase, for example, a type IB topoisomerase, the energy of the phosphodiester bond is conserved via the formation of a phosphotyrosyl linkage between a specific tyrosine residue in the topoisomerase and the 3′ nucleotide of the topoisomerase recognition site. Where the topoisomerase cleavage site is near the 3′ terminus of the nucleic acid molecule, the downstream sequence (3′ to the cleavage site) can dissociate, leaving a nucleic acid molecule having the topoisomerase covalently bound to the newly generated 3′ end.

[0405] The covalently bound topoisomerase also can catalyze the reverse reaction, for example, covalent linkage of the 3′ nucleotide of the recognition sequence, to which a type IB topoisomerase is linked through the phosphotyrosyl bond, and a nucleic acid molecule containing a free 5′ hydroxyl group. As such, methods have been developed for using a type IB topoisomerase to produce recombinant nucleic acid molecules. Nucleic acid molecules such as those comprising a cDNA library, or restriction fragments, or sheared genomic DNA sequences that are to be cloned into such a vector are treated, for example, with a phosphatase to produce 5′ hydroxyl termini, then are added to the linearized vector under conditions that allow the topoisomerase to ligate the nucleic acid molecules at the 5′ terminus containing the hydroxyl group and the 3′ terminus containing the covalently bound topoisomerase.

[0406] Examples of vaccinia viruses encode a 314 amino acid type I topoisomerase enzyme capable of site-specific single-strand nicking of double stranded DNA, as well as 5′ hydroxyl driven re-ligation. Site-specific type I topoisomerases include, but are not limited to, viral topoisomerases such as pox virus topoisomerase. Examples of pox virus topoisomerases include Shope fibroma virus and ORF virus. Other site-specific topoisomerases are well known to those skilled in the art and can be used to practice this invention.

[0407] Examples of vaccinia topoisomerase binds to duplex DNA and cleaves the phosphodiester backbone of one strand while exhibiting a high level of sequence specificity. Cleavage may occur at a consensus pentapyrimidine element 5′-(C/T) CCTT↓, or related sequences in the scissile strand. In one embodiment the scissile bond is situated in the range of 2 to 12 bp from the 3′ end of the duplex DNA. In another embodiment cleavable complex formation by Vaccinia topoisomerase requires six duplex nucleotides upstream and two nucleotides downstream of the cleavage site.

[0408] In some examples, the topoisomerase is DNA topoisomerase I, e.g., a Vaccinia virus topoisomerase I. The topoisomerase may be pre-loaded with a donor polynucleotide. The Vaccinia virus topoisomerase may need a target comprising a 5′—OH group.

### Fanzor Directed Integrase Systems

[0409] Described in some embodiments herein are Fanzor directed integrase systems. Without being bound by theory such systems can couple Fanzor-hased targeting with efficient insertion via the integrase. In some embodiments, the Fanzor directed integrase system can facilitate integration of a polynucleotide, including large polynucleotide, cargos into a recipient polynucleotide. In some embodiments the Fanzor directed integrase system comprises a Fanzor polypeptide and an integrase. In some embodiments, such a system further comprises a reverse transcriptase. In some embodiments, the reverse transcriptase and/or integrase are coupled to (e.g., fused or linked to) the Fnazor polypeptide. In some embodiments, the reverse transcriptase and/or integrase are capable of complexing with or otherwise interacting with the Fanzor polypeptide or sequence otherwise modified by a Fanzor system. In some embodiments, the integrase is a serine integrase. The Fanzor polypeptide is capable of complexing with an omega RNA as previously described herein. In some embodiments, the Fanzor is a catalytically inactive Fanzor. In some embodiments, the Fanzor one or more catalytic activities reduced or eliminated.

[0410] Without being bound by theory, integrases typically insert sequences containing an integrase attachment site (e.g., “attP” or “attB”) into a target containing a related attachment site within a recipient polynucleotide. By using programmable genome editing to place integrase landing sites at desired locations in the genome, this system may be used guide the direct activity of the associated integrase to the specific genomic site.

[0411] In some embodiments, the system comprises an omega RNA that contains an integrase landing (attachment) site (e.g., attB) for an integrase, such as a serine integrase. When copied into the target polynucleotide, which can be in a genome, by the Fanzor-directed integrase system, the landing site can serve as a target for the integrase, which can then direct insertion of a cargo polynucleotide at the integrase site. In some embodiments, the integrase is provided in trans to the Fanzor protein. In some embodiments, the integrase is coupled to or otherwise associated with or complexed with the Fanzor protein. In some embodiments, the cargo polynucleotide inserted is a large polynucleotide.

[0412] A similar approach has been described based on CRISPR-Cas systems. See e.g., Yarnell et al., Nat. Biotechnol. 2022. https://doi.org/10.1038/s41587-022-01527-4, which can be adapted for use with the present invention.

### Fanzor Guided Excision-Transposition Systems

[0413] Embodiments disclosed herein provide an engineered or non-natural guided excision-transposition system. The engineered or non-natural guided excision-transposition system may comprise one or more components of a ωRNA-Fanzor system, e.g., an ωRNA scaffold and spacer and/or Fanzor polypeptide, and one or more components of a Class II transposon. The components of the ωRNA-Fanzor system can direct the Class II transposon component(s) to retrotransposon to a target nucleic acid sequence and direct its transposition into a recipient polynucleotide.

[0414] For example, the engineered or non-natural guided excision-transposition systems that can include (a) a first Fanzor protein; (b) a first Class II transposon polypeptide coupled to or otherwise capable of complexing with the first Fanzor protein; (c) a first guide molecule capable of forming a first ωRNA-Fanzor complex with the first Fanzor protein and directing site-specific binding to a first target sequence of a first target polynucleotide; (d) a second Fanzor protein; (e) a second Class II transposon polypeptide coupled to or otherwise capable of complexing with the second Fanzor protein; (f) a second guide molecule capable of forming a second ωRNA-Fanzor complex with the first Fanzor protein and directing site-specific binding to a second target sequence of the first target polynucleotide; and (g) a Class II transposon polynucleotide comprising the first target polynucleotide and is capable of forming a complex with the first and second Fanzor protein, the first and second guide molecules, and the first and second Class II transposon polypeptides.

[0415] In some embodiments, the engineered or non-natural guided excision-transposition system can include (h) a third guide molecule capable of complexing with the first Fanzor protein and directing site-specific binding to a first target sequence of a second target polynucleotide, wherein the third guide molecule is optionally coupled to the first Fanzor protein; (i) optionally, a first guide molecule polynucleotide that encodes the third guide molecule; (j) a fourth guide molecule capable of complexing with the second Fanzor protein and directing site-specific binding to a second target sequence of the second target polynucleotide, wherein the fourth guide molecule is optionally coupled to the second Fanzor protein; and (k) optionally, a second guide molecule polynucleotide that encodes the fourth guide molecule.

[0416] In some embodiments, the first and the second Class II transposon polypeptides are capable of excising the first target polynucleotide from the Class II transposon polynucleotide. In some embodiments, the first and the second Class II transposon polypeptides are capable of transposing the first target polynucleotide in the second target polynucleotide. In some embodiments, the first target polynucleotide does not include one or more Class II transposon long terminal repeats.

[0417] The engineered or non-natural guided excision-transposition systems described herein can be based on a Class II transposon or Class II transposon system. The engineered or non-natural guided excision-transposition system may include a first target polynucleotide, also referred to as a donor polynucleotide or transposon and a second target polynucleotide, which is also referred to herein as a recipient polynucleotide. As used herein, “transposon” (also referred to as transposable element) refers to a polynucleotide sequence that is capable of moving form location in a genome to another. There are several classes of transposons. Transposons include retrotransposons (Class I transposons) and DNA transposons (Class II transposons). In some cases, retrotransposons require the transcription of the polynucleotide that is moved (or transposed) in order to transpose the polynucleotide to a new genome or polynucleotide. DNA transposons are those that do not require reverse transcription of the polynucleotide that is moved (or transposed) in order to transpose the polynucleotide to a new genome or polynucleotide.

[0418] Any suitable transposon system can be used. Suitable transposon and systems thereof can include, but are not limited, to Sleeping Beauty transposon system (Tc1/mariner superfamily) (see e.g., Ivics et al. 1997. Cell. 91 (4): 501-510), piggyBac (piggyBac superfamily) (see e.g., Li et al. 2013 110 (25): E2279-E2287 and Yusa et al. 2011. PNAS. 108 (4): 1531-1536), Tol2 (superfamily hAT), Frog Prince (Tc1/mariner superfamily) (see e.g., Miskey et al. 2003 Nucleic Acid Res. 31 (23): 6873-6881) and variants thereof.

[0419] In some embodiments, the first and/or second Class II transposon polypeptide is a DD [E/D] transposon or transposon polypeptide. In some embodiments, the first and/or the second Class II transposon polynucleotide is a Tcl/mariner, PiggyBac, Frog Prince, Tn3, Tn5, hAT, CACTA, P, Mutator, PIF/Harbinger, Transib, or a Merlin/IS1016 transposon polynucleotide. In some embodiments, the first and/or second Class II transposon polypeptide is a Tcl/mariner, PiggyBac, Frog Prince, Tn3, Tn5, hAT, CACTA, P, Mutator, PIF/Harbinger, Transib, or a Merlin/IS1016 transposon polypeptide.

[0420] Suitable Class II transposon systems and components that can be utilized can also be and are not limited to those described in e.g. and without limitation, Han et al., 2013. BMC Genomics. 14:71, doi: 10.1186/1471-2164-14-71, Lopez and Garcia-Perez. 2010. Curr. Genomics. 11 (2): 115-128; Wessler. 2006. PNAS. 103 (47): 176000-17601; Gao et al., 2017. Marine Genomics. 34:67-77; Bradic et al. 2014. Mobile DNA. 5 (12) doi: 10.1186/1759-8753-5-12; Li et al., 2013. PNAS. 110 (25) E2279-E2287; Kebriaei et al. 2017. Trends in Genetics. 33 (11): 852-870); Miskey et al. 2003. Nucleic Acid res. 31 (23): 6873-6881; Nicolas et al. 2015. Microbiol Spectr. 3 (4) doi: 10.1128/microbiolspec.MDNA3-0060-2014); W. S. Reznikoff. 1993. Annu Rev. Microbiol. 47:945-963; Rubin et al. 2001. Genetics. 158 (3): 949-957; Wicker et al. 2003. Plant Physiol. 132 (1): 52-63; Majumdar and Rio. 2015. Microbiol. Spectr. 3 (2) doi: 10.1128/microbiolspec.MDNA3-0004-2014; D. Lisch. 2002. Trends in Plant Sci. 7 (11): 498-504; Sinzelle et al. 2007. PNAS. 105 (12): 4715-4720; Han et al. 2014; Genome Biol. Evol. 6 (7): 1748-1757; Grzebelus et al. 2006; Mol. Genet. Genomics. 275 (5): 450-459; Zhang et al. 2004. Genetics. 166 (2): 971-986; Chen and Li. 2008. Gene. 408 (1-2): 51-63; and C. Feschotte. 2004. Mol. Biol. Evol. 21 (9): 1769-1780.

### Fanzor Retrotransposon Systems

[0421] The systems and compositions herein may comprise a Fanzor polypeptide, one or more nucleic acid components, and one or more components of a retrotransposon, e.g., a non-LTR retrotransposon. The one or more components of a retrotransposon include a retrotransposon protein and retrotransposon RNA. The systems and compositions may be used to insert a donor polynucleotide to a target polynucleotide. The systems and compositions may further comprise a donor polynucleotide.

[0422] In some examples, the present disclosure provides an engineered, non-naturally occurring composition comprising: a Fanzor polypeptide, a non-LTR retrotransposon protein associated with or otherwise capable of forming a complex with the Fanzor polypeptide; a single nucleic acid component capable of forming a complex with the Fanzor polypeptide and directing site-specific binding to a target sequence of a target polynucleotide. The composition may further comprise a donor construct comprising a donor polynucleotide for insertion to the target polynucleotide and located between two binding elements capable of forming a complex with the non-LTR retrotransposon protein. In some cases, the Fanzor polypeptide is engineered to have nickase activity.

[0423] In some examples, the Fanzor polypeptide is fused to the N-terminus of the non-LTR retrotransposon protein. In some examples, the Fanzor polypeptide is fused to the C-terminus of the non-LTR retrotransposon protein.

[0424] The nucleic acid component molecule s may direct the fusion protein to a target sequence 5′ of the targeted insertion site, and wherein the Fanzor polypeptide generates a double-strand break at the targeted insertion site. The nucleic acid component molecule s may direct the fusion protein to a target sequence 3′ of the targeted insertion site, and wherein the Fanzor polypeptide generates a double-strand break at the targeted insertion site.

[0425] The donor polynucleotide may further comprise a polymerase processing element to facilitate 3′ end processing of the donor polynucleotide sequence. The polymerase may be a DNA polymerase, e.g., DNA polymerase I. In some examples, the polymerase may be an RNA polymerase.

[0426] In some examples, the donor polynucleotide further comprises a homology region to the target sequence on the 5′ end of the donor construct, the 3′ end of the donor construct, or both. In some examples, the homology region is from 1 to 50, from 5 to 30, from 8 to 25, e.g., 1, 2, 3, 4, 5, 6, 7, 8, 9, 10, 11, 12, 13, 14, 15, 16, 17, 18, 19, 20, 21, 22, 23, 24, 25, 26, 27, 28, 29, 30, 31, 32, 33, 34, 35, 36, 37, 38, 39, 40, 41, 42, 43, 44, 45, 46, 47, 48, 49, or 50 base pairs in length.

[0427] Native or wild-type non-LTR retrotransposons encode the protein machinery necessary for their self-mobilization. The non-LTR retrotransposon element comprises a DNA element integrated into a host genome. This DNA element may encode one or two open reading frames (ORFs). For example, the R2 element of Bombyx mori encodes a single ORF containing reverse transcriptase (RT) activity and a restriction enzyme-like (REL) domain. L1 elements encode two ORFs, ORF1 and ORF2. ORF1 contains a leucine zipper domain involved in protein-protein interactions and a C-terminal nucleic acid binding domain. ORF2 has a N-terminal apurinic/apyrimidinic endonuclease (APE), a central RT domain, and a C-terminal cysteine histidine rich domain. An example replicative cycle of a non-LTR retrotransposon may comprise transcription of the full-length retrotransposon element to generate an mRNA active element (retrotransposon RNA). The active element mRNA is translated to generate the encoded retrotransposon proteins or polypeptides. A ribonucleoprotein complex comprising the active element and retrotransposon protein or polypeptide is formed and this RNP facilitates integration of the active element into the genome. The RNA-transposase complex nicks the genome. The 3′ end of the nicked DNA serves as a primer to allow the reverse transcription of the transposon RNA into cDNA. Fourth, the transposase proteins integrate the cDNA into the genome.

[0428] Elements of these systems may be engineered to work within the context of the invention. For example, a non-LTR retrotransposon polypeptide may be fused to a site-specific nuclease. The binding elements that allow a non-LTR retrotransposon polypeptide to bind to the native retrotransposon DNA element, may be engineered into a donor construct to facilitate entry of a donor polynucleotide sequence into a target polypeptide.

[0429] In the present invention the protein component of the non-LTR retrotransposon may be connected to or otherwise engineered to form a complex with a site-specific nuclease, e.g., Fanzor polypeptide. The retrotransposon RNA may be engineered to encode a donor polynucleotide sequence. Thus, in certain example embodiments, the Fanzor polypeptide, via formation of a Fanzor polypeptide complex with a nucleic acid component molecule sequence, directs the retrotransposon complex (e.g., the retrotransposon polypeptide(s) and retrotransposon RNA to a target sequence in a target polynucleotide, where the retrotransposon RNP complex facilitates integration of the donor polynucleotide sequence into the target polynucleotide. Accordingly, the one or more non-LTR retrotransposon components may comprise retrotransposon polypeptides, or function domains thereof, that facilitate binding of the retrotransposon RNA, reverse transcription of the retrotransposon RNA into cDNA, and/or integration of the donor polynucleotide into the target polynucleotide, as well as retrotransposon RNA elements modified to encode the donor polynucleotide sequence.

[0430] Examples non-LTR retrotransposons include CRE, R2, R4, L1, RTE, Tad, R1, LOA, I, Jockey, CR1. In one example, the non-LTR retrotransposon is R2. In another example, the non-LTR retrotransposon is L1. Examples of non-LTR retrotransposons may include those described in Christensen S M et al., RNA from the 5′ end of the R2 retrotransposon controls R2 protein binding to and cleavage of its DNA target site, Proc Natl Acad Sci USA. 2006 Nov. 21;103 (47): 17602-7; Eickbush T H et al, Integration, Regulation, and Long-Term Stability of R2 Retrotransposons, Microbiol Spectr. 2015 April; 3 (2): MDNA3-0011-2014. doi: 10.1128/microbiolspec.MDNA3-0011-2014; Han J S, Non-long terminal repeat (non-LTR) retrotransposons: mechanisms, recent developments, and unanswered questions, Mob DNA. 2010 May 12;1 (1): 15. doi: 10.1186/1759-8753-1-15; Malik H S et al., The age and evolution of non-LTR retrotransposable elements, Mol Biol Evol. 1999 June; 16 (6): 793-805, which are incorporated by reference herein in their entireties.

[0431] Examples of the non-LTR retrotransposon polypeptides also include R2 from Clonorchis sinensis, or Zonotrichia albicollis.

[0432] A non-LTR retrotransposon may comprise multiple retrotransposon polypeptides or polynucleotides encoding same. In one embodiment, the retrotransposon polypeptides may form a complex. For example, a non-LTR retrotransposon is a dimer, e.g., comprising two retrotransposon polypeptides forming a dimer. The dimer subunits may be connected or form a tandem fusion. A Fanzor polypeptide may be associate with (e.g., connected to) one or more subunits of such complex. In some examples, the non-LTR retrotransposon is a dimer of two retrotransposon polypeptides; one of the retrotransposon polypeptides comprises nuclease or nickase activity and is connected with a Fanzor polypeptide.

[0433] The retrotransposon polypeptides may comprise one or more modifications to, for example, enhance specificity or efficiency of donor polynucleotide recognition, target-primed template recognition (TPTR). The retrotransposon polypeptides may also comprise one or more truncations or excisions to remove domains or regions of wild-type protein to arrive at a minimal polypeptide that retain donor polynucleotide recognition and TPTR. In some example embodiments, the native endonuclease activity may be mutated to eliminate endonuclease activity.

[0434] In certain example embodiments, the modifications or truncations of the non-LTR retrotransposon peptide may be in a zinc finger region, a Myb region, a basic region, a reverse transcriptase domain, a cysteine-histidine rich motif, or an endonuclease domain.

[0435] A non-LTR retrotransposon may comprise polynucleotide encoding one or more retrotransposon RNA molecules. The polynucleotide may comprise one or more regulatory elements. The regulatory elements may be promoters. The regulatory elements and promoters on the polynucleotides include those described throughout this application. For example, the polynucleotide may comprise a pol2 promoter, a pol3 promoter, or a T7 promoter.

[0436] In some cases, the polynucleotide encodes a retrotransposon RNA with at least a portion of its sequence complementary to a target sequence. For example, the 3′ end of the retrotransposon RNA may be complementary to a target sequence. The RNA may be complementary to a portion of a nicked target sequence. In one embodiment, a retrotransposon RNA may comprise one or more donor polynucleotides. In certain cases, a retrotransposon RNA may encode one or more donor polynucleotides.

[0437] A retrotransposon RNA may be capable of binding to a retrotransposon polypeptide. Such retrotransposon RNA may comprise one or more elements for binding to the retrotransposon polypeptide. Examples of binding elements include hairpin structures, pseudoknots (e.g., a nucleic acid secondary structure containing at least two stem-loop structures in which half of one stem is intercalated between the two halves of another stem), stem loops, and bulges (e.g., unpaired stretches of nucleotides located within one strand of a nucleic acid duplex). In certain examples, the retrotransposon RNA comprises one or more hairpin structures. In some examples, the retrotransposon RNA comprises one or more pseudoknots. In certain examples, a retrotransposon RNA comprises a sequence encoding a donor polynucleotide and one or more binding elements for forming a complex with the retrotransposon polypeptide. The binding elements may be located on the 5′ end or the 3′ end.

[0438] In one embodiment, a retrotransposon RNA comprises a region capable of hybridizing with an overhang of a target polynucleotide at the target site. The overhang may be a stretch of single-stranded DNA. The overhang may function as a primer for reverse transcription of at least a portion of the retrotransposon RNA to a cDNA. In some cases, a region of the cDNA may be capable of hybridizing a second overhang of the target polynucleotide. The second overhang may function as a primer for the synthesis of a second strand to generate a double-stranded cDNA. The cDNA may comprise a donor polynucleotide sequence. The two overhangs may be from different strands of the target polynucleotide.

### Reverse Transcriptase Domain

[0439] The one or more functional domains may be one or more reverse transcriptase domains. In some embodiments, the systems comprise an engineered system for modifying a target polynucleotide comprising: a Fanzor protein or a variant thereof (e.g., dFanzor); a reverse transcriptase (RT) domain; a RNA template comprising or encoding a donor polynucleotide to be inserted to a target sequence of the target polynucleotide; and an ωRNA molecule (i.e., a naturally single guide RNA molecule comprising a scaffold for reprogamming).

[0440] The reverse transcriptase may generate single-strand DNA based on the RNA template. The single-strand DNA may be generated by a non-retron, retron, or diversity generating retroelement (DGR). In some examples, the single-strand DNA may be generated from a self-priming RNA template. A self-priming RNA template may be used to generate a DNA without the need of a separate primer.

[0441] A reverse transcriptase domain may be a reverse transcriptase or a fragment thereof. A wide variety of reverse transcriptases (RT) may be used in alternative embodiments of the present invention, including prokaryotic and eukaryotic RT, provided that the RT functions within the host to generate a donor polynucleotide sequence from the RNA template. If desired, the nucleotide sequence of a native RT may be modified, for example using known codon optimization techniques, so that expression within the desired host is optimized. A reverse transcriptase (RT) is an enzyme used to generate complementary DNA (cDNA) from an RNA template, a process termed reverse transcription. Reverse transcriptases are used by retroviruses to replicate their genomes, by retrotransposon mobile genetic elements to proliferate within the host genome, by eukaryotic cells to extend the telomeres at the ends of their linear chromosomes, and by some non-retroviruses such as the hepatitis B virus, a member of the Hepadnaviridae, which are dsDNA-RT viruses. Retroviral RT has three sequential biochemical activities: RNA-dependent DNA polymerase activity, ribonuclease H, and DNA-dependent DNA polymerase activity. Collectively, these activities enable the enzyme to convert single-stranded RNA into double-stranded cDNA. In certain embodiments, the RT domain of a reverse transcriptase is used in the present invention. The domain may include only the RNA-dependent DNA polymerase activity. In some examples, the RT domain is non-mutagenic, i.e., does not cause mutation in the donor polynucleotide (e.g., during the reverse transcriptase process). In some examples, the RT domain may be non-retron RT, e.g., a viral RT or a human endogenous RT. In some examples, the RT domain may be retron RT or DGRs RT. In some examples, the RT may be less mutagenic than a counterpart wildtype RT. In some embodiments, the RT herein is not mutagenic.

### Retrons

[0442] In certain embodiments, a donor template for homologous recombination is generated by use of a self-priming RNA template for reverse transcription. A non-limiting example of a self-priming reverse transcription system is the retron system. By the term “retron” it is meant a genetic element which encodes components enabling the synthesis of branched RNA-linked single stranded DNA (msDNA) and a reverse transcriptase. Retrons which encode msDNA are known in the art, for example, but not limited to U.S. Pat. Nos. 6,017,737; 5,849,563; 5,780,269; 5,436,141; 5,405,775; 5,320,958; CA 2,075,515; all of which are herein incorporated by reference.

[0443] In certain embodiments, the reverse transcriptase domain is a retron RT domain. In certain embodiments, the RNA template encodes a retron RNA template that is recognized, and reverse transcribed by the retron reverse transcriptase domain. Conserved across many bacterial species, retrons are highly efficient reverse transcription systems of relatively unknown function. The retron system consists of the retron RT protein, as well as the msr and msd transcripts, which function as the primer and template sequences, respectively. All components of the retron system are expressed from a single open reading frame as a single transcript including the msr-msd and encoding the retron RT protein (Lampson, et al., 2005, Retrons, msDNA, and the bacterial genome. Cytogenet Genome Res 110:491-499). The msr element ORF of a retron provides for the RNA portion of the msDNA molecule, while the msd element ORF provides for the DNA portion of the msDNA molecule. The primary transcript from the msr-msd region is thought to serve as both a template and a primer to produce the msDNA. Synthesis of msDNA is primed from an internal rG residue of the RNA transcript using its 2′—OH group. Modification of msd, or msr may also be made to permit insertion of a RNA template encoding a donor polynucleotide within the msd without altering the functioning of or the production of msDNA. The RNA template encoding a donor polynucleotide sequence may be any length but is preferably less than about 5 kb nucleotides, or also less than about 2 kb, or also less than 500 bases, provided that an msDNA product is produced.

### Fanzor Diversity Generating Retroelement System

[0444] In certain embodiments, the one or more functional domains may be a diversity generating retroelement(s) (e.g., DGR described in US20100041033A1). In some embodiments, the DGR may insert a donor polynucleotide with its homing mechanism. For example, the DGR may be associated with a catalytically inactive Fanzor protein (e.g., a dead Fanzor), and integrate the single-strand DNA using a homing mechanism. In some examples, the DGR may be less mutagenic than a counterpart wild type DGR. In some examples, the DGR is not error-prone. In some embodiments, the DGR herein is not mutagenic. The non-mutagenic DGR may be a mutant of a wild type DGR. As used herein, the term “DGR” encompasses both diversity generating retroelement polynucleotides and proteins encoded by diversity generating retroelement polynucleotides. In some examples, DGR may be proteins encoded by diversity generating retroelement polynucleotides having reverse transcriptase activity. In some examples, DGR may be proteins encoded by diversity generating retroelement polynucleotides having reverse transcriptase activity and integrase activity. In some cases, the template or donor polynucleotide may be encoded by a diversity generating retroelement polynucleotide. In certain cases, the template may be a polynucleotide different from the diversity generating retroelement polynucleotide, e.g., provided as a separate construct or molecule.

[0445] In some embodiments, the DGR herein may also include a Group II intron (and any proteins and polynucleotides encoded), which are mobile ribozymes that self-splice from precursor RNAs to yield excised intron lariat RNAs, which then invade new genomic DNA sites by reverse splicing. Examples of Group II intron include those described in Lambowitz A M et al., Group II Introns: Mobile Ribozymes that Invade DNA, Cold Spring Harb Perspect Biol. 2011 August; 3 (8): α003616.

[0446] In some embodiments, the diversity-generating retroelements (DGRs) are genetic elements that can produce targeted, massive variations in the genomes that carry these elements. In some embodiments, the DGR systems rely on error-prone reverse transcriptases to produce mutagenized cDNA (containing A-to-N mutations) from a template region (TR), to replace a segment called a variable region (VR) that is similar to the TR region—this process is called mutagenic retrohoming (see, e.g., Sharifi and Ye, MyDGR: a server for identification and characterization of diversity-generating retroelements. Nucleic Acids Res. 2019 Jul. 2; 47 (W1): W289-W294). DGRs may include a unique family of retroelements that generate sequence diversity of DNA. They exist widely in bacteria, archaea, phage and plasmid, and benefit their hosts by introducing variations and accelerating the evolution of target proteins (see, e.g., Yan et al., Discovery and characterization of the evolution, variation and functions of diversity-generating retroelements using thousands of genomes and metagenomes. BMC Genomics. 2019; 20:595). The first DGR was discovered in a Bordetella phage, BPP-1. Bordetella causes the respiratory infection in humans and many other mammals, controlled by the BvgAS signal transduction system. The surface of Bordetella is highly variable owing to the dynamic gene expression in the infectious cycle. The invasion of BPP-1 to Bordetella relies on the phage tail fiber protein Mtd. With the process of mutagenic reverse transcription and cDNA integration, DGR may introduce multiple nucleotide substitutions to Mtd gene and generates different receptor-binding molecules, thus making BPP-1 the ability to invade Bordetellae with diverse cell surfaces.

[0447] The systems may be used to generate an ssDNA donor using a retron- or DGR RT, which is then integrated by homologous recombination upon target cleavage or nicking using a Fanzor polypeptide. In some embodiments, the systems may comprise DGRs and/or Group-II intron reverse transcriptases. The homing mechanism of DGRs or Group-II introns may be used in modifying a target polynucleotide. The DGRs or Group-II introns reverse transcriptase may be guided to a target polynucleotide by tethering to a nuclease-dead Fanzor polypeptide, TALE, or ZF protein. In another embodiment, a non-retron/DGR reverse transcriptase (e.g., a viral RT) may be used for generating cDNA off of a self-priming RNA. In some embodiments, a ssDNA may be generated by an RT, but integrate it using a dead Fanzor enzyme, creating an accessible R-loop instead of nicking/cleaving.

### Fanzor Topoisomerase Systems

[0448] The one or more functional domains may be one or more topoisomerase domains. In some embodiments, an engineered system for modifying a target polynucleotide comprising: a Fanzor protein; a topoisomerase domain; and a nucleic acid template comprising or encoding a donor polynucleotide to be inserted to a target sequence of the target polynucleotide. In some examples, two or more of: the Fanzor protein; topoisomerase domain; and nucleic acid template may form a complex. In some examples, two or more of: the Fanzor protein; topoisomerase domain, may be comprised in a fusion protein.

[0449] Topoisomerases are a class of enzymes that modify the topological state of DNA via the breakage and rejoining of nucleic acid strands. In some cases, a topoisomerase may be a DNA topoisomerase, which is an enzyme that controls and alters the topologic states of DNA during transcription and catalyzes the transient breaking and rejoining of a single strand of DNA which allows the strands to pass through one another, thus altering the topology of DNA.

[0450] In some embodiments, the topoisomerase domain is capable of ligating the donor polynucleotide with the target polynucleotide. The ligation may be achieved by sticky end or blunt end ligation. In an example, the donor polynucleotide may comprise an overhang comprising a sequence complementary to a region of the target polynucleotide. Examples of ligating the donor polynucleotide with the target polynucleotide include those of TOPO cloning, e.g., those described in “The Technology Behind TOPO Cloning,” at www.thermofisher.com/us/en/home/life-science/cloning/topo/topo-resources/the-technology-behind-topo-cloning.html.

[0451] In some embodiments, the topoisomerase domain may be associated with the donor polynucleotide. For example, the topoisomerase domain is covalently linked to the donor polynucleotide.

[0452] In some embodiments, a topoisomerase domain may be provided together with, e.g., associated (e.g., fused) with a Fanzor protein (e.g., a Fanzor protein or a variant thereof such as a dead Fanzor or a Fanzor nickase). Alternatively or additionally, the topoisomerase domain may be on a molecule different from the Fanzor protein. In some cases, the topoisomerase domain may be associated with a donor polynucleotide. For example, the topoisomerase domain may be pre-loaded covalently with a donor DNA molecule. Such design may allow for efficient ligation of only a specific cargo. The topoisomerase domain may ligate the donor polynucleotide (e.g., a DNA molecule) to a target site on a target polynucleotide (e.g., a free double-stranded DNA end). In some embodiments, the donor polynucleotide may have an overhang that comprises a sequence complementary to a region of the target polynucleotide. For example, the overhang may invade into the target polynucleotide at a cut site generated by the Fanzor protein.

[0453] Examples of topoisomerases include type I, including type IA and type IB topoisomerases, which cleave a single strand of a double-stranded nucleic acid molecule, and type II topoisomerases (e.g., gyrases), which cleave both strands of a double-stranded nucleic acid molecule.

[0454] Type IA and IB topoisomerases cleave one strand of a double-stranded nucleic acid molecule. In some examples, the cleavage of a double-stranded nucleic acid molecule by type IA topoisomerases generates a 5′ phosphate and a 3′ hydroxyl at the cleavage site, with the type IA topoisomerase covalently binding to the 5′ terminus of a cleaved strand. Cleavage of a double-stranded nucleic acid molecule by type IB topoisomerases may generate a 3′ phosphate and a 5′ hydroxyl at the cleavage site, with the type IB topoisomerase covalently binding to the 3′ terminus of a cleaved strand.

[0455] Examples of Type IA topoisomerases include E. coli topoisomerase I, E. coli topoisomerase III, eukaryotic topoisomerase II, archeal reverse gyrase, yeast topoisomerase III, Drosophila topoisomerase III, human topoisomerase III, Streptococcus pneumoniae topoisomerase III, and the like, including other type IA topoisomerases. A DNA-protein adduct is formed with the enzyme covalently binding to the 5′-thymidine residue, with cleavage occurring between the two thymidine residues.

[0456] Examples of Type IB topoisomerases include the nuclear type I topoisomerases present in all eukaryotic cells and those encoded by Vaccinia and other cellular poxviruses. The eukaryotic type IB topoisomerases are exemplified by those expressed in yeast, Drosophila and mammalian cells, including human cells. Viral type IB topoisomerases are exemplified by those produced by the vertebrate poxviruses (Vaccinia, Shope fibroma virus, ORF virus, fowlpox virus, and molluscum contagiosum virus), and the insect poxvirus (Amsacta moorei entomopoxvirus).

[0457] Examples of Type II topoisomerases include, bacterial gyrase, bacterial DNA topoisomerase IV, eukaryotic DNA topoisomerase II, and T-even phage encoded DNA topoisomerases. Type II topoisomerases may have both cleaving and ligating activities. Substrate double-stranded nucleic acid molecules of type II topoisomerase can be prepared such that the type II topoisomerase can form a covalent linkage to one strand at a cleavage site. For example, calf thymus type II topoisomerase can cleave a substrate ds nucleic acid molecule containing a 5′ recessed topoisomerase recognition site positioned three nucleotides from the 5′ end, resulting in dissociation of the three nucleic acid molecule 5′ to the cleavage site and covalent binding of the topoisomerase to the 5′ terminus of the ds nucleic acid molecule. Furthermore, upon contacting such a type II topoisomerase-charged ds nucleic acid molecule with a second nucleic acid molecule containing a 3′ hydroxyl group, the type II topoisomerase can ligate the sequences together, and then is released from the recombinant nucleic acid molecule.

[0458] In some examples, the topoisomerase is DNA topoisomerase I, e.g., a Vaccinia virus topoisomerase I. The topoisomerase may be pre-loaded with a donor polynucleotide. The Vaccinia virus topoisomerase may need a target comprising a 5′—OH group.

### Fanzor Phosphatase Systems

[0459] The systems herein may further comprise a phosphatase domain. A phosphatase is an enzyme capable of removing a phosphate group from a molecule e.g., a nucleic acid such as DNA. Examples of phosphatases include calf intestinal phosphatase, shrimp alkaline phosphatase, Antarctic phosphatase, and APEX alkaline phosphatase.

[0460] In some examples, the 5′—OH group of in the target polynucleotide may be generated by a phosphatase. A topoisomerase compatible with a 5′ phosphate target may be used to generate stable loaded intermediates. In some cases, a Fanzor polypeptide that leaves a 5′ OH after cleaving the target polynucleotide may be used. In some cases, the phosphatase domain may be associated with (e.g., fused to) the Fanzor protein. The phosphatase domain may be capable of generating a-OH group at a 5′ end of the target polynucleotide. The phosphatase may be delivered separated from other components in the system, e.g., as a separate protein, on a separate vector from other components.

### Fanzor Polymerase Systems

[0461] The systems herein may further comprise a polymerase domain. A polymerase refers to an enzyme that synthesizes chains of nucleic acids. The polymerase may be a DNA polymerase or an RNA polymerase.

[0462] In some embodiments, the systems comprise an engineered system for modifying a target polynucleotide comprising: a Fanzor protein; a DNA polymerase domain; and a DNA template comprising a donor polynucleotide to be inserted to a target sequence of the target polynucleotide. In some examples, two or more of: the Fanzor protein; DNA polymerase domain; and DNA template may form a complex. In some examples, two or more of: the Fanzor protein; DNA polymerase domain; are comprised in a fusion protein. For example, the Fanzor protein and DNA polymerase domain may be comprised in a fusion protein.

[0463] In some embodiments, the systems may comprise a Fanzor enzyme (or variant thereof such as a dFanzor or Fanzor nickase) and a DNA polymerase (e.g., phi29, T4, T7 DNA polymerase). The systems may further comprise a single-stranded DNA or double-stranded DNA template. The DNA template may comprise i) a first sequence homologous to a target site of the Fanzor protein on the target polynucleotide, and/or ii) a second sequence homologous to another region of the target polynucleotide. In some embodiments, the template may be a synthetic single-stranded or PCR-generated DNA molecule, (optionally end-protected by modified nucleotides), or a viral genome (e.g., AAV). In another embodiment, the template is generated using a reverse transcriptase. When the system is delivered into a cell, an endogenous DNA polymerase in the cell may be used. Alternatively or additionally, an exogenous DNA polymerase may be expressed in the cell.

[0464] The DNA template may be end-protected by one or more modified nucleotides, or comprises a portion of a viral genome. In some embodiment, the DNA template comprises LNA or other modifications (e.g., at the 3′ end). The presence of LNA and/or the modifications may lead to more efficient annealing with the 3′ flap generated by Fanzor protein cleavage.

[0465] Examples of DNA polymerase include Taq, Tne (exo-), Tma (exo-), Pfu (exo-), Pwo (exo-), Thermoanaerobacter thermohydrosulfuricus DNA polymerase, Thermococcus litoralis DNA polymerase I, E. coli DNA polymerase I, Taq DNA polymerase I, Tth DNA polymerase I, Bacillus stearothermophilus (Bst) DNA polymerase I, E. coli DNA polymerase III, bacteriophage T5 DNA polymerase, bacteriophage M2 DNA polymerase, bacteriophage T4 DNA polymerase, bacteriophage T7 DNA polymerase, bacteriophage phi29 DNA polymerase, bacteriophage PRD1 DNA polymerase, bacteriophage phi15 DNA polymerase, bacteriophage phi21DNA polymerase, bacteriophage PZE DNA polymerase, bacteriophage PZA DNA polymerase, bacteriophage Nf DNA polymerase, bacteriophage M2Y DNA polymerase, bacteriophage β103 DNA polymerase, bacteriophage SF5 DNA polymerase, bacteriophage GA-1 DNA polymerase, bacteriophage Cp-5 DNA polymerase, bacteriophage Cp-7 DNA polymerase, bacteriophage PR4 DNA polymerase, bacteriophage PR5 DNA polymerase, bacteriophage PR722 DNA polymerase and bacteriophage L17 DNA polymerase.

### Fanzor Ligase Systems

[0466] In general, the systems comprise a Fanzor protein, and a ligase associated with the Fanzor protein. The Fanzor protein may be recruited to the target sequence by an ωRNA comprising a spacer capable of binding the target sequence and generate a break on the target sequence. The ωRNA may further comprise a template sequence with desired mutations or other sequence elements. The template sequence may be ligated to the target sequence to introduce the mutations or other sequence elements to the nucleic acid molecule. The Fanzor protein may be a nickase that generates a single-strand break on nucleic acid molecule, and the ligase may be a single-strand DNA ligase. In some embodiments, the systems comprise a pair of Fanzor-ligases complexes with two distinct ωRNA sequences. Each Fanzor-ligase complex can target one strand of a double-stranded polynucleotide and work together to effectively modify the sequence of the double-stranded polynucleotides.

[0467] In some examples, the Fanzor is associated with a ligase or functional fragment thereof. The ligase may ligate a single-strand break (a nick) generated by the Fanzor. In certain cases, the ligase may ligate a double-strand break generated by the Fanzor. In certain examples, the Fanzor is associated with a reverse transcriptase or functional fragment thereof.

[0468] The present invention further provides systems and methods of modifying a nucleic acid sequence using a pair of distinct Fanzor-ligase-ωRNA complexes, said systems and methods comprising: (a) an engineered Fanzor protein connected to or complexed with a ligase; (b) two distinct ωRNA sequences complexed with such Fanzor-ligase protein complex to form a first and a second distinct Fanzor-ligase ωRNA complexes; (c) the first Fanzor-ligase-ωRNA complex binding to one strand of a target double-stranded polynucleotide sequence, and the second Fanzor-ligase-ωRNA complex binding to another strand of the target double-stranded polynucleotide sequence; (d) upon binding of the said complexes to the locus of interest the effector protein induces the modification of the sequences associated with or at the target locus of interest, whereby the two Fanzor-ligase-ωRNA complexes work together on different strands of the double-stranded target sequence and modify the sequence.

[0469] One of the advantages of using such a “pair” of Fanzor-ligase-ωRNAcomplexes includes high efficiency in modifying the sequence associated with or at the locus of interest of target double-stranded polynucleotides.

[0470] In some embodiments, the Fanzor protein can be a nickase. In a preferred embodiment, a ligase is linked to the Fanzor protein. The ligase can ligate the donor sequence to the target sequence. The ligase can be a single-strand DNA ligase or a double-strand DNA ligase. The ligase can be fused to the carboxyl-terminus of a Fanzor protein, or to the amino-terminus of a Fanzor protein.

[0471] As used herein the term “ligase” refers to an enzyme, which catalyzes the joining of breaks (e.g., double-stranded breaks or single-stranded breaks (“nicks”) between adjacent bases of nucleic acids. For example, a ligase may be an enzyme capable of forming intra- or inter-molecular covalent bonds between a 5′ phosphate group and a 3′ hydroxyl group. The term “ligate” refers to the reaction of covalently joining adjacent oligonucleotides through formation of an internucleotide linkage.

[0472] DNA ligases fall into two general categories: ATP-dependent DNA ligases (EC 6.5.1.1), and NAD (+) dependent DNA ligases (EC 6.5.1.2). NAD (+) dependent DNA ligases are found only in bacteria (and some viruses) while ATP-dependent DNA ligases are ubiquitous. The ATP-dependent DNA ligases can be divided into four classes: DNA ligase I, II, III, and IV. DNA ligase I links Okazaki fragments to form a continuous strand of DNA; DNA ligase II is an alternatively spliced form of DNA ligase III, found only in non-dividing cells; DNA ligase III is involved in base excision repair; and DNA ligase IV is involved in the repair of DNA double-strand breaks by non-homologous end joining (NHEJ). Amongst all ligases, there are two types of prokaryotic and one type of eukaryotic ligases that are particularly well suited for facilitating the blunt-ended, double-stranded DNA ligation: Prokaryotic DNA ligases (T3 and T4) and Eukaryotic DNA ligase (Ligase 1).

[0473] In some cases, the ligase is specific for double-stranded nucleic acids (e.g., dsDNA, dsRNA, RNA/DNA duplex). An example of a ligase specific for double-stranded DNA and DNA/RNA hybrids is T4 DNA ligase. In some cases, the ligase is specific for single-stranded nucleic acids (e.g., ssDNA, ssRNA). An example of such ligase is CircLigase II. In some cases, the ligase is specific for RNA/DNA duplexes. In some cases, the ligase is able to work on single-stranded, double-stranded, and/or RNA/DNA nucleic acids in any combination.

[0474] In some cases, the ligase may be a pan-ligase, which is a single ligase with the ability to ligate both DNA and RNA targets. The ligase may be specific for a target (e.g., DNA-specific or RNA-specific). In some cases, the ligase may be a dual ligase system that include DNA-specific, RNA-specific, and/or pan-ligases, in any combination.

[0475] Examples of ligases that can be used with the disclosure include T4 DNA Ligase, T3 DNA Ligase, T7 DNA Ligase, E. coli DNA Ligase, HiFi Taq DNA Ligase, 9° NTM DNA Ligase, Taq DNA Ligase, Splint® Ligase (also known as. PBCV-1 DNA Ligase or Chlorella virus DNA Ligase), Thermostable 5′ AppDNA/RNA Ligase, T4 RNA Ligase, T4 RNA Ligase 2, T4 RNA Ligase 2 Truncated, T4 RNA Ligase 2 Truncated K227Q, T4 RNA Ligase 2, Truncated KQ, RtcB Ligase (joins single stranded RNA with a 3″-phosphate or 2′,3′-cyclic phosphate to another RNA), CircLigase II, CircLigase ssDNA Ligase, CircLigase RNA Ligase, or Ampligase® Thermostable DNA Ligas, NAD-dependent ligases including Taq DNA ligase, Thermus filiformis DNA ligase, Escherichia coliDNA ligase, Tth DNA ligase, Thermus scotoductus DNA ligase (I and II), thermostable ligase, Ampligase thermostable DNA ligase, VanC-type ligase, 9° N DNA Ligase, Tsp DNA ligase, and novel ligases discovered by bioprospecting; ATP-dependent ligases including T4 RNA ligase, T4 DNA ligase, T3 DNA ligase, T7 DNA ligase, Pfu DNA ligase, DNA ligase I, DNA ligase III, DNA ligase IV, and novel ligases discovered by bioprospecting, and wild-type, mutant isoforms, and genetically engineered variants thereof. In a particular example, the ligase is a

[0476] In some embodiments, the examples of the ligases include those used in sequencing by synthesis or sequencing by ligation reactions.

### Fanzor Helitron Systems

[0477] The systems and compositions herein may comprise a Fanzor polypeptide, one or more nucleic acid components, and one or more components of a helitron. The systems and compositions may be used to insert a donor polynucleotide to a target polynucleotide. The systems and compositions may further comprise a donor polynucleotide.

[0478] The term “helitron”, as used herein, refers to a polynucleotide (or nucleic acid segment), recognized as a transposon that captures and mobilizes gene fragments in eukaryotes. The term “helitron” as used herein refers to transposase that comprises an endonuclease domain and a C-terminal helicase domain. Helitrons are rolling-circle RNA transposons. In particular embodiments, the helitron encodes a 1400 to about 2000 amino acid, or about 1800 amino acid multidomain transposase. In embodiments, the helitron comprises a hairpin near the 3′end to function as a transposition terminator. In embodiments, the transposon comprises a RepHel motif comprising a replication initiator (Rep) and a DNA helicase (hel) domain. See, Thomas J. & Pritham E. J. Helitrons, the eukaryotic rolling-circle transposable elements. Microbiol. Spectr. 3, 893-926 (2015). In embodiments, the helitron comprises a Rep nuclease domain and C-terminal helicase domain and inserts between an AT dinucleotide in single strand DNA. In an aspect, the C-terminal helicase unwinds the DNA in a 5′ to 3′ direction. The HUH nuclease domain may comprise one or two active site tyrosine residues, in embodiments, is a 2 Tyrosine (Y2) HUH endonuclease domain. Helitrons can encompass helentron, proto-helentron and helitron2 type proteins, structures of which can be as described in Thomas et al., 2015 at FIGS. 1 and 3, incorporated specifically by reference. Particular organisms in which the helitron or helentrons have been found can include those in Table 1 of Thomas J. & Pritham E. J. Helitrons, the eukaryotic rolling-circle transposable elements. Microbiol. Spectr. 3, 893-926 (2015), incorporated herein by reference. Similarly, helitrons can be identified based at least in part on the Rep motif, and conserived residues in the helitrons, and according to the alignment sequence of FIG. 2 of Thomas J. & Pritham E. J. Helitrons, the eukaryotic rolling-circle transposable elements. Microbiol. Spectr. 3, 893-926 (2015), specifically incorporated herein by reference.

[0479] The expression “helitron reaction” used herein refers to a reaction wherein a transposase inserts a donor polynucleotide sequence in or adjacent to an insertion site on a target polynucleotide. The insertion site may contain a sequence or secondary structure recognized by the helitron and/or an insertion motif sequence in the target polynucleotide into which the donor polynucleotide sequence may be inserted.

[0480] As described in Grabundzija 2018, the helitron terminal sequences contains a distinct ˜150 base pairs (bp) long sequence with an absolutely conserved dinucleotide at the end of left terminal sequence (LTS), and a tetranucleotide at the end of right terminal sequence (RTS) which is preceded by a palindromic sequence that can form a hairpin structure. Grabundzija et al., Nat. Commun. 2018; 9:1278; doi: 10.1035/s41467-018-03688-w.

[0481] The helitron end sequences may be responsible for identifying the donor polynucleotide for transposition. The helitron end sequences may be the DNA sequences used to perform a transposition reaction, the end sequences may be referred to herein as right terminal sequences and left terminal sequence. The donor polynucleotide can be configured to comprise a first and second helitron recognition sequence that are at least 80%, 85%, 90%, 95% 96%, 97%, 98%, 99% or 100% complementary to a left terminal sequence and/or a right terminal sequence of a polynucleotide encoding the helitron polypeptide.

[0482] In an aspect, the palindromic sequence may be located upstream of the right terminal sequence, for example, about 5, 10, 15, 20, 25, 30, 35 nucleotides upstream of the right terminal sequence end, or about 10 to 15 nucleotides upstream of the right terminal sequence end, about 10 to 12 nucleotides or about 11 nucleotides upstream of the right terminal sequence end. Ivana Grabundzija, Nat Commun. 2016; 7:10716, doi: 10.1038/ncomms10716, incorporated herein by reference.

[0483] Exemplary helitrons can be identified using software, for example (EAHelitron) that has been used to identify Helitrons in a wide range of plant genomes. See, Hu, K., Xu, K., Wen, J. et al. Helitron distribution in Brassicaceae and whole Genome Helitron density as a character for distinguishing plant species. BMC Bioinformatics 20, 354 (2019). doi: 10.1186/s12859-019-2945-8, incorporated herein by reference.

[0484] The helitron may be derived from a eukaryote. In an aspect, the helitron is derived from a mammalian genome, in an aspect, vespertilionid bats, e.g. Helibat. In embodiments, the helitron is derived from derived from a Helibat1 transposon. In embodiments, the helitron is Helraiser, the full DNA sequence of the consensus transposon, including left terminal and right terminal sequences as well as hairpin identified is provided in Grabundzija, 2016 at Supplementary FIG. 1, specifically incorporated herein by reference. In an aspect, the helitron is flanked by left and right terminal sequences of the transposon. In an aspect, the left terminal sequence and right terminal sequence terminates with the conserved 5′-TC/CTAG-3′ motif. In one embodiment, the helitron may comprise a palindromic sequence that is about 10 to about 35, or about 5-25 bp or about 19-bp-long palindromic sequence with the potential to form a hairpin structure.

[0485] Elements of these systems may be engineered to work within the context of the invention. For example, a helitron polypeptide may be fused to a polypeptide capable of generating an R-loop. Fusion may be by any appropriate linker, in an exemplary embodiment, XTEN16. The binding elements that allow a helitron polypeptide to bind, for example, the use of sequences complementary to the right terminal sequence and the left terminal sequence of the helitron may be engineered into a donor construct to facilitate entry of a donor polynucleotide sequence into a target polynucleotide.

[0486] In certain example embodiments, the Isc polypeptide, via formation of complex with a nucleic acid component sequence, directs the helitron polypeptide to a target sequence in a target polynucleotide, where the helitron facilitates integration of a donor polynucleotide sequence into the target polynucleotide.

[0487] The helitron polypeptides may also comprise one or more truncations or excisions to remove domains or regions of wild-type protein to arrive at a minimal polypeptide, alter functionality according to the system in which the helitron is used, or mutated to enhance or diminish particular activities associated with the helitron, i.e., nuclease activity or helicase activity.

### Multiplexing

[0488] In one embodiment, Fanzor polypeptides may be used in a multiplex (tandem) targeting approach. For example, Fanzor polypeptide herein can employ more than one nucleic acid component molecule without losing activity. This may enable the use of the Fanzor polypeptide, systems or complexes as defined herein for targeting multiple DNA targets, genes or gene loci, with a single enzyme, system or complex as defined herein. The nucleic acid component molecules may be tandemly arranged, optionally separated by a nucleotide sequence such as a conserved nucleotide sequence as defined herein. The position of the different nucleic acid component molecules is the tandem does not influence the activity.

[0489] In one aspect, the Fanzor polypeptides may be used for tandem or multiplex targeting. It is to be understood that any of the Fanzor polypeptides, complexes, or compositions herein elsewhere may be used in such an approach. Any of the methods, products, compositions and uses as described herein elsewhere are equally applicable with the multiplex or tandem targeting approach further detailed below. By means of further guidance, the following particular aspects and embodiments are provided.

[0490] In one aspect, the invention provides for the use of a Fanzor polypeptide, complex or system as defined herein for targeting multiple gene loci. In one embodiment, this can be established by using multiple (tandem or multiplex) nucleic acid component molecule sequences.

[0491] In one aspect, the invention provides methods for using one or more elements of a Fanzor polypeptide, complex or system as defined herein for tandem or multiplex targeting, wherein said system herein comprises multiple nucleic acid component molecule sequences. Said sequences are separated by a nucleotide sequence, such as a conserved nucleotide sequence as defined herein elsewhere.

[0492] The Fanzor polypeptides, compositions, systems or complexes as defined herein provides an effective means for modifying multiple target polynucleotides. The Fanzor polypeptide, system or complex as defined herein has a wide variety of utility including modifying (e.g., deleting, inserting, translocating, inactivating, activating) one or more target polynucleotides in a multiplicity of cell types. As such the Fanzor polypeptide, system or complex as defined herein of the invention has a broad spectrum of applications in, e.g., gene therapy, drug screening, disease diagnosis, and prognosis, including targeting multiple gene loci within a single system.

[0493] In one aspect, the present disclosure provides a Fanzor polypeptide, system or complex as defined herein, having a Fanzor polypeptide having at least one destabilization domain associated therewith, and multiple nucleic acid component molecule that target multiple nucleic acid molecules such as DNA molecules, whereby each of said multiple nucleic acid component molecules specifically targets its corresponding nucleic acid molecule, e.g., DNA molecule. Each nucleic acid molecule target, e.g., DNA molecule can encode a gene product or encompass a gene locus. Using multiple nucleic acid component molecules hence enables the targeting of multiple gene loci or multiple genes. In one embodiment the Fanzor polypeptide may cleave the DNA molecule encoding the gene product. In one embodiment expression of the gene product is altered. The Fanzor polypeptide and the nucleic acid component molecules do not naturally occur together. The present disclosure comprehends the nucleic acid component molecules comprising tandemly arranged nucleic acid component molecule. The present disclosure further comprehends coding sequences for the Fanzor polypeptide being codon optimized for expression in a eukaryotic cell. In an embodiment the eukaryotic cell is a mammalian cell, a plant cell or a yeast cell and in a more preferred embodiment the mammalian cell is a human cell. Expression of the gene product may be decreased. The Fanzor polypeptide may form part of a system or complex, which further comprises tandemly arranged nucleic acid component molecule comprising a series of 2, 3, 4, 5, 6, 7, 8, 9, 10, 15, 25, 25, 30, or more than 30 nucleic acid component molecules, each capable of specifically hybridizing to a target sequence in a genomic locus of interest in a cell. In one embodiment, the functional system or complex binds to the multiple target sequences. In one embodiment, the functional system or complex may edit the multiple target sequences, e.g., the target sequences may comprise a genomic locus, and in one embodiment, there may be an alteration of gene expression. In one embodiment, the functional system or complex may comprise further functional domains. In one embodiment, the invention provides a method for altering or modifying expression of multiple gene products. The method may comprise introducing into a cell containing said target nucleic acids, e.g., DNA molecules, or containing and expressing target nucleic acid, e.g., DNA molecules; for instance, the target nucleic acids may encode gene products or provide for expression of gene products (e.g., regulatory sequences).

[0494] In one embodiment, the Fanzor polypeptide used for multiplex targeting is associated with one or more functional domains. In some more specific embodiments, the Fanzor polypeptide used for multiplex targeting is a dead Fanzor polypeptide. The inventors have found that the Fanzor polypeptide as described herein may enable improved and/or direct access to one or more nucleotides involved in the DNA: RNA duplex.

### Inducible Systems

[0495] In one embodiment, a Fanzor polypeptide may form a component of an inducible system. The inducible nature of the system would allow for spatiotemporal control of gene editing or gene expression using a form of energy. The form of energy may include but is not limited to electromagnetic radiation, sound energy, chemical energy and thermal energy. Examples of inducible system include tetracycline inducible promoters (Tet-On or Tet-Off), small molecule two-hybrid transcription activations systems (FKBP, ABA, etc.), or light inducible systems (Phytochrome, LOV domains, or cryptochrome). In one embodiment, the Fanzor polypeptide may be a part of a Light Inducible Transcriptional Effector (LITE) to direct changes in transcriptional activity in a sequence-specific manner. The components of a light may include a Fanzor polypeptide, a light-responsive cytochrome heterodimer (e.g., from Arabidopsis thaliana), and a transcriptional activation/repression domain. Further examples of inducible DNA binding proteins and methods for their use are provided in U.S. Provisional Application Nos. 61/736,465 and U.S. 61/721,283, and International Patent Publication No. WO 2014/018423 A2 which is hereby incorporated by reference in its entirety.

### Self-Inactivating Systems

[0496] Once all copies of a gene in the genome of a cell have been edited, continued expression of the system in that cell is no longer necessary. Indeed, sustained expression would be undesirable in case of off-target effects at unintended genomic sites, etc. Thus time-limited expression would be useful. Inducible expression offers one approach, but in addition Applicants have engineered a self-Inactivating system that relies on the use of a non-coding nucleic acid component molecule target sequence within the vector itself. Thus, after expression begins, the system will lead to its own destruction, but before destruction is complete it will have time to edit the genomic copies of the target gene (which, with a normal point mutation in a diploid cell, requires at most two edits). Simply, the self-inactivating system includes additional RNA (e.g., nucleic acid component molecule) that targets the coding sequence for the Fanzor polypeptide itself or that targets one or more non-coding nucleic acid component molecule target sequences complementary to unique sequences present in one or more of the following: (a) within the promoter driving expression of the non-coding RNA elements, (b) within the promoter driving expression of the Fanzor polypeptide gene, (c) within 100 bp of the ATG translational start codon in the Fanzor polypeptide coding sequence, (d) within the inverted terminal repeat (iTR) of a viral delivery vector, e.g., in the AAV genome.

[0497] In some aspects, a single nucleic acid component molecule is provided that is capable of hybridization to a sequence downstream of a Fanzor polypeptide start codon, whereby after a period of time there is a loss of the Fanzor polypeptide expression. In some aspects, one or more nucleic acid component molecule(s) are provided that are capable of hybridization to one or more coding or non-coding regions of the polynucleotide encoding the system, whereby after a period of time there is a inactivation of one or more, or in some cases all, of the system. In some aspects of the system, and not to be limited by theory, the cell may comprise a plurality of complexes, wherein a first subset of complexes comprise a first nucleic acid component molecule capable of targeting a genomic locus or loci to be edited, and a second subset of complexes comprise at least one second nucleic acid component molecule capable of targeting the polynucleotide encoding the system, wherein the first subset of complexes mediate editing of the targeted genomic locus or loci and the second subset of complexes eventually inactivate the system, thereby inactivating further expression in the cell.

[0498] The various coding sequences (Fanzor polypeptide and nucleic acid component molecule) can be included on a single vector or on multiple vectors. For instance, it is possible to encode the enzyme on one vector and the various RNA sequences on another vector, or to encode the enzyme and one nucleic acid component molecule on one vector, and the remaining nucleic acid component molecule on another vector, or any other permutation. In general, a system using a total of one or two different vectors is preferred.

[0499] Where multiple vectors are used, it is possible to deliver them in unequal numbers, and ideally with an excess of a vector which encodes the first nucleic acid component molecule relative to the second nucleic acid component molecule, thereby assisting in delaying final inactivation of the system until genome editing has had a chance to occur.

[0500] The first nucleic acid component molecule can target any target sequence of interest within a genome, as described elsewhere herein. The second nucleic acid component molecule targets a sequence within the vector which encodes the Fanzor polypeptide, and thereby inactivates the enzyme's expression from that vector. Thus, the target sequence in the vector must be capable of inactivating expression. Suitable target sequences can be, for instance, near to or within the translational start codon for the Fanzor polypeptide coding sequence, in a non-coding sequence in the promoter driving expression of the non-coding RNA elements, within the promoter driving expression of the Fanzor polypeptide gene, within 100 bp of the ATG translational start codon in the Fanzor polypeptide coding sequence, and/or within the inverted terminal repeat (iTR) of a viral delivery vector, e.g., in the AAV genome. A double stranded break near this region can induce a frame shift in the Fanzor polypeptide coding sequence, causing a loss of protein expression. An alternative target sequence for the “self-inactivating” nucleic acid component molecule would aim to edit/inactivate regulatory regions/sequences needed for the expression of the system or for the stability of the vector. For instance, if the promoter for the Fanzor polypeptide coding sequence is disrupted then transcription can be inhibited or prevented. Similarly, if a vector includes sequences for replication, maintenance or stability then it is possible to target these. For instance, in a AAV vector a useful target sequence is within the iTR. Other useful sequences to target can be promoter sequences, polyadenylation sites, etc.

[0501] Furthermore, if the nucleic acid component molecules are expressed in array format, the “self-inactivating” nucleic acid component molecules that target both promoters simultaneously will result in the excision of the intervening nucleotides from within the Fanzor polypeptide expression construct, effectively leading to its complete inactivation. Similarly, excision of the intervening nucleotides will result where the nucleic acid component molecules target both ITRs, or targets two or more other components simultaneously. Self-inactivation as explained herein is applicable, in general, with systems in order to provide regulation of the systems. For example, self-inactivation as explained herein may be applied to the repair of mutations, for example expansion disorders, as explained herein. As a result of this self-inactivation, repair may be only transiently active.

[0502] Addition of non-targeting nucleotides to the 5′ end (e.g., 1-10 nucleotides, preferably 1-5 nucleotides) of the “self-inactivating” nucleic acid component molecule can be used to delay its processing and/or modify its efficiency as a means of ensuring editing at the targeted genomic locus prior to shut down.

[0503] In one aspect of the self-inactivating AAV system, plasmids that co-express one or more nucleic acid component molecule targeting genomic sequences of interest (e.g., 1-2, 1-5, 1-10, 1-15, 1-20, 1-30) may be established with “self-inactivating” nucleic acid component molecule that target an Fanzor polypeptide sequence at or near the engineered ATG start site (e.g. within 5 nucleotides, within 15 nucleotides, within 30 nucleotides, within 50 nucleotides, within 100 nucleotides). A regulatory sequence in the U6 promoter region can also be targeted with an nucleic acid component molecule. The U6-driven nucleic acid component molecules may be designed in an array format such that multiple nucleic acid component molecule sequences can be simultaneously released. When first delivered into target tissue/cells (left cell) nucleic acid component molecules begin to accumulate while Fanzor polypeptide levels rise in the nucleus. Fanzor polypeptide complexes with all of the nucleic acid component molecules to mediate genome editing and self-inactivation of the Fanzor polypeptide plasmids.

[0504] One aspect of a self-inactivating system is expression of singly or in tandem array format from 1 up to 4 or more different nucleic acid component sequences; e.g. up to about 20 or about 30 sequences. Each individual self-inactivating nucleic acid component molecule sequence may target a different target. Such may be processed from, e.g., one chimeric pol3 transcript. Pol3 promoters such as U6 or H1 promoters may be used. Pol2 promoters such as those mentioned throughout herein. Inverted terminal repeat (iTR) sequences may flank the Pol3 promoter-nucleic acid component molecule(s)-Pol2 promoter-Fanzor polypeptide.

[0505] One aspect of a tandem array transcript is that one or more nucleic acid component molecule(s) edit the one or more target(s) while one or more self-inactivating nucleic acid component molecules inactivate the system. Thus, for example, the described system for repairing expansion disorders may be directly combined with the self-inactivating system described herein. Such a system may, for example, have two nucleic acid component molecules directed to the target region for repair as well as at least a third nucleic acid component molecule directed to self-inactivation of the Fanzor polypeptide or systems.

[0506] The nucleic acid component molecule may be a control molecule. For example, it may be engineered to target a nucleic acid sequence encoding the Fanzor polypeptide itself, as described in U.S. Patent Publication No. US2015232881A1, the disclosure of which is hereby incorporated by reference. In one embodiment, a system or composition may be provided with just the nucleic acid component molecule engineered to target the nucleic acid sequence encoding the Fanzor polypeptide. In addition, the system or composition may be provided with the nucleic acid component molecule engineered to target the nucleic acid sequence encoding the Fanzor polypeptide, as well as nucleic acid sequence encoding the Fanzor polypeptide and, optionally a second nucleic acid component molecule and, further optionally, a repair template. The second nucleic acid component may be the primary target of the system or composition (such a therapeutic, diagnostic, knock out etc. as defined herein). In this way, the system or composition is self-inactivating. This is exemplified in relation to Cas in US2015232881A1 (also published as WO2015070083 (A1), and may be extrapolated to Fanzor polypeptides disclosed herein, e.g., Fanzor polypeptides.

### Polynucleotides Encoding Fanzor Polypeptides, Vectors, and Fanzor Systems

[0507] The systems herein may comprise one or more polynucleotides. The polynucleotide(s) may comprise coding sequences of components of the systems herein, e.g., Fanzor polypeptide, nucleic acid component(s), functional domain(s), donor polynucleotide(s), and/or other components in the systems. The present disclosure further provides vectors or vector systems comprising one or more polynucleotides herein. The vectors or vector systems include those described in the delivery sections herein.

### Polynucleotides

[0508] Described in several example embodiments herein are polynucleotides that encode one or more of the Fanzor polypeptides or other system polypeptides and/or nucleic acid component molecules, and/or the like. The terms “polynucleotide”, “nucleotide”, “nucleotide sequence”, “nucleic acid” and “oligonucleotide” are used interchangeably. They refer to a polymeric form of nucleotides of any length, either deoxyribonucleotides or ribonucleotides, or analogs thereof. Polynucleotides may have any three dimensional structure, and may perform any function, known or unknown. The following are non-limiting examples of polynucleotides: coding or non-coding regions of a gene or gene fragment, loci (locus) defined from linkage analysis, exons, introns, messenger RNA (mRNA), transfer RNA, ribosomal RNA, short interfering RNA (siRNA), short-hairpin RNA (nucleic acid component), micro-RNA (miRNA), ribozymes, cDNA, recombinant polynucleotides, branched polynucleotides, plasmids, vectors, isolated DNA of any sequence, isolated RNA of any sequence, nucleic acid probes, and primers. The term also encompasses nucleic-acid-like structures with synthetic backbones, see, e.g., Eckstein, 1991; Baserga et al., 1992; Milligan, 1993; WO 97/03211; WO 96/39154; Mata, 1997; Strauss-Soukup, 1997; and Samstag, 1996. A polynucleotide may comprise one or more modified nucleotides, such as methylated nucleotides and nucleotide analogs. If present, modifications to the nucleotide structure may be imparted before or after assembly of the polymer. The sequence of nucleotides may be interrupted by non-nucleotide components. A polynucleotide may be further modified after polymerization, such as by conjugation with a labeling component. As used herein the term “wild type” is a term of the art understood by skilled persons and means the typical form of an organism, strain, gene or characteristic as it occurs in nature as distinguished from mutant or variant forms. A “wild type” can be a base line. As used herein the term “variant” should be taken to mean the exhibition of qualities that have a pattern that deviates from what occurs in nature. The terms “non-naturally occurring” or “engineered” are used interchangeably and indicate the involvement of the hand of man. The terms, when referring to nucleic acid molecules or polypeptides mean that the nucleic acid molecule or the polypeptide is at least substantially free from at least one other component with which they are naturally associated in nature and as found in nature. “Complementarity” refers to the ability of a nucleic acid to form hydrogen bond(s) with another nucleic acid sequence by either traditional Watson-Crick base pairing or other non-traditional types. A percent complementarity indicates the percentage of residues in a nucleic acid molecule which can form hydrogen bonds (e.g., Watson-Crick base pairing) with a second nucleic acid sequence (e.g., 5, 6, 7, 8, 9, 10 out of 10 being 50%, 60%, 70%, 80%, 90%, and 100% complementary). “Perfectly complementary” means that all the contiguous residues of a nucleic acid sequence will hydrogen bond with the same number of contiguous residues in a second nucleic acid sequence. “Substantially complementary” as used herein refers to a degree of complementarity that is at least 60%, 65%, 70%, 75%, 80%, 85%, 90%, 95%, 97%, 98%, 99%, or 100% over a region of 8, 9, 10, 11, 12, 13, 14, 15, 16, 17, 18, 19, 20, 21, 22, 23, 24, 25, 30, 35, 40, 45, 50, or more nucleotides, or refers to two nucleic acids that hybridize under stringent conditions. As used herein, “stringent conditions” for hybridization refer to conditions under which a nucleic acid having complementarity to a target sequence predominantly hybridizes with the target sequence, and substantially does not hybridize to non-target sequences. Stringent conditions are generally sequence-dependent and vary depending on a number of factors. In general, the longer the sequence, the higher the temperature at which the sequence specifically hybridizes to its target sequence. Non-limiting examples of stringent conditions are described in detail in Tijssen (1993), Laboratory Techniques In Biochemistry And Molecular Biology-Hybridization With Nucleic Acid Probes Part I, Second Chapter “Overview of principles of hybridization and the strategy of nucleic acid probe assay”, Elsevier, N.Y. Where reference is made to a polynucleotide sequence, then complementary or partially complementary sequences are also envisaged. These are preferably capable of hybridizing to the reference sequence under highly stringent conditions. “Hybridization” refers to a reaction in which one or more polynucleotides react to form a complex that is stabilized via hydrogen bonding between the bases of the nucleotide residues. The hydrogen bonding may occur by Watson Crick base pairing, Hoogstein binding, or in any other sequence specific manner. The complex may comprise two strands forming a duplex structure, three or more strands forming a multi stranded complex, a single self-hybridizing strand, or any combination of these. A hybridization reaction may constitute a step in a more extensive process, such as the initiation of PCR, or the cleavage of a polynucleotide by an enzyme. A sequence capable of hybridizing with a given sequence is referred to as the “complement” of the given sequence. As used herein, the term “genomic locus” or “locus” (plural loci) is the specific location of a gene or DNA sequence on a chromosome. A “gene” refers to stretches of DNA or RNA that encode a polypeptide or an RNA chain that has functional role to play in an organism and hence is the molecular unit of heredity in living organisms. For the purpose of this invention, it may be considered that genes include regions which regulate the production of the gene product, whether or not such regulatory sequences are adjacent to coding and/or transcribed sequences. Accordingly, a gene includes, but is not necessarily limited to, promoter sequences, terminators, translational regulatory sequences such as ribosome binding sites and internal ribosome entry sites, enhancers, silencers, insulators, boundary elements, replication origins, matrix attachment sites and locus control regions. As used herein, “expression of a genomic locus” or “gene expression” is the process by which information from a gene is used in the synthesis of a functional gene product. The products of gene expression are often proteins, but in non-protein coding genes such as rRNA genes or tRNA genes, the product is functional RNA. The process of gene expression is used by all known life-eukaryotes (including multicellular organisms), prokaryotes (bacteria and archaea) and viruses to generate functional products to survive. As used herein “expression” of a gene or nucleic acid encompasses not only cellular gene expression, but also the transcription and translation of nucleic acid(s) in cloning systems and in any other context. As used herein, “expression” also refers to the process by which a polynucleotide is transcribed from a DNA template (such as into and mRNA or other RNA transcript) and/or the process by which a transcribed mRNA is subsequently translated into peptides, polypeptides, or proteins. Transcripts and encoded polypeptides may be collectively referred to as “gene product.” If the polynucleotide is derived from genomic DNA, expression may include splicing of the mRNA in a eukaryotic cell. The terms “polypeptide”, “peptide” and “protein” are used interchangeably herein to refer to polymers of amino acids of any length. The polymer may be linear or branched, it may comprise modified amino acids, and it may be interrupted by non-amino acids. The terms also encompass an amino acid polymer that has been modified; for example, disulfide bond formation, glycosylation, lipidation, acetylation, phosphorylation, or any other manipulation, such as conjugation with a labeling component. As used herein the term “amino acid” includes natural and/or unnatural or synthetic amino acids, including glycine and both the D or L optical isomers, and amino acid analogs and peptidomimetics. As used herein, the term “domain” or “protein domain” refers to a part of a protein sequence that may exist and function independently of the rest of the protein chain. As described in aspects of the invention, sequence identity is related to sequence homology. Homology comparisons may be conducted by eye, or more usually, with the aid of readily available sequence comparison programs. These commercially available computer programs may calculate percent (%) homology between two or more sequences and may also calculate the sequence identity shared by two or more amino acid or nucleic acid sequences.

[0509] In one embodiment, the polynucleotide sequence is recombinant DNA. In further embodiments, the polynucleotide sequence further comprises additional sequences as described elsewhere herein. In one embodiment, the nucleic acid sequence is synthesized in vitro.

[0510] The present disclosure provides polynucleotide molecules that encode one or more components of the system or Fanzor polypeptide as referred to in any embodiment herein. In one embodiment, the polynucleotide molecules may comprise further regulatory sequences. By means of guidance and not limitation, the polynucleotide sequence can be part of an expression plasmid, a minicircle, a lentiviral vector, a retroviral vector, an adenoviral or adeno-associated viral vector, a piggyback vector, or a tol2 vector. In one embodiment, the polynucleotide sequence may be a bicistronic expression construct. In further embodiments, the isolated polynucleotide sequence may be incorporated in a cellular genome. In yet further embodiments, the isolated polynucleotide sequence may be part of a cellular genome. In further embodiments, the isolated polynucleotide sequence may be comprised in an artificial chromosome. In one embodiment, the 5′ and/or 3′ end of the isolated polynucleotide sequence may be modified to improve the stability of the sequence of actively avoid degradation. In one embodiment, the isolated polynucleotide sequence may be comprised in a bacteriophage. In other embodiments, the isolated polynucleotide sequence may be contained in agrobacterium species. In one embodiment, the isolated polynucleotide sequence is lyophilized.

### Codon Optimization

[0511] Aspects of the invention relate to polynucleotide molecules that encode one or more components of one or more systems as described in any of the embodiments herein, wherein at least one or more regions of the polynucleotide molecule may be codon optimized for expression in eukaryotic cells. In one embodiment, the polynucleotide molecules that encode one or more components of one or more systems as described in any of the embodiments herein are optimized for expression in a mammalian cell or a plant cell.

[0512] An example of a codon optimized sequence is in this instance a sequence optimized for expression in a eukaryote, e.g., humans (i.e., being optimized for expression in humans), or for another eukaryote, animal or mammal as herein discussed. In one embodiment, an enzyme coding sequence encoding a DNA/RNA-targeting Fanzor polypeptide is codon optimized for expression in particular cells, such as eukaryotic cells. The eukaryotic cells may be those of or derived from a particular organism, such as a plant or a mammal, including but not limited to human, or non-human eukaryote or animal or mammal as herein discussed, e.g., mouse, rat, rabbit, dog, livestock, or non-human mammal or primate. In one embodiment, processes for modifying the germ line genetic identity of human beings and/or processes for modifying the genetic identity of animals which are likely to cause them suffering without any substantial medical benefit to man or animal, and also animals resulting from such processes, may be excluded. In general, codon optimization refers to a process of modifying a nucleic acid sequence for enhanced expression in the host cells of interest by replacing at least one codon (e.g., about or more than about 1, 2, 3, 4, 5, 10, 15, 20, 25, 50, or more codons) of the native sequence with codons that are more frequently or most frequently used in the genes of that host cell while maintaining the native amino acid sequence. Various species exhibit particular bias for certain codons of a particular amino acid. Codon bias (differences in codon usage between organisms) often correlates with the efficiency of translation of messenger RNA (mRNA), which is in turn believed to be dependent on, among other things, the properties of the codons being translated and the availability of particular transfer RNA (tRNA) molecules. The predominance of selected tRNAs in a cell is generally a reflection of the codons used most frequently in peptide synthesis. Accordingly, genes can be tailored for optimal gene expression in a given organism based on codon optimization. Codon usage tables are readily available, for example, at the “Codon Usage Database” available at www.kazusa.orjp/codon/and these tables can be adapted in a number of ways. See Nakamura, Y., et al. “Codon usage tabulated from the international DNA sequence databases: status for the year 2000” Nucl. Acids Res. 28:292 (2000). Computer algorithms for codon optimizing a particular sequence for expression in a particular host cell are also available, such as Gene Forge (Aptagen; Jacobus, PA), are also available. In one embodiment, one or more codons (e.g., 1, 2, 3, 4, 5, 10, 15, 20, 25, 50, or more, or all codons) in a sequence encoding a Fanzor polypeptide corresponds to the most frequently used codon for a particular amino acid.

### Vectors and Delivery

[0513] The present disclosure also provides delivery systems for introducing components of the systems and compositions herein to cells, tissues, organs, or organisms. A delivery system may comprise one or more delivery vehicles and/or cargos. Exemplary delivery systems and methods include those described in paragraphs to of Feng Zhang et al., (WO2016106236A1), and pages 1241-1251 and Table 1 of Lino C A et al., Delivering CRISPR: a review of the challenges and approaches, DRUG DELIVERY, 2018, VOL. 25, NO. 1, 1234-1257, which are incorporated by reference herein in their entireties and can be adapted for use with the Fanzor proteins disclosed herein.

[0514] In one embodiment, the delivery systems may be used to introduce the components of the systems and compositions to plant cells. For example, the components may be delivered to plant using electroporation, microinjection, aerosol beam injection of plant cell protoplasts, biolistic methods, DNA particle bombardment, and/or Agrobacterium-mediated transformation. Examples of methods and delivery systems for plants include those described in Fu et al., Transgenic Res. 2000 February; 9 (1): 11-9; Klein R M, et al., Biotechnology. 1992; 24:384-6; Casas A M et al., Proc Natl Acad Sci USA. 1993 Dec. 1; 90 (23): 11212-11216; and U.S. Pat. No. 5,563,055, Davey M R et al., Plant Mol Biol. 1989 September; 13 (3): 273-85, which are incorporated by reference herein in their entireties.

[0515] The example delivery compositions, systems, and methods described herein related to composition or Fanzor polypeptide also apply to functional domains and other components (e.g., other proteins and polynucleotides related to the Fanzor polypeptide, such as reverse transcriptase, nucleotide deaminase, retrotransposon, donor polynucleotide, etc.).

### Cargos

[0516] The delivery systems may comprise one or more cargos. The cargos may comprise one or more components of the systems and compositions herein. A cargo may comprise one or more of the following: i) a plasmid encoding one or more proteins components in the compositions and systems such as the Fanzor polypeptide and/or functional domains; ii) a plasmid encoding one or more nucleic acid components, iii) mRNA of one or more one or more proteins components in the compositions and systems such as the Fanzor polypeptide and/or functional domains; iv) one or more nucleic acid component molecules; v) one or more proteins components in the compositions and systems such as the Fanzor polypeptide and/or functional domains; vi) any combination thereof. The one or more protein components may include the nuclei acid-guided nuclease (e.g., Cas), reverse transcriptase, nucleotide deaminase, retrotransposon protein, other functional domain, or any combination thereof.

[0517] In some examples, a cargo may comprise a plasmid encoding one or more proteins components in the compositions and systems such as the Fanzor polypeptide and/or functional domains and one or more (e.g., a plurality of) nucleic acid component molecules. In some cases, the plasmid may also encode a recombination template (e.g., for HDR). In one embodiment, a cargo may comprise mRNA encoding one or more protein components and one or more nucleic acid component molecules.

[0518] In some examples, a cargo may comprise one or more protein components and one or more nucleic acid component molecules, e.g., in the form of ribonucleoprotein complexes (RNP). The ribonucleoprotein complexes may be delivered by methods and systems herein. In some cases, the ribonucleoprotein may be delivered by way of a polypeptide-based shuttle agent. In one example, the ribonucleoprotein may be delivered using synthetic peptides comprising an endosome leakage domain (ELD) operably linked to a cell penetrating domain (CPD), to a histidine-rich domain and a CPD, e.g., as describe in WO2016161516. RNP may also be used for delivering the compositions and systems to plant cells, e.g., as described in Wu J W, et al., Nat Biotechnol. 2015 November; 33 (11): 1162-4.

### Physical Delivery

[0519] In one embodiment, the cargos may be introduced to cells by physical delivery methods. Examples of physical methods include microinjection, electroporation, and hydrodynamic delivery. Both nucleic acid and proteins may be delivered using such methods. For example, one or more protein components may be prepared in vitro, isolated, (refolded, purified if needed), and introduced to cells.

### Microinjection

[0520] Microinjection of the cargo directly to cells can achieve high efficiency, e.g., above 90% or about 100%. In one embodiment, microinjection may be performed using a microscope and a needle (e.g., with 0.5-5.0 μm in diameter) to pierce a cell membrane and deliver the cargo directly to a target site within the cell. Microinjection may be used for in vitro and ex vivo delivery.

[0521] Plasmids comprising coding sequences for one or more protein components and/or nucleic acid components, mRNAs, and/or nucleic acid component molecules, may be microinjected. In some cases, microinjection may be used i) to deliver DNA directly to a cell nucleus, and/or ii) to deliver mRNA (e.g., in vitro transcribed) to a cell nucleus or cytoplasm. In certain examples, microinjection may be used to delivery nucleic acid component directly to the nucleus and mRNA to the cytoplasm, e.g., facilitating translation and shuttling of one or more protein components to the nucleus.

[0522] Microinjection may be used to generate genetically modified animals. For example, gene editing cargos may be injected into zygotes to allow for efficient germline modification. Such approach can yield normal embryos and full-term mouse pups harboring the desired modification(s). Microinjection can also be used to provide transiently up- or down-regulate a specific gene within the genome of a cell, e.g., using Fanzor polypeptide or system.

### Electroporation

[0523] In one embodiment, the cargos and/or delivery vehicles may be delivered by electroporation. Electroporation may use pulsed high-voltage electrical currents to transiently open nanometer-sized pores within the cellular membrane of cells suspended in buffer, allowing for components with hydrodynamic diameters of tens of nanometers to flow into the cell. In some cases, electroporation may be used on various cell types and efficiently transfer cargo into cells. Electroporation may be used for in vitro and ex vivo delivery.

[0524] Electroporation may also be used to deliver the cargo to into the nuclei of mammalian cells by applying specific voltage and reagents, e.g., by nucleofection. Such approaches include those described in Wu Y, et al. (2015). Cell Res 25:67-79; Ye L, et al. (2014). Proc Natl Acad Sci USA 111:9591-6; Choi PS, Meyerson M. (2014). Nat Commun 5:3728; Wang J, Quake SR. (2014). Proc Natl Acad Sci 111:13157-62. Electroporation may also be used to deliver the cargo in vivo, e.g., with methods described in Zuckermann M, et al. (2015). Nat Commun 6:7391.

### Hydrodynamic Delivery

[0525] Hydrodynamic delivery may also be used for delivering the cargos, e.g., for in vivo delivery. In some examples, hydrodynamic delivery may be performed by rapidly pushing a large volume (8-10% body weight) solution containing the gene editing cargo into the bloodstream of a subject (e.g., an animal or human), e.g., for mice, via the tail vein. As blood is incompressible, the large bolus of liquid may result in an increase in hydrodynamic pressure that temporarily enhances permeability into endothelial and parenchymal cells, allowing for cargo not normally capable of crossing a cellular membrane to pass into cells. This approach may be used for delivering naked DNA plasmids and proteins. The delivered cargos may be enriched in liver, kidney, lung, muscle, and/or heart.

### Transfection

[0526] The cargos, e.g., nucleic acids, may be introduced to cells by transfection methods for introducing nucleic acids into cells. Examples of transfection methods include calcium phosphate-mediated transfection, cationic transfection, liposome transfection, dendrimer transfection, heat shock transfection, magnetofection, lipofection, impalefection, optical transfection, proprietary agent-enhanced uptake of nucleic acid.

### Delivery Vehicles

[0527] The delivery systems may comprise one or more delivery vehicles. The delivery vehicles may deliver the cargo into cells, tissues, organs, or organisms (e.g., animals or plants). The cargos may be packaged, carried, or otherwise associated with the delivery vehicles. The delivery vehicles may be selected based on the types of cargo to be delivered, and/or the delivery is in vitro and/or in vivo. Examples of delivery vehicles include vectors, viruses, non-viral vehicles, and other delivery reagents described herein.

[0528] The delivery vehicles in accordance with the present invention may have a greatest dimension (e.g., diameter) of less than 100 microns (μm). In one embodiment, the delivery vehicles have a greatest dimension of less than 10 μm. In one embodiment, the delivery vehicles may have a greatest dimension of less than 2000 nanometers (nm). In one embodiment, the delivery vehicles may have a greatest dimension of less than 1000 nanometers (nm). In one embodiment, the delivery vehicles may have a greatest dimension (e.g., diameter) of less than 900 nm, less than 800 nm, less than 700 nm, less than 600 nm, less than 500 nm, less than 400 nm, less than 300 nm, less than 200 nm, less than 150 nm, or less than 100 nm, less than 50 nm. In one embodiment, the delivery vehicles may have a greatest dimension ranging between 25 nm and 200 nm.

[0529] In one embodiment, the delivery vehicles may be or comprise particles. For example, the delivery vehicle may be or comprise nanoparticles (e.g., particles with a greatest dimension (e.g., diameter) no greater than 1000 nm. The particles may be provided in different forms, e.g., as solid particles (e.g., metal such as silver, gold, iron, titanium), non-metal, lipid-based solids, polymers), suspensions of particles, or combinations thereof. Metal, dielectric, and semiconductor particles may be prepared, as well as hybrid structures (e.g., core-shell particles). Nanoparticles may also be used to deliver the compositions and systems to plant cells, e.g., as described in International Patent Publication No. WO 2008042156, US Publication Application No. US20130185823, and International Patent Publication No WO 2015/089419.

### Vectors

[0530] The systems, compositions, and/or delivery systems may comprise one or more vectors. The present disclosure also includes vector systems. A vector system may comprise one or more vectors. In one embodiment, a vector refers to a nucleic acid molecule capable of transporting another nucleic acid to which it has been linked. Vectors include nucleic acid molecules that are single-stranded, double-stranded, or partially double-stranded; nucleic acid molecules that comprise one or more free ends, no free ends (e.g., circular); nucleic acid molecules that comprise DNA, RNA, or both; and other varieties of polynucleotides known in the art. A vector may be a plasmid, e.g., a circular double stranded DNA loop into which additional DNA segments can be inserted, such as by standard molecular cloning techniques. Certain vectors may be capable of autonomous replication in a host cell into which they are introduced (e.g., bacterial vectors having a bacterial origin of replication and episomal mammalian vectors). Some vectors (e.g., non-episomal mammalian vectors) are integrated into the genome of a host cell upon introduction into the host cell, and thereby are replicated along with the host genome. In certain examples, vectors may be expression vectors, e.g., capable of directing the expression of genes to which they are operatively-linked. In some cases, the expression vectors may be for expression in eukaryotic cells. Common expression vectors of utility in recombinant DNA techniques are often in the form of plasmids.

[0531] Examples of vectors include pGEX, pMAL, pRIT5, E. coli expression vectors (e.g., pTrc, pET 11d, yeast expression vectors (e.g., pYepSec1, pMFa, pJRY88, pYES2, and picZ, Baculovirus vectors (e.g., for expression in insect cells such as SF9 cells) (e.g., pAc series and the pVL series), mammalian expression vectors (e.g., pCDM8 and pMT2PC.

[0532] A vector may comprise i) one or more protein components encoding sequence(s), and/or ii) a single, or at least 2, at least 3, at least 4, at least 5, at least 6, at least 7, at least 8, at least 9, at least 10, at least 12, at least 14, at least 16, at least 32, at least 48, at least 50 nucleic acid component molecule(s) encoding sequences. In a single vector there can be a promoter for each RNA coding sequence. Alternatively or additionally, in a single vector, there may be a promoter controlling (e.g., driving transcription and/or expression) multiple RNA encoding sequences.

[0533] Furthermore, that compositions or systems may be delivered via a vector, e.g., a separate vector or the same vector that is encoding the complex. When provided by a separate vector, the RNA that targets Fanzor polypeptide expression can be administered sequentially or simultaneously. When administered sequentially, the RNA that targets Fanzor polypeptide expression is to be delivered after the RNA that is intended for e.g., gene editing or gene engineering. This period may be a period of minutes (e.g., 5 minutes, 10 minutes, 20 minutes, 30 minutes, 45 minutes, 60 minutes). This period may be a period of hours (e.g., 2 hours, 4 hours, 6 hours, 8 hours, 12 hours, 24 hours). This period may be a period of days (e.g., 2 days, 3 days, 4 days, 7 days). This period may be a period of weeks (e.g., 2 weeks, 3 weeks, 4 weeks). This period may be a period of months (e.g., 2 months, 4 months, 8 months, 12 months). This period may be a period of years (2 years, 3 years, 4 years). In this fashion, the Fanzor polypeptide associates with a first nucleic acid component molecule capable of hybridizing to a first target, such as a genomic locus or loci of interest and undertakes the function(s) desired of the system (e.g., gene engineering); and subsequently the Fanzor polypeptide may then associate with the second nucleic acid component molecule capable of hybridizing to the sequence comprising at least part of the Fanzor polypeptide. Where the nucleic acid component molecule targets the sequences encoding expression of the Fanzor polypeptide, the enzyme becomes impeded and the system becomes self-inactivating. In the same manner, RNA that targets Fanzor polypeptide expression applied via, for example liposome, lipofection, particles, microvesicles as explained herein, may be administered sequentially or simultaneously. Similarly, self-inactivation may be used for inactivation of one or more nucleic acid component molecule used to target one or more targets.

### Regulatory Elements

[0534] A vector may comprise one or more regulatory elements. The regulatory element(s) may be operably linked to coding sequences of Fanzor polypeptide, accessory proteins, nucleic acid component scaffold and/or nucleic acid component molecule or combination thereof. The term “operably linked” is intended to mean that the nucleotide sequence of interest is linked to the regulatory element(s) in a manner that allows for expression of the nucleotide sequence (e.g., in an in vitro transcription/translation system or in a host cell when the vector is introduced into the host cell). In certain examples, a vector may comprise: a first regulatory element operably linked to a nucleotide sequence encoding a Fanzor polypeptide, and a second regulatory element operably linked to a nucleotide sequence encoding a nucleic acid component molecule.

[0535] Examples of regulatory elements include promoters, enhancers, internal ribosomal entry sites (IRES), and other expression control elements (e.g., transcription termination signals, such as polyadenylation signals and poly-U sequences). Such regulatory elements are described, for example, in Goeddel, GENE EXPRESSION TECHNOLOGY: METHODS IN ENZYMOLOGY 185, Academic Press, San Diego, Calif. (1990). Regulatory elements include those that direct constitutive expression of a nucleotide sequence in many types of host cell and those that direct expression of the nucleotide sequence only in certain host cells (e.g., tissue-specific regulatory sequences). A tissue-specific promoter may direct expression primarily in a desired tissue of interest, such as muscle, neuron, bone, skin, blood, specific organs (e.g., liver, pancreas), or particular cell types (e.g., lymphocytes). Regulatory elements may also direct expression in a temporal-dependent manner, such as in a cell-cycle dependent or developmental stage-dependent manner, which may or may not also be tissue or cell-type specific.

[0536] Examples of promoters include one or more pol III promoter (e.g., 1, 2, 3, 4, 5, or more pol III promoters), one or more pol II promoters (e.g., 1, 2, 3, 4, 5, or more pol II promoters), one or more pol I promoters (e.g., 1, 2, 3, 4, 5, or more pol I promoters), or combinations thereof. Examples of pol III promoters include, but are not limited to, U6 and H1 promoters. Examples of pol II promoters include, but are not limited to, the retroviral Rous sarcoma virus (RSV) LTR promoter (optionally with the RSV enhancer), the cytomegalovirus (CMV) promoter (optionally with the CMV enhancer), the SV40 promoter, the dihydrofolate reductase promoter, the β-actin promoter, the phosphoglycerol kinase (PGK) promoter, and the EF1α promoter.

### Viral Vectors

[0537] The cargos may be delivered by viruses. In one embodiment, viral vectors are used. A viral vector may comprise virally-derived DNA or RNA sequences for packaging into a virus (e.g., retroviruses, replication defective retroviruses, adenoviruses, replication defective adenoviruses, and adeno-associated viruses). Viral vectors also include polynucleotides carried by a virus for transfection into a host cell. Viruses and viral vectors may be used for in vitro, ex vivo, and/or in vivo deliveries.

### Adeno Associated Virus (AAV)

[0538] The systems and compositions herein may be delivered by adeno associated virus (AAV). AAV vectors may be used for such delivery. AAV, of the Dependovirus genus and Parvoviridae family, is a single stranded DNA virus. In one embodiment, AAV may provide a persistent source of the provided DNA, as AAV delivered genomic material can exist indefinitely in cells, e.g., either as exogenous DNA or, with some modification, be directly integrated into the host DNA. In one embodiment, AAV do not cause or relate with any diseases in humans. The virus itself is able to efficiently infect cells while provoking little to no innate or adaptive immune response or associated toxicity.

[0539] Examples of AAV that can be used herein include AAV-1, AAV-2, AAV-3, AAV-4, AAV-5, AAV-6, AAV-8, and AAV-9. The type of AAV may be selected with regard to the cells to be targeted; e.g., one can select AAV serotypes 1, 2, 5 or a hybrid capsid AAV1, AAV2, AAV5 or any combination thereof for targeting brain or neuronal cells; and one can select AAV4 for targeting cardiac tissue. AAV8 is useful for delivery to the liver. AAV-2-based vectors were originally proposed for CFTR delivery to CF airways, other serotypes such as AAV-1, AAV-5, AAV-6, and AAV-9 exhibit improved gene transfer efficiency in a variety of models of the lung epithelium. Examples of cell types targeted by AAV are described in Grimm, D. et al, J. Virol. 82:5887-5911 (2008)), and shown as follows in Table 3.

TABLE 3

| Cell Line | AAV-1 | AAV-2 | AAV-3 | AAV-4 | AAV-5 | AAV-6 | AAV-8 | AAV-9 |
|---|---|---|---|---|---|---|---|---|
| Huh-7 | 13 | 100 | 2.5 | 0.0 | 0.1 | 10 | 0.7 | 0.0 |
| HEK293 | 25 | 100 | 2.5 | 0.1 | 0.1 | 5 | 0.7 | 0.1 |
| HeLa | 3 | 100 | 2.0 | 0.1 | 6.7 | 1 | 0.2 | 0.1 |
| HepG2 | 3 | 100 | 16.7 | 0.3 | 1.7 | 5 | 0.3 | ND |
| Hep1A | 20 | 100 | 0.2 | 1.0 | 0.1 | 1 | 0.2 | 0.0 |
| 911 | 17 | 100 | 11 | 0.2 | 0.1 | 17 | 0.1 | ND |
| CHO | 100 | 100 | 14 | 1.4 | 333 | 50 | 10 | 1.0 |
| COS | 33 | 100 | 33 | 3.3 | 5.0 | 14 | 2.0 | 0.5 |
| MeWo | 10 | 100 | 20 | 0.3 | 6.7 | 10 | 1.0 | 0.2 |
| NIH3T3 | 10 | 100 | 2.9 | 2.9 | 0.3 | 10 | 0.3 | ND |
| A549 | 14 | 100 | 20 | ND | 0.5 | 10 | 0.5 | 0.1 |
| HT1180 | 20 | 100 | 10 | 0.1 | 0.3 | 33 | 0.5 | 0.1 |
| Monocytes | 1111 | 100 | ND | ND | 125 | 1429 | ND | ND |
| Immature DC | 2500 | 100 | ND | ND | 222 | 2857 | ND | ND |
| Mature DC | 2222 | 100 | ND | ND | 333 | 3333 | ND | ND |

[0540] The AAV particles may be created in HEK 293 T cells. Once particles with specific tropism have been created, they are used to infect the target cell line much in the same way that native viral particles do. This may allow for persistent presence of the components in the infected cell type, and what makes this version of delivery particularly suited to cases where long-term expression is desirable. Examples of doses and formulations for AAV that can be used include those describe in U.S. Pat. Nos. 8,454,972 and 8,404,658.

[0541] Various strategies may be used for delivery the systems and compositions herein with AAVs. In some examples, coding sequences of Fanzor polypeptide and nucleic acid component may be packaged directly onto one DNA plasmid vector and delivered via one AAV particle. In some examples, AAVs may be used to deliver nucleic acid components into cells that have been previously engineered to express Fanzor polypeptide. In some examples, coding sequences of Fanzor polypeptide and nucleic acid component may be made into two separate AAV particles, which are used for co-transfection of target cells. In some examples, markers, tags, and other sequences may be packaged in the same AAV particles as coding sequences of Fanzor polypeptide and/or nucleic acid components.

### Lentiviruses

[0542] The systems and compositions herein may be delivered by lentiviruses. Lentiviral vectors may be used for such delivery. Lentiviruses are complex retroviruses that have the ability to infect and express their genes in both mitotic and post-mitotic cells.

[0543] Examples of lentiviruses include human immunodeficiency virus (HIV), which may use its envelope glycoproteins of other viruses to target a broad range of cell types; minimal non-primate lentiviral vectors based on the equine infectious anemia virus (EIAV), which may be used for ocular therapies. In one embodiment, self-inactivating lentiviral vectors with an siRNA targeting a common exon shared by HIV tat/rev, a nucleolar-localizing TAR decoy, and an anti-CCR5-specific hammerhead ribozyme (see, e.g., DiGiusto et al. (2010) Sci Transl Med 2: 36ra43) may be used/and or adapted to the nucleic acid-targeting system herein.

[0544] Lentiviruses may be pseudo-typed with other viral proteins, such as the G protein of vesicular stomatitis virus. In doing so, the cellular tropism of the lentiviruses can be altered to be as broad or narrow as desired. In some cases, to improve safety, second- and third-generation lentiviral systems may split essential genes across three plasmids, which may reduce the likelihood of accidental reconstitution of viable viral particles within cells.

[0545] In some examples, leveraging the integration ability, lentiviruses may be used to create libraries of cells comprising various genetic modifications, e.g., for screening and/or studying genes and signaling pathways.

### Adenoviruses

[0546] The systems and compositions herein may be delivered by adenoviruses. Adenoviral vectors may be used for such delivery. Adenoviruses include nonenveloped viruses with an icosahedral nucleocapsid containing a double stranded DNA genome. Adenoviruses may infect dividing and non-dividing cells. In one embodiment, adenoviruses do not integrate into the genome of host cells, which may be used for limiting off-target effects of systems in gene editing applications.

### Viral Vehicles for Delivery to Plants

[0547] The systems and compositions may be delivered to plant cells using viral vehicles. In particular embodiments, the compositions and systems may be introduced in the plant cells using a plant viral vector (e.g., as described in Scholthof et al. 1996, Annu Rev Phytopathol. 1996; 34:299-323). Such viral vector may be a vector from a DNA virus, e.g., geminivirus (e.g., cabbage leaf curl virus, bean yellow dwarf virus, wheat dwarf virus, tomato leaf curl virus, maize streak virus, tobacco leaf curl virus, or tomato golden mosaic virus) or nanovirus (e.g., Faba bean necrotic yellow virus). The viral vector may be a vector from an RNA virus, e.g., tobravirus (e.g., tobacco rattle virus, tobacco mosaic virus), potexvirus (e.g., potato virus X), or hordeivirus (e.g., barley stripe mosaic virus). The replicating genomes of plant viruses may be non-integrative vectors.

### Non-Viral Vehicles

[0548] The delivery vehicles may comprise non-viral vehicles. In general, methods and vehicles capable of delivering nucleic acids and/or proteins may be used for delivering the systems compositions herein. Examples of non-viral vehicles include lipid nanoparticles, cell-penetrating peptides (CPPs), DNA nanoclews, gold nanoparticles, streptolysin O, multifunctional envelope-type nanodevices (MENDs), lipid-coated mesoporous silica particles, and other inorganic nanoparticles.

### Lipid Particles

[0549] The delivery vehicles may comprise lipid particles, e.g., lipid nanoparticles (LNPs) and liposomes.

### Lipid Nanoparticles (LNPs)

[0550] LNPs may encapsulate nucleic acids within cationic lipid particles (e.g., liposomes), and may be delivered to cells with relative ease. In some examples, lipid nanoparticles do not contain any viral components, which helps minimize safety and immunogenicity concerns. Lipid particles may be used for in vitro, ex vivo, and in vivo deliveries. Lipid particles may be used for various scales of cell populations.

[0551] In some examples. LNPs may be used for delivering DNA molecules (e.g., those comprising coding sequences of Fanzor polypeptide and/or nucleic acid component) and/or RNA molecules (e.g., mRNA of Fanzor polypeptide, nucleic acid component molecules). In certain cases, LNPs may be use for delivering RNP complexes of Fanzor polypeptide/nucleic acid component.

[0552] Components in LNPs may comprise cationic lipids 1,2-dilineoyl-3-dimethylammonium-propane (DLinDAP), 1,2-dilinoleyloxy-3-N,N-dimethylaminopropane (DLinDMA), 1,2-dilinoleyloxyketo-N,N-dimethyl-3-aminopropane (DLinK-DMA), 1,2-dilinoleyl-4-(2-dimethylaminoethyl)-[1,3]-dioxolane (DLinKC2-DMA), (3-O-[2″-(methoxypolyethyleneglycol 2000) succinoyl]-1,2-dimyristoyl-sn-glycol (PEG-S-DMG), R-3-[(ro-methoxy-poly(ethylene glycol) 2000) carbamoyl]-1,2-dimyristyloxlpropyl-3-amine (PEG-C-DOMG, and any combination thereof. Preparation of LNPs and encapsulation may be adapted from Rosin et al, Molecular Therapy, vol. 19, no. 12, pages 1286-220 Dec. 2011).

### Liposomes

[0553] In one embodiment, a lipid particle may be liposome. Liposomes are spherical vesicle structures composed of a uni- or multilamellar lipid bilayer surrounding internal aqueous compartments and a relatively impermeable outer lipophilic phospholipid bilayer. In one embodiment, liposomes are biocompatible, nontoxic, can deliver both hydrophilic and lipophilic drug molecules, protect their cargo from degradation by plasma enzymes, and transport their load across biological membranes and the blood brain barrier (BBB).

[0554] Liposomes can be made from several different types of lipids, e.g., phospholipids. A liposome may comprise natural phospholipids and lipids such as 1,2-distearoryl-sn-glycero-3-phosphatidyl choline (DSPC), sphingomyelin, egg phosphatidylcholines, monosialoganglioside, or any combination thereof.

[0555] Several other additives may be added to liposomes in order to modify their structure and properties. For instance, liposomes may further comprise cholesterol, sphingomyelin, and/or 1,2-dioleoyl-sn-glycero-3-phosphoethanolamine (DOPE), e.g., to increase stability and/or to prevent the leakage of the liposomal inner cargo.

### Stable Nucleic-Acid-Lipid Particles (SNALPs)

[0556] In one embodiment, the lipid particles may be stable nucleic acid lipid particles (SNALPs). SNALPs may comprise an ionizable lipid (DLinDMA) (e.g., cationic at low pH), a neutral helper lipid, cholesterol, a diffusible polyethylene glycol (PEG)-lipid, or any combination thereof. In some examples, SNALPs may comprise synthetic cholesterol, dipalmitoylphosphatidylcholine, 3-N-[(w-methoxy polyethylene glycol) 2000) carbamoyl]-1,2-dimyrestyloxypropylamine, and cationic 1,2-dilinoleyloxy-3-N,Ndimethylaminopropane. In some examples, SNALPs may comprise synthetic cholesterol, 1,2-distearoyl-sn-glycero-3-phosphocholine, PEG-CDMA, and 1,2-dilinoleyloxy-3-(N;N-dimethyl)aminopropane (DLinDMA).

### Other Lipids

[0557] The lipid particles may also comprise one or more other types of lipids, e.g., cationic lipids, such as amino lipid 2,2-dilinoleyl-4-dimethylaminoethyl-[1,3]-dioxolane (DLin-KC2-DMA), DLin-KC2-DMA4, C12-200 and colipids disteroylphosphatidyl choline, cholesterol, and PEG-DMG.

### Lipoplexes/Polyplexes

[0558] In one embodiment, the delivery vehicles comprise lipoplexes and/or polyplexes. Lipoplexes may bind to negatively charged cell membrane and induce endocytosis into the cells. Examples of lipoplexes may be complexes comprising lipid(s) and non-lipid components. Examples of lipoplexes and polyplexes include FuGENE-6 reagent, a non-liposomal solution containing lipids and other components, zwitterionic amino lipids (ZALs), Ca2p (e.g., forming DNA/Ca²⁺ microcomplexes), polyethenimine (PEI) (e.g., branched PEI), and poly (L-lysine) (PLL).

### Cell Penetrating Peptides

[0559] In one embodiment, the delivery vehicles comprise cell penetrating peptides (CPPs). CPPs are short peptides that facilitate cellular uptake of various molecular cargo (e.g., from nanosized particles to small chemical molecules and large fragments of DNA).

[0560] CPPs may be of different sizes, amino acid sequences, and charges. In some examples, CPPs can translocate the plasma membrane and facilitate the delivery of various molecular cargoes to the cytoplasm or an organelle. CPPs may be introduced into cells via different mechanisms, e.g., direct penetration in the membrane, endocytosis-mediated entry, and translocation through the formation of a transitory structure.

[0561] CPPs may have an amino acid composition that either contains a high relative abundance of positively charged amino acids such as lysine or arginine or has sequences that contain an alternating pattern of polar/charged amino acids and non-polar, hydrophobic amino acids. These two types of structures are referred to as polycationic or amphipathic, respectively. A third class of CPPs are the hydrophobic peptides, containing only apolar residues, with low net charge or have hydrophobic amino acid groups that are crucial for cellular uptake. Another type of CPPs is the trans-activating transcriptional activator (Tat) from Human Immunodeficiency Virus 1 (HIV-1). Examples of CPPs include to Penetratin, Tat (48-60), Transportan, and (R-AhX-R4) (Ahx refers to aminohexanoyl), Kaposi fibroblast growth factor (FGF) signal peptide sequence, integrin β3 signal peptide sequence, polyarginine peptide Args sequence, Guanine rich-molecular transporters, and sweet arrow peptide. Examples of CPPs and related applications also include those described in U.S. Pat. No. 8,372,951.

[0562] CPPs can be used for in vitro and ex vivo work quite readily, and extensive optimization for each cargo and cell type is usually required. In some examples, CPPs may be covalently attached to the Fanzor polypeptide directly, which is then complexed with the nucleic acid component and delivered to cells. In some examples, separate delivery of CPP-Fanzor and CPP-nucleic acid component to multiple cells may be performed. CPP may also be used to delivery RNPs.

[0563] CPPs may be used to deliver the compositions and systems to plants. In some examples, CPPs may be used to deliver the components to plant protoplasts, which are then regenerated to plant cells and further to plants.

### DNA Nanoclews

[0564] In one embodiment, the delivery vehicles comprise DNA nanoclews. A DNA nanoclew refers to a sphere-like structure of DNA (e.g., with a shape of a ball of yarn). The nanoclew may be synthesized by rolling circle amplification with palindromic sequences that aide in the self-assembly of the structure. The sphere may then be loaded with a payload. An example of DNA nanoclew is described in Sun W et al, J Am Chem Soc. 2014 Oct. 22;136 (42): 14722-5; and Sun W et al, Angew Chem Int Ed Engl. 2015 Oct. 5;54 (41): 12029-33. DNA nanoclew may have a palindromic sequences to be partially complementary to the nucleic acid component molecule within the Fanzor polypeptide: nucleic acid component ribonucleoprotein complex. A DNA nanoclew may be coated, e.g., coated with PEI to induce endosomal escape.

### Gold Nanoparticles

[0565] In one embodiment, the delivery vehicles comprise gold nanoparticles (also referred to AuNPs or colloidal gold). Gold nanoparticles may form complex with cargos, e.g., Fanzor polypeptide: nucleic acid component RNP. Gold nanoparticles may be coated, e.g., coated in a silicate and an endosomal disruptive polymer, PAsp (DET). Examples of gold nanoparticles include AuraSense Therapeutics' Spherical Nucleic Acid (SNA™) constructs, and those described in Mout R, et al. (2017). ACS Nano 11:2452-8; Lee K, et al. (2017). Nat Biomed Eng 1:889-901.

iTOP

[0566] In one embodiment, the delivery vehicles comprise iTOP. iTOP refers to a combination of small molecules drives the highly efficient intracellular delivery of native proteins, independent of any transduction peptide. iTOP may be used for induced transduction by osmocytosis and propanebetaine, using NaCl-mediated hyperosmolality together with a transduction compound (propanebetaine) to trigger macropinocytotic uptake into cells of extracellular macromolecules. Examples of iTOP methods and reagents include those described in D′Astolfo D S, Pagliero R J, Pras A, et al. (2015). Cell 161:674-690.

### Polymer-Based Particles

[0567] In one embodiment, the delivery vehicles may comprise polymer-based particles (e.g., nanoparticles). In one embodiment, the polymer-based particles may mimic a viral mechanism of membrane fusion. The polymer-based particles may be a synthetic copy of Influenza virus machinery and form transfection complexes with various types of nucleic acids ((siRNA, miRNA, plasmid DNA or snucleic acid component, mRNA) that cells take up via the endocytosis pathway, a process that involves the formation of an acidic compartment. The low pH in late endosomes acts as a chemical switch that renders the particle surface hydrophobic and facilitates membrane crossing. Once in the cytosol, the particle releases its payload for cellular action. This Active Endosome Escape technology is safe and maximizes transfection efficiency as it is using a natural uptake pathway. In one embodiment, the polymer-based particles may comprise alkylated and carboxyalkylated branched polyethylenimine. In some examples, the polymer-based particles are VIROMER, e.g., VIROMER RNAi, VIROMER RED, VIROMER mRNA. Example methods of delivering the systems and compositions herein include those described in Bawage S S et al., Synthetic mRNA expressed Cas13a mitigates RNA virus infections, www.biorxiv.org/content/10.1101/370460v1.full doi: doi.org/10.1101/370460, Viromer® RED, a powerful tool for transfection of keratinocytes. doi: 10.13140/RG.2.2.16993.61281, Viromer® Transfection-Factbook 2018: technology, product overview, users' data., doi: 10.13140/RG.2.2.23912.16642.

### Streptolysin O (SLO)

[0568] The delivery vehicles may be streptolysin O (SLO). SLO is a toxin produced by Group A streptococci that works by creating pores in mammalian cell membranes. SLO may act in a reversible manner, which allows for the delivery of proteins (e.g., up to 100 kDa) to the cytosol of cells without compromising overall viability. Examples of SLO include those described in Sierig G, et al. (2003). Infect Immun 71:446-55; Walev I, et al. (2001). Proc Natl Acad Sci USA 98:3185-90; Teng K W, et al. (2017). Elife 6: e25460.

### Multifunctional Envelope-Type Nanodevice (MEND)

[0569] The delivery vehicles may comprise multifunctional envelope-type nanodevice (MENDs). MENDs may comprise condensed plasmid DNA, a PLL core, and a lipid film shell. A MEND may further comprise cell-penetrating peptide (e.g., stearyl octaarginine). The cell penetrating peptide may be in the lipid shell. The lipid envelope may be modified with one or more functional components, e.g., one or more of: polyethylene glycol (e.g., to increase vascular circulation time), ligands for targeting of specific tissues/cells, additional cell-penetrating peptides (e.g., for greater cellular delivery), lipids to enhance endosomal escape, and nuclear delivery tags. In some examples, the MEND may be a tetra-lamellar MEND (T-MEND), which may target the cellular nucleus and mitochondria. In certain examples, a MEND may be a PEG-peptide-DOPE-conjugated MEND (PPD-MEND), which may target bladder cancer cells. Examples of MENDs include those described in Kogure K, et al. (2004). J Control Release 98:317-23; Nakamura T, et al. (2012). Acc Chem Res 45:1113-21.

### Lipid-Coated Mesoporous Silica Particles

[0570] The delivery vehicles may comprise lipid-coated mesoporous silica particles. Lipid-coated mesoporous silica particles may comprise a mesoporous silica nanoparticle core and a lipid membrane shell. The silica core may have a large internal surface area, leading to high cargo loading capacities. In one embodiment, pore sizes, pore chemistry, and overall particle sizes may be modified for loading different types of cargos. The lipid coating of the particle may also be modified to maximize cargo loading, increase circulation times, and provide precise targeting and cargo release. Examples of lipid-coated mesoporous silica particles include those described in Du X, et al. (2014). Biomaterials 35:5580-90; Durfee P N, et al. (2016). ACS Nano 10:8325-45.

### Inorganic Nanoparticles

[0571] The delivery vehicles may comprise inorganic nanoparticles. Examples of inorganic nanoparticles include carbon nanotubes (CNTs) (e.g., as described in Bates K and Kostarelos K. (2013). Adv Drug Deliv Rev 65:2023-33.), bare mesoporous silica nanoparticles (MSNPs) (e.g., as described in Luo G F, et al. (2014). Sci Rep 4:6064), and dense silica nanoparticles (SiNPs) (as described in Luo D and Saltzman WM. (2000). Nat Biotechnol 18:893-5).

### Exosomes

[0572] The delivery vehicles may comprise exosomes. Exosomes include membrane bound extracellular vesicles, which can be used to contain and delivery various types of biomolecules, such as proteins, carbohydrates, lipids, and nucleic acids, and complexes thereof (e.g., RNPs). Examples of exosomes include those described in Schroeder A, et al., J Intern Med. 2010 January;267 (1): 9-21; El-Andaloussi S, et al., Nat Protoc. 2012 December;7 (12): 2112-26; Uno Y, et al., Hum Gene Ther. 2011 June;22 (6): 711-9; Zou W, et al., Hum Gene Ther. 2011 April;22 (4): 465-75.

[0573] In some examples, the exosome may form a complex (e.g., by binding directly or indirectly) to one or more components of the cargo. In certain examples, a molecule of an exosome may be fused with first adapter protein and a component of the cargo may be fused with a second adapter protein. The first and the second adapter protein may specifically bind each other, thus associating the cargo with the exosome. Examples of such exosomes include those described in Ye Y, et al., Biomater Sci. 2020 Apr. 28. doi: 10.1039/d0bm00427h.

### Retrovirus Like Delivery Systems

[0574] The delivery vehicle may comprise a retro-virus like protein, such as PEG10, which is capable of incorporating a cargo into a virus-like particle. As such systems can be re-programmed to package specific cargos, polynucleotides encoding components of the Fanzor systems disclosed herein may be further modified with a recognition sequence that leads to selective packaging of the Fanzor components into such retro-virus like VLPs. Said VLPs may be further modified with fusogenic proteins that impart tissue or cell specificity. Example systems are disclosed in Segal et al. Mammalian retrovirus-like protein PEG10 packages its own mRNA and can be pseudotyped for mRNA delivery. 373 Science, 882-889 (2021), which is incorporated herein by reference.

### Genetically Modified Cells and Organisms

[0575] The present disclosure further provides cells comprising one or more components of the compositions and systems herein, e.g., the Fanzor polypeptide and/or nucleic acid component(s). Also provided include cells modified by the systems and methods herein, and cell cultures, tissues, organs, organism comprising such cells or progeny thereof. In one embodiment, the present disclosure provides a method of modifying a cell or organism. The cell may be a prokaryotic cell or a eukaryotic cell. The cell may be a mammalian cell. The mammalian cell many be a non-human primate, bovine, porcine, rodent or mouse cell. The cell may be a non-mammalian eukaryotic cell such as poultry, fish or shrimp. The cell may be a therapeutic T cell or antibody-producing B-cell. The cell may also be a plant cell. The plant cell may be of a crop plant such as cassava, corn, sorghum, wheat, or rice. The plant cell may also be of an algae, tree or vegetable. The modification introduced to the cell by the present invention may be such that the cell and progeny of the cell are altered for improved production of biologic products such as an antibody, starch, alcohol or other desired cellular output. The modification introduced to the cell by the present invention may be such that the cell and progeny of the cell include an alteration that changes the biologic product produced.

[0576] In one embodiment, one or more polynucleotide molecules, vectors, or vector systems driving expression of one or more elements of the compositions, systems, or delivery systems comprising one or more elements of the nucleic acid-targeting system are introduced into a host cell such that expression of the elements of the nucleic acid-targeting system direct formation of a nucleic acid-targeting complex at one or more target sites. In one embodiment of the invention the host cell may be a eukaryotic cell, a prokaryotic cell, or a plant cell.

[0577] In particular embodiments, the host cell is a cell of a cell line. Cell lines are available from a variety of sources known to those with skill in the art (see, e.g., the American Type Culture Collection (ATCC) (Manassas, Va.)). In one embodiment, a cell transfected with one or more vectors described herein is used to establish a new cell line comprising one or more vector-derived sequences. In one embodiment, a cell transiently transfected with the components of a system as described herein (such as by transient transfection of one or more vectors, or transfection with RNA), and modified through the activity of a complex, is used to establish a new cell line comprising cells containing the modification but lacking any other exogenous sequence. In one embodiment, cells transiently or non-transiently transfected with one or more vectors described herein, or cell lines derived from such cells are used in assessing one or more test compounds.

[0578] Further intended are isolated human cells or tissues, plants or non-human animals comprising one or more of the polynucleotide molecules, vectors, vector systems, or cells described in any of the embodiments herein. In an aspect, host cells and cell lines modified by or comprising the compositions, systems or modified enzymes of present invention are provided, including (isolated) stem cells, and progeny thereof.

[0579] In one embodiment, the plants or non-human animals comprise at least one of the system components, polynucleotide molecules, vectors, vector systems, or cells described in any of the embodiments herein at least one tissue type of the plant or non-human animal. In one embodiment, non-human animals comprise at least one of the system components, polynucleotide molecules, vectors, vector systems, or cells described in any of the embodiments herein in at least one tissue type. In one embodiment, the presence of the system components is transient, in that they are degraded over time. In one embodiment, expression of the components of the systems and compositions described in any of the embodiments comprised in polynucleotide molecules, vectors, vector systems, or cells is limited to certain tissue types or regions in the plant or non-human animal. In one embodiment, the expression of the components of the systems and compositions described in any of the embodiments comprised in polynucleotide molecules, vectors, vector systems, or cells is dependent of a physiological cue. In one embodiment, expression of the components of the systems and compositions described in any of the embodiments comprised in polynucleotide molecules, vectors, vector systems, or cells may be triggered by an exogenous molecule. In one embodiment, expression of the components of the systems and compositions described in any of the embodiments comprised in polynucleotide molecules, vectors, vector systems, or cells is dependent on the expression of a non-Fanzor molecule in the plant or non-human animal.

### Pharmaceutical Formulations

[0580] Also described herein are pharmaceutical formulations that can contain an amount, effective amount, and/or least effective amount, and/or therapeutically effective amount of one or more compounds, molecules, compositions, vectors, vector systems, cells, or a combination thereof (which are also referred to as the primary active agent or ingredient elsewhere herein) described in greater detail elsewhere herein and a pharmaceutically acceptable carrier or excipient. As used herein, “pharmaceutical formulation” refers to the combination of an active agent, compound, or ingredient with a pharmaceutically acceptable carrier or excipient, making the composition suitable for diagnostic, therapeutic, or preventive use in vitro, in vivo, or ex vivo. As used herein, “pharmaceutically acceptable carrier or excipient” refers to a carrier or excipient that is useful in preparing a pharmaceutical formulation that is generally safe, non-toxic, and is neither biologically or otherwise undesirable, and includes a carrier or excipient that is acceptable for veterinary use as well as human pharmaceutical use. A “pharmaceutically acceptable carrier or excipient” as used in the specification and claims includes both one and more than one such carrier or excipient. When present, the compound can optionally be present in the pharmaceutical formulation as a pharmaceutically acceptable salt. In some embodiments, the pharmaceutical formulation can include, such as an active ingredient, a Fanzor system or component thereof described in greater detail elsewhere herein. In some embodiments, the pharmaceutical formulation can include, such as an active ingredient, a Fanzor polynucleotide described in greater detail elsewhere herein. In some embodiments, the pharmaceutical formulation can include, such as an active ingredient one or more modified cells, such as one or more modified cells described in greater detail elsewhere herein.

[0581] In some embodiments, the active ingredient is present as a pharmaceutically acceptable salt of the active ingredient. As used herein, “pharmaceutically acceptable salt” refers to any acid or base addition salt whose counter-ions are non-toxic to the subject to which they are administered in pharmaceutical doses of the salts. Suitable salts include, hydrobromide, iodide, nitrate, bisulfate, phosphate, isonicotinate, lactate, salicylate, acid citrate, tartrate, oleate, tannate, pantothenate, bitartrate, ascorbate, succinate, maleate, gentisinate, fumarate, gluconate, glucaronate, saccharate, formate, benzoate, glutamate, methanesulfonate, ethanesulfonate, benzenesulfonate, p-toluenesulfonate, camphorsulfonate, napthalenesulfonate, propionate, malonate, mandelate, malate, phthalate, and pamoate.

[0582] The pharmaceutical formulations described herein can be administered to a subject in need thereof via any suitable method or route to a subject in need thereof. Suitable administration routes can include, but are not limited to auricular (otic), buccal, conjunctival, cutaneous, dental, electro-osmosis, endocervical, endosinusial, endotracheal, enteral, epidural, extra-amniotic, extracorporeal, hemodialysis, infiltration, interstitial, intra-abdominal, intra-amniotic, intra-arterial, intra-articular, intrabiliary, intrabronchial, intrabursal, intracardiac, intracartilaginous, intracaudal, intracavernous, intracavitary, intracerebral, intracisternal, intracorneal, intracoronal (dental), intracoronary, intracorporus cavernosum, intradermal, intradiscal, intraductal, intraduodenal, intradural, intraepidermal, intraesophageal, intragastric, intragingival, intraileal, intralesional, intraluminal, intralymphatic, intramedullary, intrameningeal, intramuscular, intraocular, intraovarian, intrapericardial, intraperitoneal, intrapleural, intraprostatic, intrapulmonary, intrasinal, intraspinal, intrasynovial, intratendinous, intratesticular, intrathecal, intrathoracic, intratubular, intratumor, intratympanic, intrauterine, intravascular, intravenous, intravenous bolus, intravenous drip, intraventricular, intravesical, intravitreal, iontophoresis, irrigation, laryngeal, nasal, nasogastric, occlusive dressing technique, ophthalmic, oral, oropharyngeal, other, parenteral, percutaneous, periarticular, peridural, perineural, periodontal, rectal, respiratory (inhalation), retrobulbar, soft tissue, subarachnoid, subconjunctival, subcutaneous, sublingual, submucosal, topical, transdermal, transmucosal, transplacental, transtracheal, transtympanic, ureteral, urethral, and/or vaginal administration, and/or any combination of the above administration routes, which typically depends on the disease to be treated and/or the active ingredient(s).

[0583] Where appropriate, compounds, molecules, compositions, vectors, vector systems, cells, or a combination thereof described in greater detail elsewhere herein can be provided to a subject in need thereof as an ingredient, such as an active ingredient or agent, in a pharmaceutical formulation. As such, also described are pharmaceutical formulations containing one or more of the compounds and salts thereof, or pharmaceutically acceptable salts thereof described herein. Suitable salts include, hydrobromide, iodide, nitrate, bisulfate, phosphate, isonicotinate, lactate, salicylate, acid citrate, tartrate, oleate, tannate, pantothenate, bitartrate, ascorbate, succinate, maleate, gentisinate, fumarate, gluconate, glucaronate, saccharate, formate, benzoate, glutamate, methanesulfonate, ethanesulfonate, benzenesulfonate, p-toluenesulfonate, camphorsulfonate, napthalenesulfonate, propionate, malonate, mandelate, malate, phthalate, and pamoate.

[0584] In some embodiments, the subject in need thereof has or is suspected of having a genetic or epigenetic disease or condition. In some embodiments, the subject in need thereof has or is suspected of having a hematopoietic disease or a symptom thereof. In some embodiments, the subject in need thereof has or is suspected of having, a neurobiological disease or disorder, a psychiatric disease or disorder, a cancer, an autoimmune or immune disease or disorder, a thrombosis disease, a heart disease, a kidney disease, a lung disease, a brain disease, a musculoskeletal disease, a bone disease, a muscle disease, a pancreatic disease, a liver disease, an intestinal disease, a stomach disease, an esophageal disease, an ear disease, an oral disease, a skin disease, a nose or sinus disease, or a blood vessel disease, or any combination thereof. Exemplary diseases are described elsewhere herein. As used herein, “agent” refers to any substance, compound, molecule, and the like, which can be biologically active or otherwise can induce a biological and/or physiological effect on a subject to which it is administered to. As used herein, “active agent” or “active ingredient” refers to a substance, compound, or molecule, which is biologically active or otherwise, induces a biological or physiological effect on a subject to which it is administered to. In other words, “active agent” or “active ingredient” refers to a component or components of a composition to which the whole or part of the effect of the composition is attributed. An agent can be a primary active agent, or in other words, the component(s) of a composition to which the whole or part of the effect of the composition is attributed. An agent can be a secondary agent, or in other words, the component(s) of a composition to which an additional part and/or other effect of the composition is attributed.

### Pharmaceutically Acceptable Carriers and Secondary Ingredients and Agents

[0585] The pharmaceutical formulation can include a pharmaceutically acceptable carrier. Suitable pharmaceutically acceptable carriers include, but are not limited to water, salt solutions, alcohols, gum arabic, vegetable oils, benzyl alcohols, polyethylene glycols, gelatin, carbohydrates such as lactose, amylose or starch, magnesium stearate, talc, silicic acid, viscous paraffin, perfume oil, fatty acid esters, hydroxy methylcellulose, and polyvinyl pyrrolidone, which do not deleteriously react with the active composition.

[0586] The pharmaceutical formulations can be sterilized, and if desired, mixed with agents, such as lubricants, preservatives, stabilizers, wetting agents, emulsifiers, salts for influencing osmotic pressure, buffers, coloring, flavoring and/or aromatic substances, and the like which do not deleteriously react with the active compound.

[0587] In some embodiments, the pharmaceutical formulation can also include an effective amount of secondary active agents, including but not limited to, biologic agents or molecules including, but not limited to, e.g., polynucleotides, amino acids, peptides, polypeptides, antibodies, aptamers, ribozymes, hormones, immunomodulators, antipyretics, anxiolytics, antipsychotics, analgesics, antispasmodics, anti-inflammatoireanti-histamines, anti-infectives, chemotherapeutics, and combinations thereof.

### Effective Amounts

[0588] In some embodiments, the amount of the primary active agent and/or optional secondary agent can be an effective amount, least effective amount, and/or therapeutically effective amount. As used herein, “effective amount” refers to the amount of the primary and/or optional secondary agent included in the pharmaceutical formulation that achieve one or more therapeutic effects or desired effect. As used herein, “least effective” amount refers to the lowest amount of the primary and/or optional secondary agent that achieves the one or more therapeutic or other desired effects. As used herein, “therapeutically effective amount” refers to the amount of the primary and/or optional secondary agent included in the pharmaceutical formulation that achieves one or more therapeutic effects. In some embodiments, the one or more therapeutic effects are to modify one or more polynucleotides.

[0589] The effective amount, least effective amount, and/or therapeutically effective amount of the primary and optional secondary active agent described elsewhere herein contained in the pharmaceutical formulation can be any non-zero amount ranging from about 0 to 10, 20, 30, 40, 50, 60, 70, 80, 90, 100, 110, 120, 130, 140, 150, 160, 170, 180, 190, 200, 210, 220, 230, 240, 250, 260, 270, 280, 290, 300, 310, 320, 330, 340, 350, 360, 370, 380, 390, 400, 410, 420, 430, 440, 450, 460, 470, 480, 490, 500, 510, 520, 530, 540, 550, 560, 570, 580, 590, 600, 610, 620, 630, 640, 650, 660, 670, 680, 690, 700, 710, 720, 730, 740, 750, 760, 770, 780, 790, 800, 810, 820, 830, 840, 850, 860, 870, 880, 890, 900, 910, 920, 930, 940, 950, 960, 970, 980, 990, 1000 pg, ng, μg, mg, or g or be any numerical value or subrange within any of these ranges.

[0590] In some embodiments, the effective amount, least effective amount, and/or therapeutically effective amount can be an effective concentration, least effective concentration, and/or therapeutically effective concentration, which can each be any non-zero amount ranging from about 0 to 10, 20, 30, 40, 50, 60, 70, 80, 90, 100, 110, 120, 130, 140, 150, 160, 170, 180, 190, 200, 210, 220, 230, 240, 250, 260, 270, 280, 290, 300, 310, 320, 330, 340, 350, 360, 370, 380, 390, 400, 410, 420, 430, 440, 450, 460, 470, 480, 490, 500, 510, 520, 530, 540, 550, 560, 570, 580, 590, 600, 610, 620, 630, 640, 650, 660, 670, 680, 690, 700, 710, 720, 730, 740, 750, 760, 770, 780, 790, 800, 810, 820, 830, 840, 850, 860, 870, 880, 890, 900, 910, 920, 930, 940, 950, 960, 970, 980, 990, 1000 pM, nM, uM, mM, or M or be any numerical value or subrange within any of these ranges.

[0591] In other embodiments, the effective amount, least effective amount, and/or therapeutically effective amount of the primary and optional secondary active agent be any non-zero amount ranging from about 0 to 10, 20, 30, 40, 50, 60, 70, 80, 90, 100, 110, 120, 130, 140, 150, 160, 170, 180, 190, 200, 210, 220, 230, 240, 250, 260, 270, 280, 290, 300, 310, 320, 330, 340, 350, 360, 370, 380, 390, 400, 410, 420, 430, 440, 450, 460, 470, 480, 490, 500, 510, 520, 530, 540, 550, 560, 570, 580, 590, 600, 610, 620, 630, 640, 650, 660, 670, 680, 690, 700, 710, 720, 730, 740, 750, 760, 770, 780, 790, 800, 810, 820, 830, 840, 850, 860, 870, 880, 890, 900, 910, 920, 930, 940, 950, 960, 970, 980, 990, 1000 IU or be any numerical value or subrange within any of these ranges.

[0592] In some embodiments, the primary and/or the optional secondary active agent present in the pharmaceutical formulation can be any non-zero amount ranging from about 0 to 0.001, 0.002, 0.003, 0.004, 0.005, 0.006, 0.007, 0.008, 0.009, 0.01, 0.02, 0.03, 0.04, 0.05, 0.06, 0.07, 0.08, 0.09, 0.1, 0.11, 0.12, 0.13, 0.14, 0.15, 0.16, 0.17, 0.18, 0.19, 0.2, 0.21, 0.22, 0.23, 0.24, 0.25, 0.26, 0.27, 0.28, 0.29, 0.3, 0.31, 0.32, 0.33, 0.34, 0.35, 0.36, 0.37, 0.38, 0.39, 0.4, 0.41, 0.42, 0.43, 0.44, 0.45, 0.46, 0.47, 0.48, 0.49, 0.5, 0.51, 0.52, 0.53, 0.54, 0.55, 0.56, 0.57, 0.58, 0.59, 0.6, 0.61, 0.62, 0.63, 0.64, 0.65, 0.66, 0.67, 0.68, 0.69, 0.7, 0.71, 0.72, 0.73, 0.74, 0.75, 0.76, 0.77, 0.78, 0.79, 0.8, 0.81, 0.82, 0.83, 0.84, 0.85, 0.86, 0.87, 0.88, 0.89, 0.9, 0.91, 0.92, 0.93, 0.94, 0.95, 0.96, 0.97, 0.98, 0.9, to 1, 2, 3, 4, 5, 6, 7, 8, 9, 10, 11, 12, 13, 14, 15, 16, 17, 18, 19, 20, 21, 22, 23, 24, 25, 26, 27, 28, 29, 30, 31, 32, 33, 34, 35, 36, 37, 38, 39, 40, 41, 42, 43, 44, 45, 46, 47, 48, 49, 50, 51, 52, 53, 54, 55, 56, 57, 58, 59, 60, 61, 62, 63, 64, 65, 66, 67, 68, 69, 70, 71, 72, 73, 74, 75, 76, 77, 78, 79, 80, 81, 82, 83, 84, 85, 86, 87, 88, 89, 90, 91, 92, 93, 94, 95, 96, 97, 98, 99, 99.1, 99.2, 99.3, 99.4, 99.5, 99.6, 99.7, 99.8, 99.9% w/w, v/v, or w/v of the pharmaceutical formulation or be any numerical value or subrange within any of these ranges.

[0593] In some embodiments where a cell or cell population is present in the pharmaceutical formulation (e.g., as a primary and/or or secondary active agent), the effective amount of cells can be any amount ranging from about 1 or 2 cells to 1×10¹/mL, 1×10²⁰/mL or more, such as about 1×10¹/mL, 1×10²/mL, 1×10³/mL, 1×10⁴/mL, 1×10⁵/mL, 1×10⁶/mL, 1×10⁷/mL, 1×10⁸/mL, 1×10⁹/mL, 1×10¹⁰/mL, 1×10¹¹/mL, 1×10¹²/mL, 1×10¹³/mL, 1×10¹⁴/mL, 1×10¹⁵/mL, 1×10¹⁶/mL, 1×10¹⁷/mL, 1×10¹⁸/mL, 1×10¹⁹/mL, to/or about 1×10²⁰/mL or any numerical value or subrange within any of these ranges.

[0594] In some embodiments, the amount or effective amount, particularly where an infective particle is being delivered (e.g., a virus particle having the primary or secondary agent as a cargo), the effective amount of virus particles can be expressed as a titer (plaque forming units per unit of volume) or as a MOI (multiplicity of infection). In some embodiments, the effective amount can be about 1×10¹ particles per pL, nL, μL, mL, or L to 1×10²⁰/particles per pL, nL, μL, mL, or L or more, such as about 1×10¹, 1×10², 1×10³, 1×10⁴, 1×10⁵, 1×10⁶, 1×10⁷, 1×10⁸, 1×10⁹, 1×10¹⁰, 1×10¹¹, 1×10¹², 1×10¹³, 1×10¹⁴, 1×10¹⁵, 1×10¹⁶, 1×10^{17 1}×10¹⁸, 1×10¹⁹, to/or about 1×10²⁰ particles per pL, nL, μL, mL, or L. In some embodiments, the effective titer can be about 1×10¹ transforming units per pL, nL, μL, mL, or L to 1×10²⁰/transforming units per pL, nL, μL, mL, or L or more, such as about 1×10¹, 1×10², 1×10³, 1×10⁴, 1×10⁵, 1×10⁶, 1×10⁷, 1×10⁸, 1×10⁹, 1×10¹⁰, 1×10¹¹, 1×10¹², 1×10¹³, 1×10^{14 1}×10¹⁵, 1×10¹⁶, 1×10¹⁷, 1×10¹⁸, 1×10¹⁹, to/or about 1×10²⁰ transforming units per pL, nL, μL, mL, or L or any numerical value or subrange within these ranges. In some embodiments, the MOI of the pharmaceutical formulation can range from about 0.1 to 10 or more, such as 0.1, 0.2, 0.3, 0.4, 0.5, 0.6, 0.7, 0.8, 0.9, 1, 1.1, 1.2, 1.3, 1.4, 1.5, 1.6, 1.7, 1.8, 1.9, 2, 2.1, 2.2, 2.3, 2.4, 2.5, 2.6, 2.7, 2.8, 2.9, 3, 3.1, 3.2, 3.3, 3.4, 3.5, 3.6, 3.7, 3.8, 3.9, 4, 4.1, 4.2, 4.3, 4.4, 4.5, 4.6, 4.7, 4.8, 4.9, 5, 5.1, 5.2, 5.3, 5.4, 5.5, 5.6, 5.7, 5.8, 5.9, 6, 6.1, 6.2, 6.3, 6.4, 6.5, 6.6, 6.7, 6.8, 6.9, 7, 7.1, 7.2, 7.3, 7.4, 7.5, 7.6, 7.7, 7.8, 7.9, 8, 8.1, 8.2, 8.3, 8.4, 8.5, 8.6, 8.7, 8.8, 8.9, 9, 9.1, 9.2, 9.3, 9.4, 9.5, 9.6, 9.7, 9.8, 9.9, 10 or more or any numerical value or subrange within these ranges.

[0595] In some embodiments, the amount or effective amount of the one or more of the active agent(s) described herein contained in the pharmaceutical formulation can range from about 1 μg/kg to about 10 mg/kg based upon the bodyweight of the subject in need thereof or average bodyweight of the specific patient population to which the pharmaceutical formulation can be administered.

[0596] In embodiments where there is a secondary agent contained in the pharmaceutical formulation, the effective amount of the secondary active agent will vary depending on the secondary agent, the primary agent, the administration route, subject age, disease, stage of disease, among other things, which will be one of ordinary skill in the art.

[0597] When optionally present in the pharmaceutical formulation, the secondary active agent can be included in the pharmaceutical formulation or can exist as a stand-alone compound or pharmaceutical formulation that can be administered contemporaneously or sequentially with the compound, derivative thereof, or pharmaceutical formulation thereof.

[0598] In some embodiments, the effective amount of the secondary active agent, when optionally present, is any non-zero amount ranging from about 0 to 1, 2, 3, 4, 5, 6, 7, 8, 9, 10, 11, 12, 13, 14, 15, 16, 17, 18, 19, 20, 21, 22, 23, 24, 25, 26, 27, 28, 29, 30, 31, 32, 33, 34, 35, 36, 37, 38, 39, 40, 41, 42, 43, 44, 45, 46, 47, 48, 49, 50, 51, 52, 53, 54, 55, 56, 57, 58, 59, 60, 61, 62, 63, 64, 65, 66, 67, 68, 69, 70, 71, 72, 73, 74, 75, 76, 77, 78, 79, 80, 81, 82, 83, 84, 85, 86, 87, 88, 89, 90, 91, 92, 93, 94, 95, 96, 97, 98, 99, 99.1, 99.2, 99.3, 99.4, 99.5, 99.6, 99.7, 99.8, 99.9% w/w, v/v, or w/v of the total active agents present in the pharmaceutical formulation or any numerical value or subrange within these ranges. In additional embodiments, the effective amount of the secondary active agent is any non-zero amount ranging from about 0 to 1, 2, 3, 4, 5, 6, 7, 8, 9, 10, 11, 12, 13, 14, 15, 16, 17, 18, 19, 20, 21, 22, 23, 24, 25, 26, 27, 28, 29, 30, 31, 32, 33, 34, 35, 36, 37, 38, 39, 40, 41, 42, 43, 44, 45, 46, 47, 48, 49, 50, 51, 52, 53, 54, 55, 56, 57, 58, 59, 60, 61, 62, 63, 64, 65, 66, 67, 68, 69, 70, 71, 72, 73, 74, 75, 76, 77, 78, 79, 80, 81, 82, 83, 84, 85, 86, 87, 88, 89, 90, 91, 92, 93, 94, 95, 96, 97, 98, 99, 99.1, 99.2, 99.3, 99.4, 99.5, 99.6, 99.7, 99.8, 99.9% w/w, v/v, or w/v of the total pharmaceutical formulation or any numerical value or subrange within these ranges.

### Dosage Forms

[0599] In some embodiments, the pharmaceutical formulations described herein can be provided in a dosage form. The dosage form can be administered to a subject in need thereof. The dosage form can be effective generate specific concentration, such as an effective concentration, at a given site in the subject in need thereof. As used herein, “dose,” “unit dose,” or “dosage” can refer to physically discrete units suitable for use in a subject, each unit containing a predetermined quantity of the primary active agent, and optionally present secondary active ingredient, and/or a pharmaceutical formulation thereof calculated to produce the desired response or responses in association with its administration. In some embodiments, the given site is proximal to the administration site. In some embodiments, the given site is distal to the administration site. In some cases, the dosage form contains a greater amount of one or more of the active ingredients present in the pharmaceutical formulation than the final intended amount needed to reach a specific region or location within the subject to account for loss of the active components such as via first and second pass metabolism.

[0600] The dosage forms can be adapted for administration by any appropriate route. Appropriate routes include, but are not limited to, oral (including buccal or sublingual), rectal, intraocular, inhaled, intranasal, topical (including buccal, sublingual, or transdermal), vaginal, parenteral, subcutaneous, intramuscular, intravenous, internasal, and intradermal. Other appropriate routes are described elsewhere herein. Such formulations can be prepared by any method known in the art.

[0601] Dosage forms adapted for oral administration can discrete dosage units such as capsules, pellets or tablets, powders or granules, solutions, or suspensions in aqueous or non-aqueous liquids; edible foams or whips, or in oil-in-water liquid emulsions or water-in-oil liquid emulsions. In some embodiments, the pharmaceutical formulations adapted for oral administration also include one or more agents which flavor, preserve, color, or help disperse the pharmaceutical formulation. Dosage forms prepared for oral administration can also be in the form of a liquid solution that can be delivered as a foam, spray, or liquid solution. The oral dosage form can be administered to a subject in need thereof. Where appropriate, the dosage forms described herein can be microencapsulated.

[0602] The dosage form can also be prepared to prolong or sustain the release of any ingredient. In some embodiments, compounds, molecules, compositions, vectors, vector systems, cells, or a combination thereof described herein can be the ingredient whose release is delayed. In some embodiments the primary active agent is the ingredient whose release is delayed. In some embodiments, an optional secondary agent can be the ingredient whose release is delayed. Suitable methods for delaying the release of an ingredient include, but are not limited to, coating or embedding the ingredients in material in polymers, wax, gels, and the like. Delayed release dosage formulations can be prepared as described in standard references such as “Pharmaceutical dosage form tablets,” eds. Liberman et. al. (New York, Marcel Dekker, Inc., 1989), “Remington—The science and practice of pharmacy”, 20th ed., Lippincott Williams & Wilkins, Baltimore, MD, 2000, and “Pharmaceutical dosage forms and drug delivery systems”, 6th Edition, Ansel et al., (Media, PA: Williams and Wilkins, 1995). These references provide information on excipients, materials, equipment, and processes for preparing tablets and capsules and delayed release dosage forms of tablets and pellets, capsules, and granules. The delayed release can be anywhere from about an hour to about 3 months or more.

[0603] Examples of suitable coating materials include, but are not limited to, cellulose polymers such as cellulose acetate phthalate, hydroxypropyl cellulose, hydroxypropyl methylcellulose, hydroxypropyl methylcellulose phthalate, and hydroxypropyl methylcellulose acetate succinate; polyvinyl acetate phthalate, acrylic acid polymers and copolymers, and methacrylic resins that are commercially available under the trade name EUDRAGIT® (Roth Pharma, Westerstadt, Germany), zein, shellac, and polysaccharides.

[0604] Coatings may be formed with a different ratio of water-soluble polymer, water insoluble polymers, and/or pH dependent polymers, with or without water insoluble/water soluble non-polymeric excipient, to produce the desired release profile. The coating is either performed on the dosage form (matrix or simple) which includes, but is not limited to, tablets (compressed with or without coated beads), capsules (with or without coated beads), beads, particle compositions, “ingredient as is” formulated as, but not limited to, suspension form or as a sprinkle dosage form.

[0605] Where appropriate, the dosage forms described herein can be a liposome. In these embodiments, primary active ingredient(s), and/or optional secondary active ingredient(s), and/or pharmaceutically acceptable salt thereof where appropriate are incorporated into a liposome. In embodiments where the dosage form is a liposome, the pharmaceutical formulation is thus a liposomal formulation. The liposomal formulation can be administered to a subject in need thereof.

[0606] Dosage forms adapted for topical administration can be formulated as ointments, creams, suspensions, lotions, powders, solutions, pastes, gels, sprays, aerosols, or oils. In some embodiments for treatments of the eye or other external tissues, for example the mouth or the skin, the pharmaceutical formulations are applied as a topical ointment or cream. When formulated in an ointment, a primary active ingredient, optional secondary active ingredient, and/or pharmaceutically acceptable salt thereof where appropriate can be formulated with a paraffinic or water-miscible ointment base. In other embodiments, the primary and/or secondary active ingredient can be formulated in a cream with an oil-in-water cream base or a water-in-oil base. Dosage forms adapted for topical administration in the mouth include lozenges, pastilles, and mouth washes.

[0607] Dosage forms adapted for nasal or inhalation administration include aerosols, solutions, suspension drops, gels, or dry powders. In some embodiments, a primary active ingredient, optional secondary active ingredient, and/or pharmaceutically acceptable salt thereof where appropriate can be in a dosage form adapted for inhalation is in a particle-size-reduced form that is obtained or obtainable by micronization. In some embodiments, the particle size of the size reduced (e.g., micronized) compound or salt or solvate thereof, is defined by a D₅₀ value of about 0.5 to about 10 microns as measured by an appropriate method known in the art. Dosage forms adapted for administration by inhalation also include particle dusts or mists. Suitable dosage forms wherein the carrier or excipient is a liquid for administration as a nasal spray or drops include aqueous or oil solutions/suspensions of an active (primary and/or secondary) ingredient, which may be generated by various types of metered dose pressurized aerosols, nebulizers, or insufflators. The nasal/inhalation formulations can be administered to a subject in need thereof.

[0608] In some embodiments, the dosage forms are aerosol formulations suitable for administration by inhalation. In some of these embodiments, the aerosol formulation contains a solution or fine suspension of a primary active ingredient, secondary active ingredient, and/or pharmaceutically acceptable salt thereof where appropriate and a pharmaceutically acceptable aqueous or non-aqueous solvent. Aerosol formulations can be presented in single or multi-dose quantities in sterile form in a sealed container. For some of these embodiments, the sealed container is a single dose or multi-dose nasal or an aerosol dispenser fitted with a metering valve (e.g., metered dose inhaler), which is intended for disposal once the contents of the container have been exhausted.

[0609] Where the aerosol dosage form is contained in an aerosol dispenser, the dispenser contains a suitable propellant under pressure, such as compressed air, carbon dioxide, or an organic propellant, including but not limited to a hydrofluorocarbon. The aerosol formulation dosage forms in other embodiments are contained in a pump-atomizer. The pressurized aerosol formulation can also contain a solution or a suspension of a primary active ingredient, optional secondary active ingredient, and/or pharmaceutically acceptable salt thereof. In further embodiments, the aerosol formulation also contains co-solvents and/or modifiers incorporated to improve, for example, the stability and/or taste and/or fine particle mass characteristics (amount and/or profile) of the formulation. Administration of the aerosol formulation can be once daily or several times daily, for example 2, 3, 4, or 8 times daily, in which 1, 2, 3 or more doses are delivered each time. The aerosol formulations can be administered to a subject in need thereof.

[0610] For some dosage forms suitable and/or adapted for inhaled administration, the pharmaceutical formulation is a dry powder inhalable-formulations. In addition to a primary active agent, optional secondary active ingredient, and/or pharmaceutically acceptable salt thereof where appropriate, such a dosage form can contain a powder base such as lactose, glucose, trehalose, mannitol, and/or starch. In some of these embodiments, a primary active agent, secondary active ingredient, and/or pharmaceutically acceptable salt thereof where appropriate is in a particle-size reduced form. In further embodiments, a performance modifier, such as L-leucine or another amino acid, cellobiose octaacetate, and/or metals salts of stearic acid, such as magnesium or calcium stearate. In some embodiments, the aerosol formulations are arranged so that each metered dose of aerosol contains a predetermined amount of an active ingredient, such as the one or more of the compositions, compounds, vector(s), molecules, cells, and combinations thereof described herein.

[0611] Dosage forms adapted for vaginal administration can be presented as pessaries, tampons, creams, gels, pastes, foams, or spray formulations. Dosage forms adapted for rectal administration include suppositories or enemas. The vaginal formulations can be administered to a subject in need thereof.

[0612] Dosage forms adapted for parenteral administration and/or adapted for injection can include aqueous and/or non-aqueous sterile injection solutions, which can contain antioxidants, buffers, bacteriostats, solutes that render the composition isotonic with the blood of the subject, and aqueous and non-aqueous sterile suspensions, which can include suspending agents and thickening agents. The dosage forms adapted for parenteral administration can be presented in a single-unit dose or multi-unit dose containers, including but not limited to sealed ampoules or vials. The doses can be lyophilized and re-suspended in a sterile carrier to reconstitute the dose prior to administration. Extemporaneous injection solutions and suspensions can be prepared in some embodiments, from sterile powders, granules, and tablets. The parenteral formulations can be administered to a subject in need thereof.

[0613] For some embodiments, the dosage form contains a predetermined amount of a primary active agent, secondary active ingredient, and/or pharmaceutically acceptable salt thereof where appropriate per unit dose. In an embodiment, the predetermined amount of primary active agent, secondary active ingredient, and/or pharmaceutically acceptable salt thereof where appropriate can be an effective amount, a least effect amount, and/or a therapeutically effective amount. In other embodiments, the predetermined amount of a primary active agent, secondary active agent, and/or pharmaceutically acceptable salt thereof where appropriate, can be an appropriate fraction of the effective amount of the active ingredient.

### Co-Therapies and Combination Therapies

[0614] In some embodiments, the pharmaceutical formulation(s) described herein are part of a combination treatment or combination therapy. The combination treatment can include the pharmaceutical formulation described herein and an additional treatment modality. The additional treatment modality can be a chemotherapeutic, a biological therapeutic, surgery, radiation, diet modulation, environmental modulation, a physical activity modulation, and combinations thereof.

[0615] In some embodiments, the co-therapy or combination therapy can additionally include but not limited to, polynucleotides, amino acids, peptides, polypeptides, antibodies, aptamers, ribozymes, hormones, immunomodulators, antipyretics, anxiolytics, antipsychotics, analgesics, antispasmodics, anti-inflammatoi anti-histamines, anti-infectives, chemotherapeutics, and combinations thereof.

### Administration of the Pharmaceutical Formulations

[0616] The pharmaceutical formulations or dosage forms thereof described herein can be administered one or more times hourly, daily, monthly, or yearly (e.g., 1, 2, 3, 4, 5, 6, 7, 8, 9, 10, 11, 12, 13, 14, 15, 16, 17, 18, 19, 20, or more times hourly, daily, monthly, or yearly). In some embodiments, the pharmaceutical formulations or dosage forms thereof described herein can be administered continuously over a period of time ranging from minutes to hours to days. Devices and dosages forms are known in the art and described herein that are effective to provide continuous administration of the pharmaceutical formulations described herein. In some embodiments, the first one or a few initial amount(s) administered can be a higher dose than subsequent doses. This is typically referred to in the art as a loading dose or doses and a maintenance dose, respectively. In some embodiments, the pharmaceutical formulations can be administered such that the doses over time are tapered (increased or decreased) overtime so as to wean a subject gradually off of a pharmaceutical formulation or gradually introduce a subject to the pharmaceutical formulation.

[0617] As previously discussed, the pharmaceutical formulation can contain a predetermined amount of a primary active agent, secondary active agent, and/or pharmaceutically acceptable salt thereof where appropriate. In some of these embodiments, the predetermined amount can be an appropriate fraction of the effective amount of the active ingredient. Such unit doses may therefore be administered once or more than once a day, month, or year (e.g., 1, 2, 3, 4, 5, 6, or more times per day, month, or year). Such pharmaceutical formulations may be prepared by any of the methods well known in the art.

[0618] Where co-therapies or multiple pharmaceutical formulations are to be delivered to a subject, the different therapies or formulations can be administered sequentially or simultaneously. Sequential administration is administration where an appreciable amount of time occurs between administrations, such as more than about 15, 20, 30, 45, 60 minutes or more. The time between administrations in sequential administration can be on the order of hours, days, months, or even years, depending on the active agent present in each administration. Simultaneous administration refers to administration of two or more formulations at the same time or substantially at the same time (e.g., within seconds or just a few minutes apart), where the intent is that the formulations be administered together at the same time.

### Applications and Methods of Use in General

[0619] The systems, the vector systems, the vectors and the compositions described herein may be used in various nucleic acids-targeting applications, altering or modifying synthesis of a gene product, such as a protein, nucleic acids cleavage, nucleic acids editing, nucleic acids splicing; trafficking of target nucleic acids, tracing of target nucleic acids, isolation of target nucleic acids, visualization of target nucleic acids, etc.

[0620] Aspects of the invention thus also encompass methods and uses of the compositions and systems described herein in genome engineering, e.g., for altering or manipulating the expression of one or more genes or the one or more gene products, in prokaryotic or eukaryotic cells, in vitro, in vivo or ex vivo. In some examples, the target polynucleotides are target sequences within genomic DNA, including nuclear genomic DNA, mitochondrial DNA, or chloroplast DNA.

[0621] Typically, in the context of a nucleic acid-targeting system, formation of a nucleic acid-targeting complex (comprising a nucleic acid component molecule hybridized to a target sequence and complexed with one or more nucleic acid-targeting effector proteins) results in cleavage of one or both DNA or RNA strands in or near (e.g., within 1, 2, 3, 4, 5, 6, 7, 8, 9, 10, 20, 50, or more base pairs from) the target sequence. As used herein the term “sequence(s) associated with a target locus of interest” refers to sequences near the vicinity of the target sequence (e.g., within 1, 2, 3, 4, 5, 6, 7, 8, 9, 10, 20, 50, or more base pairs from the target sequence, wherein the target sequence is comprised within a target locus of interest).

[0622] In one embodiment, the present disclosure provides a method of targeting a polynucleotide, comprising contacting a sample (such as cell, population of cells, tissue, organ, or an organism) that comprises a target polynucleotide with the composition, systems, polynucleotide(s), or vector(s). The contacting may result in modification of a gene product or modification of the amount or expression of a gene product. In some examples, the target sequence of the polynucleotide is a disease-associated target sequence.

[0623] In one embodiment, the present disclosure provides a method of modifying target polynucleotides comprising delivering the composition, the one or more polynucleotides of 2, or one or more vectors to a cell or population of cells comprising the target polynucleotides, wherein the complex directs the reverse transcriptase to the target sequence and the reverse transcriptase facilitates insertion of the donor sequence from the nucleic acid component into the target polynucleotide.

[0624] Examples of target polynucleotides include a sequence associated with a signaling biochemical pathway, e.g., a signaling biochemical pathway-associated gene or polynucleotide. Examples of target polynucleotides include a disease associated gene or polynucleotide. A “disease-associated” gene or polynucleotide refers to any gene or polynucleotide which is yielding transcription or translation products at an abnormal level or in an abnormal form in cells derived from a disease-affected tissues compared with tissues or cells of a non-disease control. It may be a gene that becomes expressed at an abnormally high level; it may be a gene that becomes expressed at an abnormally low level, where the altered expression correlates with the occurrence and/or progression of the disease. A disease-associated gene also refers to a gene possessing mutation(s) or genetic variation that is directly responsible or is in linkage disequilibrium with a gene(s) that is responsible for the etiology of a disease. The transcribed or translated products may be known or unknown, and may be at a normal or abnormal level.

[0625] The target polynucleotide of a complex can be any polynucleotide endogenous or exogenous to the eukaryotic cell. For example, the target polynucleotide can be a polynucleotide residing in the nucleus of the eukaryotic cell. The target polynucleotide can be a sequence coding a gene product (e.g., a protein) or a non-coding sequence (e.g., a regulatory polynucleotide or a junk DNA). Without wishing to be bound by theory, it is believed that the target sequence should be associated with a TAM (targeted adjacent motif); that is, a short sequence recognized by the complex. The precise sequence and length requirements for the TAMdiffer depending on the Fanzor polypeptide used, but TAMs are typically 2-5 base pair sequences adjacent the protospacer (that is, the target sequence). TAM specificity can be determined, for example according to the experimental setyp described in FIG. 8. In one embodiment, the TAMsequence comprises TCA. In embodiments, the TAMsequence is TCAN, wherein N may comprise any nucleotide. In one embodiment the TAMsequence comprises TCAG or TCAT. A skilled person will be able to identify further TAMsequences for use with a given Fanzor polypeptide. Further, engineering of the TAMInteracting (PI) domain may allow programing of TAMspecificity, improve target site recognition fidelity, and increase the versatility of the Fanzor polypeptide, genome engineering platform. Fanzor polypeptide may be engineered to alter their TAMspecificity, for example as described in Kleinstiver B P et al. Engineered CRISPR-Cas9 nucleases with altered TAMspecificities. Nature. 2015 Jul. 23;523 (7561): 481-5. doi: 10.1038/nature14592.

[0626] Examples of target polynucleotides include a sequence associated with a signaling biochemical pathway, e.g., a signaling biochemical pathway-associated gene or polynucleotide. Examples of target polynucleotides include a disease associated gene or polynucleotide. A “disease-associated” gene or polynucleotide refers to any gene or polynucleotide which is yielding transcription or translation products at an abnormal level or in an abnormal form in cells derived from a disease-affected tissues compared with tissues or cells of a non-disease control. It may be a gene that becomes expressed at an abnormally high level; it may be a gene that becomes expressed at an abnormally low level, where the altered expression correlates with the occurrence and/or progression of the disease. A disease-associated gene also refers to a gene possessing mutation(s) or genetic variation that is directly responsible or is in linkage disequilibrium with a gene(s) that is responsible for the etiology of a disease. The transcribed or translated products may be known or unknown, and may be at a normal or abnormal level.

[0627] Aspects of the invention relate to a method of targeting a polynucleotide, comprising contacting a sample that comprises the polynucleotide with a composition, system or Fanzor polypeptide as described in any embodiment herein, a delivery system comprising a composition, system or Fanzor polypeptide as described in any embodiment herein, a polynucleotide comprising a composition, system or Fanzor polypeptide as described in any embodiment herein, a vector comprising a composition, system or Fanzor polypeptide as described in any embodiment herein, or a vector system comprising a composition, system or Fanzor polypeptide as described in any embodiment herein. In one embodiment, a target polynucleotide is contacted with at least two different composition, system or Fanzor polypeptides. In further embodiments, the two different Fanzor polypeptide have different target polynucleotide specificities, or degrees of specificity. In one embodiment, the two different Fanzor polypeptide have a different TAM specificity.

[0628] Also envisaged are methods of targeting a polynucleotide, comprising contacting a sample that comprises the polynucleotide with the composition and systems, vectors, polynucleotides, herein wherein contacting results in modification of a gene product or modification of the amount or expression of a gene product. In one embodiment, the expression of the targeted gene product is increased by the method. In one embodiment, the expression of the targeted gene product is increased by at least 10%, at least 15%, at least 20%, at least 25%, at least 30%, at least 35%, at least 40%, at least 45%, at least 50%, at least 55%, at least 60%, at least 65%, at least 70%, at least 75%, at least 80%, at least 85%, p at least 90%, at least 95%, 100%. In one embodiment, the expression of the targeted gene product is increased at least 1.5-fold, at least 2-fold, at least 2.5-fold, at least 3-fold, at least 3.5-fold, at least 3.5-fold, at least 4-fold, at least 4.5-fold, at least 5-fold, at least 10-fold, at least 10-fold, at least 15-fold, at least 20-fold, at least 25-fold, at least 50-fold, at least 100-fold. In one embodiment, the expression of the targeted gene product is reduced by at least 10%, by at least 15%, by at least 20%, by at least 25%, by at least 30%, by at least 35%, by at least 40%, by at least 45%, by at least 50%, by at least 55%, by at least 60%, by at least 65%, by at least 70%, by at least 75%, by at least 80%, by at least 85%, by at least 90%, by at least 95%, by at least 100%. In one embodiment, the expression of the targeted gene product is reduced at least 1.5-fold, at least 2-fold, at least 2.5-fold, at least 3-fold, at least 3.5-fold, at least 3.5-fold, at least 4-fold, at least 4.5-fold, at least 5-fold, at least 10-fold, at least 10-fold, at least 15-fold, at least 20-fold, at least 25-fold, at least 50-fold, at least 100-fold. In alternative embodiments, the expression of the targeted gene product is reduced by the method. In further embodiments, expression of the targeted gene may be completely eliminated, or may be considered eliminated as remnant expression levels of the targeted gene fall below the detection limit of methods known in the art that are used to quantify, detect, or monitor expression levels of genes.

[0629] In one embodiment, one or more polynucleotide molecules, vectors, or vector systems driving expression of one or more elements of a nucleic acid-targeting system or delivery systems comprising one or more elements of the nucleic acid-targeting system are introduced into a host cell such that expression of the elements of the nucleic acid-targeting system direct formation of a nucleic acid-targeting complex at one or more target sites. In one embodiment of the invention the host cell may be a eukaryotic cell, a prokaryotic cell, or a plant cell.

[0630] In particular embodiments, the host cell is a cell of a cell line. Cell lines are available from a variety of sources known to those with skill in the art (see, e.g., the American Type Culture Collection (ATCC) (Manassas, Va.)). In one embodiment, a cell transfected with one or more vectors described herein is used to establish a new cell line comprising one or more vector-derived sequences. In one embodiment, a cell transiently transfected with the components of a composition or system as described herein (such as by transient transfection of one or more vectors, or transfection with RNA), and modified through the activity of a complex, is used to establish a new cell line comprising cells containing the modification but lacking any other exogenous sequence. In one embodiment, cells transiently or non-transiently transfected with one or more vectors described herein, or cell lines derived from such cells are used in assessing one or more test compounds.

[0631] Further intended are isolated human cells or tissues, plants or non-human animals comprising one or more of the polynucleotide molecules, vectors, vector systems, or cells described in any of the embodiments herein. In an aspect, host cells and cell lines modified by or comprising the compositions, systems or modified enzymes of present invention are provided, including (isolated) stem cells, and progeny thereof.

[0632] In one embodiment, the plants or non-human animals comprise at least one of the compositions, polynucleotide molecules, vectors, vector systems, or cells described in any of the embodiments herein at least one tissue type of the plant or non-human animal. In certain embodiment, non-human animals comprise at least one of the compositions, polynucleotide molecules, vectors, vector systems, or cells described in any of the embodiments herein in at least one tissue type. In one embodiment, the presence of the compositions is transient, in that they are degraded over time. In one embodiment, expression of the compositions described in any of the embodiments comprised in polynucleotide molecules, vectors, vector systems, or cells is limited to certain tissue types or regions in the plant or non-human animal. In one embodiment, the expression of the compositions described in any of the embodiments comprised in polynucleotide molecules, vectors, vector systems, or cells is dependent of a physiological cue. In one embodiment, expression of the compositions described in any of the embodiments comprised in polynucleotide molecules, vectors, vector systems, or cells may be triggered by an exogenous molecule. In one embodiment, expression of the compositions described in any of the embodiments comprised in polynucleotide molecules, vectors, vector systems, or cells is dependent on the expression of a non-Cas molecule in the plant or non-human animal.

[0633] In one aspect, the invention provides methods for using one or more elements of a nucleic acid-targeting system. The nucleic acid-targeting complex of the invention provides an effective means for modifying a target DNA or RNA (single or double stranded, linear or super-coiled). The nucleic acid-targeting complex of the invention has a wide variety of utility including modifying (e.g., deleting, inserting, translocating, inactivating, activating) a target DNA or RNA in a multiplicity of cell types. As such, the nucleic acid-targeting complex of the invention has a broad spectrum of applications in, e.g., gene therapy, drug screening, disease diagnosis, and prognosis. An exemplary nucleic acid-targeting complex comprises a DNA or RNA-targeting effector protein complexed with a nucleic acid component molecule hybridized to a target sequence within the target locus of interest.

[0634] In one embodiment, this invention provides a method of cleaving a target polynucleotide. The method may comprise modifying a target polynucleotide using a nucleic acid-targeting complex that binds to the target polynucleotide and effect cleavage of said target polynucleotide. In an embodiment, the nucleic acid-targeting complex of the invention, when introduced into a cell, may create a break (e.g., a single or a double strand break) in the polynucleotide sequence. For example, the method can be used to cleave a disease polynucleotide in a cell. For example, an exogenous template comprising a sequence to be integrated flanked by an upstream sequence and a downstream sequence may be introduced into a cell. The upstream and downstream sequences share sequence similarity with either side of the site of integration in the polynucleotide. The exogenous template comprises a sequence to be integrated (e.g., a mutated RNA). The sequence for integration may be a sequence endogenous or exogenous to the cell. Examples of a sequence to be integrated include polynucleotide encoding a protein or a non-coding RNA (e.g., a microRNA). Thus, the sequence for integration may be operably linked to an appropriate control sequence or sequences. Alternatively, the sequence to be integrated may provide a regulatory function. The upstream and downstream sequences in the recombination template are selected to promote recombination between the RNA sequence of interest and the recombination. The upstream sequence is a polynucleotide sequence that shares sequence similarity with the sequence upstream of the targeted site for integration. Similarly, the downstream sequence is a polynucleotide sequence that shares sequence similarity with the polynucleotide sequence downstream of the targeted site of integration. The upstream and downstream sequences in the recombination template can have 75%, 80%, 85%, 90%, 95%, or 100% sequence identity with the targeted sequence. Preferably, the upstream and downstream sequences in the recombination template have about 95%, 96%, 97%, 98%, 99%, or 100% sequence identity with the targeted sequence. In some methods, the upstream and downstream sequences in the recombination template have about 99% or 100% sequence identity with the targeted sequence. An upstream or downstream sequence may comprise from about 20 bp to about 2500 bp, for example, about 50, 100, 200, 300, 400, 500, 600, 700, 800, 900, 1000, 1100, 1200, 1300, 1400, 1500, 1600, 1700, 1800, 1900, 2000, 2100, 2200, 2300, 2400, or 2500 bp. In some methods, the exemplary upstream or downstream sequence have about 200 bp to about 2000 bp, about 600 bp to about 1000 bp, or more particularly about 700 bp to about 1000 bp. In some methods, the recombination template may further comprise a marker. Such a marker may make it easy to screen for targeted integrations. Examples of suitable markers include restriction sites, fluorescent proteins, or selectable markers. The recombination template of the invention can be constructed using recombinant techniques (see, for example, Sambrook et al., 2001 and Ausubel et al., 1996). In a method for modifying a target sequence by integrating a recombination template, a break (e.g., double or single stranded break in double or single stranded DNA or RNA) is introduced into the DNA or RNA sequence by the nucleic acid-targeting complex, the break is repaired via homologous recombination with an recombination template such that the template is integrated into the target. The presence of a double-stranded break facilitates integration of the template. In other embodiments, this invention provides a method of modifying expression of a RNA in a eukaryotic cell. The method comprises increasing or decreasing expression of a target polynucleotide by using a nucleic acid-targeting complex that binds to the DNA or RNA (e.g., mRNA or pre-mRNA). In some methods, a target can be inactivated to affect the modification of the expression in a cell. For example, upon the binding of a nucleic acid-targeting complex to a target sequence in a cell, the target is inactivated such that the sequence is not translated, the coded protein is not produced, or the sequence does not function as the wild-type sequence does. For example, a protein or microRNA coding sequence may be inactivated such that the protein or microRNA or pre-microRNA transcript is not produced. The target of a nucleic acid-targeting complex can be any polynucleotide endogenous or exogenous to the eukaryotic cell. For example, the target polynucleotide can be a polynucleotide residing in the nucleus of the eukaryotic cell. The target polynucleotide can be a sequence coding a gene product (e.g., a protein) or a non-coding sequence (e.g., ncRNA, lncRNA, tRNA, or rRNA). Examples of target RNA include a sequence associated with a signaling biochemical pathway, e.g., a signaling biochemical pathway-associated polynucleotide. Examples of target polynucleotide include a disease associated polynucleotide. A “disease-associated” polynucleotide refers to any polynucleotide which is yielding translation products at an abnormal level or in an abnormal form in cells derived from a disease-affected tissues compared with tissues or cells of a non-disease control. It may be a gene that becomes expressed at an abnormally high level; it may be a gene that becomes expressed at an abnormally low level, where the altered expression correlates with the occurrence and/or progression of the disease. A disease-associated polynucleotide also refers to a gene possessing mutation(s) or genetic variation that is directly responsible or is in linkage disequilibrium with a gene(s) that is responsible for the etiology of a disease. The translated products may be known or unknown, and may be at a normal or abnormal level. The target RNA of a nucleic acid-targeting complex can be any polynucleotide endogenous or exogenous to the eukaryotic cell. For example, the target RNA can be a RNA residing in the nucleus of the eukaryotic cell. The target polynucleotide can be a sequence coding a gene product (e.g., a protein) or a non-coding sequence (e.g., ncRNA, lncRNA, tRNA, or rRNA).

[0635] In one embodiment, the method may comprise allowing compositions to bind to the target DNA or RNA to effect cleavage of said target DNA or RNA thereby modifying the target DNA or RNA, wherein the nucleic acid-targeting complex comprises a nucleic acid-targeting effector protein complexed with a nucleic acid component molecule hybridized to a target sequence within said target DNA or RNA. In one aspect, the invention provides a method of modifying expression of DNA or RNA in a eukaryotic cell. In one embodiment, the method comprises allowing a nucleic acid-targeting complex to bind to the DNA or RNA such that said binding results in increased or decreased expression of said DNA or RNA; wherein the nucleic acid-targeting complex comprises a nucleic acid-targeting effector protein complexed with a nucleic acid component molecule. Similar considerations and conditions apply as above for methods of modifying a target DNA or RNA. In fact, these sampling, culturing and re-introduction options apply across the aspects of the present invention. In one aspect, the invention provides for methods of modifying a target DNA or RNA in a eukaryotic cell, which may be in vivo, ex vivo or in vitro. In one embodiment, the method comprises sampling a cell or population of cells from a human or non-human animal, and modifying the cell or cells. Culturing may occur at any stage ex vivo. The cell or cells may even be re-introduced into the non-human animal or plant. For re-introduced cells it is particularly preferred that the cells are stem cells. The compositions as described in any embodiment herein may be used to detect nucleic acid identifiers. Nucleic acid identifiers are non-coding nucleic acids that may be used to identify a particular article. Example nucleic acid identifiers, such as DNA watermarks, are described in Heider and Barnekow. “DNA watermarks: A proof of concept” BMC Molecular Biology 9:40 (2008). The nucleic acid identifiers may also be a nucleic acid barcode. A nucleic-acid based barcode is a short sequence of nucleotides (for example, DNA, RNA, or combinations thereof) that is used as an identifier for an associated molecule, such as a target molecule and/or target nucleic acid. A nucleic acid barcode can have a length of at least, for example, 4, 5, 6, 7, 8, 9, 10, 11, 12, 13, 14, 15, 16, 17, 18, 19, 20, 21, 22, 23, 24, 25, 26, 27, 28, 29, 30, 35, 40, 45, 50, 60, 70, 80, 90, or 100 nucleotides, and can be in single- or double-stranded form. One or more nucleic acid barcodes can be attached, or “tagged,” to a target molecule and/or target nucleic acid. This attachment can be direct (for example, covalent or non-covalent binding of the barcode to the target molecule) or indirect (for example, via an additional molecule, for example, a specific binding agent, such as an antibody (or other protein) or a barcode receiving adaptor (or other nucleic acid molecule). Target molecule and/or target nucleic acids can be labeled with multiple nucleic acid barcodes in combinatorial fashion, such as a nucleic acid barcode concatemer. Typically, a nucleic acid barcode is used to identify target molecules and/or target nucleic acids as being from a particular compartment (for example a discrete volume), having a particular physical property (for example, affinity, length, sequence, etc.), or having been subject to certain treatment conditions. Target molecule and/or target nucleic acid can be associated with multiple nucleic acid barcodes to provide information about all of these features (and more). Methods of generating nucleic acid-barcodes are disclosed, for example, in International Patent Application Publication No. WO/2014/047561.

[0636] In an embodiment, compositions induce a double strand break for the purpose of inducing HDR-mediated correction. In a further embodiment, two or more nucleic acid component molecules complexing with Fanzor polypeptide or an ortholog or homolog thereof, may be used to induce multiplexed breaks for purpose of inducing HDR-mediated correction.

[0637] A recombination template nucleic acid, as that term is used herein, refers to a nucleic acid sequence which can be used in conjunction with compositions discloser herein to alter the structure of a target position. In an embodiment, the target nucleic acid is modified to have some or all of the sequence of the recombination template nucleic acid, typically at or near cleavage site(s). In an embodiment, the recombination template nucleic acid is single stranded. In an alternate embodiment, the recombination template nucleic acid is double stranded. In an embodiment, the recombination template nucleic acid is DNA, e.g., double stranded DNA. In an alternate embodiment, the recombination template nucleic acid is single stranded DNA.

[0638] In one embodiment, a recombination template is provided to serve as a template in homologous recombination, such as within or near a target sequence nicked or cleaved by a nucleic acid-targeting effector protein as a part of a nucleic acid-targeting complex.

[0639] A recombination template may be a component of another vector as described herein, contained in a separate vector, or provided as a separate polynucleotide. A recombination template polynucleotide may be of any suitable length, such as about or more than about 10, 15, 20, 25, 50, 75, 100, 150, 200, 500, 1000, or more nucleotides in length. In one embodiment, the recombination template polynucleotide is complementary to a portion of a polynucleotide comprising the target sequence. When optimally aligned, a recombination template polynucleotide might overlap with one or more nucleotides of a target sequences (e.g., about or more than about 1, 5, 10, 15, 20, 25, 30, 35, 40, 45, 50, 60, 70, 80, 90, 100 or more nucleotides). In one embodiment, when a recombination template sequence and a polynucleotide comprising a target sequence are optimally aligned, the nearest nucleotide of the recombination template polynucleotide is within about 1, 5, 10, 15, 20, 25, 50, 75, 100, 200, 300, 400, 500, 1000, 5000, 10000, or more nucleotides from the target sequence.

[0640] In an embodiment, the recombination template nucleic acid alters the structure of the target position by participating in homologous recombination. In an embodiment, the recombination template nucleic acid alters the sequence of the target position. In an embodiment, the recombination template nucleic acid results in the incorporation of a modified, or non-naturally occurring base into the target nucleic acid.

[0641] The recombination template sequence may undergo a breakage mediated or catalyzed recombination with the target sequence. In an embodiment, the recombination template nucleic acid may include sequence that corresponds to a site on the target sequence that is cleaved by an Fanzor polypeptide mediated cleavage event. In an embodiment, the recombination template nucleic acid may include sequence that corresponds to both, a first site on the target sequence that is cleaved in a first Fanzor polypeptide mediated event and a second site on the target sequence that is cleaved in a second Fanzor polypeptide mediated event.

[0642] In one embodiment, the recombination template nucleic acid can include sequence which results in an alteration in the coding sequence of a translated sequence, e.g., one which results in the substitution of one amino acid for another in a protein product, e.g., transforming a mutant allele into a wild type allele, transforming a wild type allele into a mutant allele, and/or introducing a stop codon, insertion of an amino acid residue, deletion of an amino acid residue, or a nonsense mutation. In one embodiment, the recombination template nucleic acid can include sequence which results in an alteration in a non-coding sequence, e.g., an alteration in an exon or in a 5′ or 3′ non-translated or non-transcribed region. Such alterations include an alteration in a control element, e.g., a promoter, enhancer, and an alteration in a cis-acting or trans-acting control element.

[0643] A recombination template nucleic acid having homology with a target position in a target gene may be used to alter the structure of a target sequence. The recombination template sequence may be used to alter an unwanted structure, e.g., an unwanted or mutant nucleotide. The recombination template nucleic acid may include sequence which, when integrated, results in: decreasing the activity of a positive control element; increasing the activity of a positive control element; decreasing the activity of a negative control element; increasing the activity of a negative control element; decreasing the expression of a gene; increasing the expression of a gene; increasing resistance to a disorder or disease; increasing resistance to viral entry; correcting a mutation or altering an unwanted amino acid residue conferring, increasing, abolishing or decreasing a biological property of a gene product, e.g., increasing the enzymatic activity of an enzyme, or increasing the ability of a gene product to interact with another molecule.

[0644] The recombination template nucleic acid may include sequence which results in: a change in sequence of 1, 2, 3, 4, 5, 6, 7, 8, 9, 10, 1 1, 12 or more nucleotides of the target sequence. In an embodiment, the recombination template nucleic acid may be 20+/−10, 30+/−10, 40+/−10, 50+/−10, 60+/−10, 70+/−10, 80+/−10, 90+/−10, 100+/−10, 1 10+/−10, 120+/−10, 130+/−10, 140+/−10, 150+/−10, 160+/−10, 170+/−10, 1 80+/−10, 190+/−10, 200+/−10, 210+/−10, of 220+/−10 nucleotides in length. In an embodiment, the t recombination template nucleic acid may be 30+/−20, 40+/−20, 50+/−20, 60+/−20, 70+/−20, 80+/−20, 90+/−20, 100+/−20, 1 10+/−20, 120+/−20, 130+/−20, 140+/−20, I 50+/−20, 160+/−20, 170+/−20, 180+/−20, 190+/−20, 200+/−20, 210+/−20, of 220+/−20 nucleotides in length. In an embodiment, the recombination template nucleic acid is 10 to 1,000, 20 to 900, 30 to 800, 40 to 700, 50 to 600, 50 to 500, 50 to 400, 50 to300, 50 to 200, or 50 to 100 nucleotides in length.

[0645] A recombination template nucleic acid comprises the following components: [5′ homology arm]-[replacement sequence]-[3′ homology arm]. The homology arms provide for recombination into the chromosome, thus replacing the undesired element, e.g., a mutation or signature, with the replacement sequence. In an embodiment, the homology arms flank the most distal cleavage sites. In an embodiment, the 3′ end of the 5′ homology arm is the position next to the 5′ end of the replacement sequence. In an embodiment, the 5′ homology arm can extend at least 10, 20, 30, 40, 50, 100, 200, 300, 400, 500, 600, 700, 800, 900, 1000, 1500, or 2000 nucleotides 5′ from the 5′ end of the replacement sequence. In an embodiment, the 5′ end of the 3′ homology arm is the position next to the 3′ end of the replacement sequence. In an embodiment, the 3′ homology arm can extend at least 10, 20, 30, 40, 50, 100, 200, 300, 400, 500, 600, 700, 800, 900, 1000, 1500, or 2000 nucleotides 3′ from the 3′ end of the replacement sequence.

[0646] In one embodiment, one or both homology arms may be shortened to avoid including certain sequence repeat elements. For example, a 5′ homology arm may be shortened to avoid a sequence repeat element. In other embodiments, a 3′ homology arm may be shortened to avoid a sequence repeat element. In one embodiment, both the 5′ and the 3′ homology arms may be shortened to avoid including certain sequence repeat elements.

[0647] In one embodiment, a recombination template nucleic acids for correcting a mutation may designed for use as a single-stranded oligonucleotide. When using a single-stranded oligonucleotide, 5′ and 3′ homology arms may range up to about 200 base pairs (bp) in length, e.g., at least 25, 50, 75, 100, 125, 150, 175, or 200 bp in length.

[0648] Unlike Fanzor polypeptide-mediated gene knockout, which permanently eliminates expression by mutating the gene at the DNA level, Fanzor polypeptide knockdown allows for temporary reduction of gene expression through the use of artificial transcription factors. Mutating key residues in both DNA cleavage domains of the Fanzor polypeptide, results in the generation of a catalytically inactive Fanzor polypeptide. A catalytically inactive Fanzor polypeptide complexes with a nucleic acid component molecule and localizes to the DNA sequence specified by that nucleic acid component molecule's targeting domain, however, it does not cleave the target DNA. Fusion of the inactive Fanzor polypeptide protein to an effector domain, e.g., a transcription repression domain, enables recruitment of the effector to any DNA site specified by the nucleic acid component molecule. In one embodiment, Fanzor polypeptide may be fused to a transcriptional repression domain and recruited to the promoter region of a gene. Especially for gene repression, it is contemplated herein that blocking the binding site of an endogenous transcription factor would aid in downregulating gene expression. In another embodiment, an inactive Fanzor polypeptide can be fused to a chromatin modifying protein. Altering chromatin status can result in decreased expression of the target gene.

[0649] In an embodiment, a nucleic acid component molecule can be targeted to a known transcription response elements (e.g., promoters, enhancers, etc.), a known upstream activating sequences, and/or sequences of unknown or known function that are suspected of being able to control expression of the target DNA.

[0650] In some methods, a target polynucleotide can be inactivated to affect the modification of the expression in a cell. For example, upon the binding of a composition to a target sequence in a cell, the target polynucleotide is inactivated such that the sequence is not transcribed, the coded protein is not produced, or the sequence does not function as the wild-type sequence does. For example, a protein or microRNA coding sequence may be inactivated such that the protein is not produced.

### Non-Homologous End-Joining

[0651] In one embodiment, nuclease-induced non-homologous end-joining (NHEJ) can be used to target gene-specific knockouts. Nuclease-induced NHEJ can also be used to remove (e.g., delete) sequence in a gene of interest. Generally, NHEJ repairs a double-strand break in the DNA by joining together the two ends; however, generally, the original sequence is restored only if two compatible ends, exactly as they were formed by the double-strand break, are perfectly ligated. The DNA ends of the double-strand break are frequently the subject of enzymatic processing, resulting in the addition or removal of nucleotides, at one or both strands, prior to rejoining of the ends. This results in the presence of insertion and/or deletion (indel) mutations in the DNA sequence at the site of the NHEJ repair. Two-thirds of these mutations typically alter the reading frame and, therefore, produce a non-functional protein. Additionally, mutations that maintain the reading frame, but which insert or delete a significant amount of sequence, can destroy functionality of the protein. This is locus dependent as mutations in critical functional domains are likely less tolerable than mutations in non-critical regions of the protein. The indel mutations generated by NHEJ are unpredictable in nature; however, at a given break site certain indel sequences are favored and are over represented in the population, likely due to small regions of microhomology. The lengths of deletions can vary widely; most commonly in the 1-50 bp range, but they can easily be greater than 50 bp, e.g., they can easily reach greater than about 100-200 bp. Insertions tend to be shorter and often include short duplications of the sequence immediately surrounding the break site. However, it is possible to obtain large insertions, and in these cases, the inserted sequence has often been traced to other regions of the genome or to plasmid DNA present in the cells.

[0652] Because NHEJ is a mutagenic process, it may also be used to delete small sequence motifs as long as the generation of a specific final sequence is not required. If a double-strand break is targeted near to a short target sequence, the deletion mutations caused by the NHEJ repair often span, and therefore remove, the unwanted nucleotides. For the deletion of larger DNA segments, introducing two double-strand breaks, one on each side of the sequence, can result in NHEJ between the ends with removal of the entire intervening sequence. Both of these approaches can be used to delete specific DNA sequences; however, the error-prone nature of NHEJ may still produce indel mutations at the site of repair.

[0653] Both double strand cleaving Fanzor polypeptide, or an ortholog or homolog thereof, and single strand, or nickase, Fanzor polypeptide, or an ortholog or homolog thereof, molecules can be used in the methods and compositions described herein to generate NHEJ-mediated indels. NHEJ-mediated indels targeted to the gene, e.g., a coding region, e.g., an early coding region of a gene of interest can be used to knockout (i.e., eliminate expression of) a gene of interest. For example, early coding region of a gene of interest includes sequence immediately following a transcription start site, within a first exon of the coding sequence, or within 500 bp of the transcription start site (e.g., less than 500, 450, 400, 350, 300, 250, 200, 150, 100 or 50 bp).

[0654] In an embodiment, in which an nucleic acid component molecule and Fanzor polypeptide, or an ortholog or homolog thereof, generate a double strand break for the purpose of inducing NHEJ-mediated indels, an RNA component molecule may be configured to position one double-strand break in close proximity to a nucleotide of the target position. In an embodiment, the cleavage site may be between 0-500 bp away from the target position (e.g., less than 500, 400, 300, 200, 100, 50, 40, 30, 25, 20, 15, 10, 9, 8, 7, 6, 5, 4, 3, 2 or 1 bp from the target position).

[0655] In an embodiment, in which two nucleic acid component molecules complexing with Fanzor polypeptide, or an ortholog or homolog thereof, e.g., Fanzor polypeptide nickases induce two single strand breaks for the purpose of inducing NHEJ-mediated indels, two nucleic acid component molecules may be configured to position two single-strand breaks to provide for NHEJ repair a nucleotide of the target position.

[0656] In some examples, the systems herein may introduce one or more indels via NHEJ pathway and insert sequence from a combination template via HDR.

### Samples in General

[0657] It will be appreciated that in many applications of the compositions, formulations, and systems descried herein utilize samples, such as biological samples, that can be obtained from a human or non-human animal subject, plant, prokaryote, and/or environment (e.g., air, soil, and water).

[0658] A sample for use with the invention may be a biological or environmental sample, such as a surface sample, a fluid sample, or a food sample (fresh fruits or vegetables, meats). Food samples may include a beverage sample, a paper surface, a fabric surface, a metal surface, a wood surface, a plastic surface, a soil sample, a freshwater sample, a wastewater sample, a saline water sample, exposure to atmospheric air or other gas sample, or a combination thereof. For example, household/commercial/industrial surfaces made of any materials including, but not limited to, metal, wood, plastic, rubber, or the like, may be swabbed and tested for contaminants. Soil samples may be tested for the presence of pathogenic bacteria or parasites, or other microbes, both for environmental purposes and/or for human, animal, or plant disease testing. Water samples such as freshwater samples, wastewater samples, or saline water samples can be evaluated for cleanliness and safety, and/or potability, to detect the presence of, for example, Cryptosporidium parvum, Giardia lamblia, or other microbial contamination. In further embodiments, a biological sample may be obtained from a source including, but not limited to, a tissue sample, saliva, blood, plasma, sera, stool, urine, sputum, mucous, lymph, synovial fluid, spinal fluid, cerebrospinal fluid, ascites, pleural effusion, seroma, pus, bile, aqueous or vitreous humor, transudate, exudate, or swab of skin or a mucosal membrane surface. In some particular embodiments, an environmental sample or biological samples may be crude samples and/or the one or more target molecules may not be purified or amplified from the sample prior to application of the method. Identification of microbes may be useful and/or needed for any number of applications, and thus any type of sample from any source deemed appropriate by one of skill in the art may be used in accordance with the invention.

[0659] Any suitable sample collection method may be employed. Such techniques are generally known to the skilled artisan and/or are described herein.

[0660] In some embodiments, samples are processed in one or more steps after initial collection. This processing can, for example, purify, clean, filter, isolate, one or more components in the sample for downstream analysis, long term storage, short term storage, and/or the like. Samples can be aliquoted in to replicates.

[0661] A sample for use with the invention may be a biological or environmental sample, such as a food sample (fresh fruits or vegetables, meats), a beverage sample, a paper surface, a fabric surface, a metal surface, a wood surface, a plastic surface, a soil sample, a freshwater sample, a wastewater sample, a saline water sample, exposure to atmospheric air or other gas sample, or a combination thereof. For example, household/commercial/industrial surfaces made of any materials including, but not limited to, metal, wood, plastic, rubber, or the like, may be swabbed and tested for contaminants. Soil samples may be tested for the presence of pathogenic bacteria or parasites, or other microbes, both for environmental purposes and/or for human, animal, or plant disease testing. Water samples such as freshwater samples, wastewater samples, or saline water samples can be evaluated for cleanliness and safety, and/or potability, to detect the presence of, for example, Cryptosporidium parvum, Giardia lamblia, or other microbial contamination. In further embodiments, a biological sample may be obtained from a source including, but not limited to, a tissue sample, saliva, blood, plasma, sera, stool, urine, sputum, mucous, lymph, synovial fluid, cerebrospinal fluid, ascites, pleural effusion, seroma, pus, bile, aqueous or vitreous humor, transudate, exudate, or swab of skin or a mucosal membrane surface. In some particular embodiments, an environmental sample or biological samples may be crude samples and/or the one or more target molecules may not be purified or amplified from the sample prior to application of the method. Identification of microbes may be useful and/or needed for any number of applications, and thus any type of sample from any source deemed appropriate by one of skill in the art may be used in accordance with the invention.

### Exemplary Applications and Methods of Use

[0662] The invention provides a non-naturally occurring or engineered composition, or one or more polynucleotides encoding components of said composition, or vector or delivery systems comprising one or more polynucleotides encoding components of said composition for use in a modifying a target cell in vivo, ex vivo or in vitro and, may be conducted in a manner alters the cell such that once modified the progeny or cell line of the Fanzor polypeptide modified cell retains the altered phenotype. The modified cells and progeny may be part of a multi-cellular organism such as a plant or animal with ex vivo or in vivo application of composition to desired cell types. The methods herein include a therapeutic method of treatment. The therapeutic method of treatment may comprise gene or genome editing, or gene therapy.

[0663] In one embodiment, one or more vectors described herein are used to produce a non-human transgenic animal or transgenic plant. In one embodiment, the transgenic animal is a mammal, such as a mouse, rat, or rabbit. Methods for producing transgenic animals and plants are known in the art, and generally begin with a method of cell transfection, such as described herein.

Use of Orthogonal Catalytically inactive Fanzor Polypeptides

[0664] In particular embodiments, the Fanzor polypeptide nickase is used in combination with an orthogonal catalytically inactive Fanzor polypeptide to increase efficiency of said nickase (e.g., as described in Chen et al. 2017, Nature Communications 8:14958; doi: 10.1038/ncomms14958). More particularly, the orthogonal catalytically inactive Fanzor polypeptide is characterized by a different TAMrecognition site than the Fanzor nickase used in the AD-functionalized composition and the corresponding nucleic acid component molecule sequence is selected to bind to a target sequence proximal to that of the nickase of the functionalized Fanzor polypeptide. The orthogonal catalytically inactive Fanzor polypeptide as used in the context of the present invention does not form part of the functionalized composition but merely functions to increase the efficiency of said nickase and is used in combination with a standard nucleic acid component as described in the art for said Fanzor polypeptide. In particular embodiments, said orthogonal catalytically inactive Fanzor polypeptide is a dead Fanzor polypeptide, i.e., comprising one or more mutations which abolishes the nuclease activity of said Fanzor polypeptide. In particular embodiments, the catalytically inactive orthogonal Fanzor polypeptide is provided with two or more nucleic acid components which are capable of hybridizing to target sequences which are proximal to the target sequence of the nickase. In particular embodiments, at least two nucleic acid components are used to target said catalytically inactive Fanzor polypeptide, of which at least one nucleic acid component is capable of hybridizing to a target sequence 5″ of the target sequence of the nickase and at least one nucleic acid component is capable of hybridizing to a target sequence 3′ of the target sequence of the nickase of the functionalized composition, whereby said one or more target sequences may be on the same or the opposite DNA strand as the target sequence of the Fanzor nickase. In particular embodiments, the guide sequences of the one or more ωnucleic acid components of the orthogonal catalytically inactive Fanzor polypeptide are selected such that the target sequences are proximal to that of the nucleic acid component for the targeting of the functionalized composition, e.g. for the targeting of the nickase. In particular embodiments, the one or more target sequences of the orthogonal catalytically inactive Fanzor polypeptide are each separated from the target sequence of the nickase by more than 5 but less than 450 base pairs. Optimal distances between the target sequences of the nucleic acid component molecules for use with the orthogonal catalytically inactive Fanzor polypeptide and the target sequence of the functionalized composition can be determined by the skilled person. In particular embodiments, the catalytically inactive orthogonal Fanzor polypeptide has been modified to alter its TAM specificity as described elsewhere herein. In particular embodiments, the Fanzor polypeptide nickase is a nickase which, by itself has limited activity in human cells, but which, in combination with an inactive orthogonal Fanzor polypeptide and one or more corresponding proximal nucleic acid component molecules ensures the required nickase activity.

### Models of Diseases and Conditions

[0665] In an aspect, the invention provides a method of modeling a disease associated with a genomic locus in a eukaryotic organism or a non-human organism comprising manipulation of a target sequence within a coding, non-coding or regulatory element of said genomic locus comprising delivering a non-naturally occurring or engineered composition comprising a viral vector system comprising one or more viral vectors operably encoding a composition for expression thereof, wherein the composition comprises particle delivery system or the delivery system or the virus particle of any one of the above embodiments or the cell of any one of the above embodiment.

[0666] In one aspect, the invention provides a method of generating a model eukaryotic cell that can include one or more a mutated disease genes and/or infectious microorganisms. In one embodiment, a disease gene is any gene associated an increase in the risk of having or developing a disease. In one embodiment, the method includes (a) introducing one or more vectors into a eukaryotic cell, wherein the one or more vectors comprise a composition, system, and/or component thereof and/or a vector or vector system that is capable of driving expression of a composition, system, and/or component thereof including, but not limited to: a nucleic acid component molecule sequence, one or more Fanzor polypeptides, and combinations thereof and (b) allowing a composition, system, or complex to bind to one or more target polynucleotides, e.g., to effect cleavage, nicking, or other modification of the target polynucleotide within said disease gene, wherein the composition, system, or complex is composed of one or more Fanzor polypeptide complexed with (1) one or more nucleic acid component molecule sequences that is/are hybridized to the target sequence(s) within the target polynucleotide(s), and optionally (2) the nucleic acid component scaffold sequence(s), thereby generating a model eukaryotic cell comprising one or more mutated disease gene(s). Thus, in one embodiment the composition and system, contains nucleic acid molecules for and drives expression of one or more of: a Fanzor polypeptide, a nucleic acid component molecule sequence and/or a Homologous Recombination template and/or a stabilizing ligand if the Fanzor polypeptide has a destabilization domain. In one embodiment, said cleavage comprises cleaving one or two strands at the location of the target sequence by the Fanzor polypeptide. In one embodiment, nicking comprises nicking one or two strands at the location of the target sequence by the Fanzor polypeptide. In one embodiment, said cleavage or nicking results in modified transcription of a target polynucleotide. In one embodiment, modification results in decreased transcription of the target polynucleotide. In one embodiment, the method further comprises repairing said cleaved or nicked target polynucleotide by homologous recombination with a recombination template polynucleotide, wherein said repair results in a mutation comprising an insertion, deletion, or substitution of one or more nucleotides of said target polynucleotide. In one embodiment, said mutation results in one or more amino acid changes in a protein expression from a gene comprising the target sequence.

[0667] The disease modeled can be any disease with a genetic or epigenetic component. In one embodiment, the disease modeled can be any as discussed elsewhere herein.

### Models of Genetic and Epigenetic Conditions

[0668] A method of the invention may be used to create a plant, an animal or cell that may be used to model and/or study genetic or epigenetic conditions of interest, such as a through a model of mutations of interest or a disease model. As used herein, “disease” refers to a disease, disorder, or indication in a subject. For example, a method of the invention may be used to create an animal or cell that comprises a modification in one or more nucleic acid sequences associated with a disease, or a plant, animal or cell in which the expression of one or more nucleic acid sequences associated with a disease are altered. Such a nucleic acid sequence may encode a disease associated protein sequence or may be a disease associated control sequence. Accordingly, it is understood that in embodiments of the invention, a plant, subject, patient, organism or cell can be a non-human subject, patient, organism or cell. Thus, the invention provides a plant, animal or cell, produced by the present methods, or a progeny thereof. The progeny may be a clone of the produced plant or animal, or may result from sexual reproduction by crossing with other individuals of the same species to introgress further desirable traits into their offspring. The cell may be in vivo or ex vivo in the cases of multicellular organisms, particularly animals or plants. In the instance where the cell is in cultured, a cell line may be established if appropriate culturing conditions are met and preferably if the cell is suitably adapted for this purpose (for instance a stem cell). Bacterial cell lines produced by the invention are also envisaged. Hence, cell lines are also envisaged.

[0669] In some methods, the disease model can be used to study the effects of mutations on the animal or cell and development and/or progression of the disease using measures commonly used in the study of the disease. Alternatively, such a disease model is useful for studying the effect of a pharmaceutically active compound on the disease.

[0670] In some methods, the disease model can be used to assess the efficacy of a potential gene therapy strategy. That is, a disease-associated gene or polynucleotide can be modified such that the disease development and/or progression is inhibited or reduced. In particular, the method comprises modifying a disease-associated gene or polynucleotide such that an altered protein is produced and, as a result, the animal or cell has an altered response. Accordingly, in some methods, a genetically modified animal may be compared with an animal predisposed to development of the disease such that the effect of the gene therapy event may be assessed.

[0671] In another embodiment, this invention provides a method of developing a biologically active agent that modulates a cell signaling event associated with a disease gene. The method comprises contacting a test compound with a cell comprising one or more vectors that drive expression of one or more of a Fanzor polypeptide, and a conserved nucleotide sequence linked to a guide/spacer sequence; and detecting a change in a readout that is indicative of a reduction or an augmentation of a cell signaling event associated with, e.g., a mutation in a disease gene contained in the cell.

[0672] A cell model or animal model can be constructed in combination with the method of the invention for screening a cellular function change. Such a model may be used to study the effects of a genome sequence modified by the complex of the invention on a cellular function of interest. For example, a cellular function model may be used to study the effect of a modified genome sequence on intracellular signaling or extracellular signaling. Alternatively, a cellular function model may be used to study the effects of a modified genome sequence on sensory perception. In some such models, one or more genome sequences associated with a signaling biochemical pathway in the model are modified.

[0673] Several disease models have been specifically investigated. These include de novo autism risk genes CHD8, KATNAL2, and SCN2A; and the syndromic autism (Angelman Syndrome) gene UBE3A. These genes and resulting autism models are of course preferred, but serve to show the broad applicability of the invention across genes and corresponding models. An altered expression of one or more genome sequences associated with a signaling biochemical pathway can be determined by assaying for a difference in the mRNA levels of the corresponding genes between the test model cell and a control cell, when they are contacted with a candidate agent. Alternatively, the differential expression of the sequences associated with a signaling biochemical pathway is determined by detecting a difference in the level of the encoded polypeptide or gene product.

[0674] To assay for an agent-induced alteration in the level of mRNA transcripts or corresponding polynucleotides, nucleic acid contained in a sample is first extracted according to standard methods in the art. For instance, mRNA can be isolated using various lytic enzymes or chemical solutions according to the procedures set forth in Sambrook et al. (1989), or extracted by nucleic-acid-binding resins following the accompanying instructions provided by the manufacturers. The mRNA contained in the extracted nucleic acid sample is then detected by amplification procedures or conventional hybridization assays (e.g., Northern blot analysis) according to methods widely known in the art or based on the methods exemplified herein.

[0675] For purpose of this invention, amplification means any method employing a primer and a polymerase capable of replicating a target sequence with reasonable fidelity. Amplification may be carried out by natural or recombinant DNA polymerases such as TaqGold™, T7 DNA polymerase, Klenow fragment of E. coli DNA polymerase, and reverse transcriptase. A preferred amplification method is PCR. In particular, the isolated RNA can be subjected to a reverse transcription assay that is coupled with a quantitative polymerase chain reaction (RT-PCR) in order to quantify the expression level of a sequence associated with a signaling biochemical pathway.

[0676] Detection of the gene expression level can be conducted in real time in an amplification assay. In one aspect, the amplified products can be directly visualized with fluorescent DNA-binding agents including but not limited to DNA intercalators and DNA groove binders. Because the amount of the intercalators incorporated into the double-stranded DNA molecules is typically proportional to the amount of the amplified DNA products, one can conveniently determine the amount of the amplified products by quantifying the fluorescence of the intercalated dye using conventional optical systems in the art. DNA-binding dye suitable for this application include SYBR green, SYBR blue, DAPI, propidium iodine, Hoeste, SYBR gold, ethidium bromide, acridines, proflavine, acridine orange, acriflavine, fluorcoumanin, ellipticine, daunomycin, chloroquine, distamycin D, chromomycin, homidium, mithramycin, ruthenium polypyridyls, anthramycin, and the like.

[0677] In another aspect, other fluorescent labels such as sequence specific probes can be employed in the amplification reaction to facilitate the detection and quantification of the amplified products. Probe-based quantitative amplification relies on the sequence-specific detection of a desired amplified product. It utilizes fluorescent, target-specific probes (e.g., TaqMan® probes) resulting in increased specificity and sensitivity. Methods for performing probe-based quantitative amplification are well established in the art and are taught in U.S. Pat. No. 5,210,015.

[0678] In yet another aspect, conventional hybridization assays using hybridization probes that share sequence homology with sequences associated with a signaling biochemical pathway can be performed. Typically, probes are allowed to form stable complexes with the sequences associated with a signaling biochemical pathway contained within the biological sample derived from the test subject in a hybridization reaction. It will be appreciated by one of skill in the art that where antisense is used as the probe nucleic acid, the target polynucleotides provided in the sample are chosen to be complementary to sequences of the antisense nucleic acids. Conversely, where the nucleotide probe is a sense nucleic acid, the target polynucleotide is selected to be complementary to sequences of the sense nucleic acid.

[0679] Hybridization can be performed under conditions of various stringency. Suitable hybridization conditions for the practice of the present invention are such that the recognition interaction between the probe and sequences associated with a signaling biochemical pathway is both sufficiently specific and sufficiently stable. Conditions that increase the stringency of a hybridization reaction are widely known and published in the art. See, for example, (Sambrook, et al., (1989); Nonradioactive In Situ Hybridization Application Manual, Boehringer Mannheim, second edition). The hybridization assay can be formed using probes immobilized on any solid support, including but are not limited to nitrocellulose, glass, silicon, and a variety of gene arrays. A preferred hybridization assay is conducted on high-density gene chips as described in U.S. Pat. No. 5,445,934.

[0680] For a convenient detection of the probe-target complexes formed during the hybridization assay, the nucleotide probes are conjugated to a detectable label. Detectable labels suitable for use in the present invention include any composition detectable by photochemical, biochemical, spectroscopic, immunochemical, electrical, optical or chemical means. A wide variety of appropriate detectable labels are known in the art, which include fluorescent or chemiluminescent labels, radioactive isotope labels, enzymatic or other ligands. In preferred embodiments, one will likely desire to employ a fluorescent label or an enzyme tag, such as digoxigenin, β-galactosidase, urease, alkaline phosphatase or peroxidase, avidin/biotin complex.

[0681] The detection methods used to detect or quantify the hybridization intensity will typically depend upon the label selected above. For example, radiolabels may be detected using photographic film or a phosphoimager. Fluorescent markers may be detected and quantified using a photodetector to detect emitted light. Enzymatic labels are typically detected by providing the enzyme with a substrate and measuring the reaction product produced by the action of the enzyme on the substrate; and finally colorimetric labels are detected by simply visualizing the colored label.

[0682] An agent-induced change in expression of sequences associated with a signaling biochemical pathway can also be determined by examining the corresponding gene products. Determining the protein level typically involves a) contacting the protein contained in a biological sample with an agent that specifically bind to a protein associated with a signaling biochemical pathway; and (b) identifying any agent: protein complex so formed. In one aspect of this embodiment, the agent that specifically binds a protein associated with a signaling biochemical pathway is an antibody, preferably a monoclonal antibody.

[0683] The reaction is performed by contacting the agent with a sample of the proteins associated with a signaling biochemical pathway derived from the test samples under conditions that will allow a complex to form between the agent and the proteins associated with a signaling biochemical pathway. The formation of the complex can be detected directly or indirectly according to standard procedures in the art. In the direct detection method, the agents are supplied with a detectable label and unreacted agents may be removed from the complex; the amount of remaining label thereby indicating the amount of complex formed. For such method, it is preferable to select labels that remain attached to the agents even during stringent washing conditions. It is preferable that the label does not interfere with the binding reaction. In the alternative, an indirect detection procedure may use an agent that contains a label introduced either chemically or enzymatically. A desirable label generally does not interfere with binding or the stability of the resulting agent: polypeptide complex. However, the label is typically designed to be accessible to an antibody for an effective binding and hence generating a detectable signal.

[0684] A wide variety of labels suitable for detecting protein levels are known in the art. Non-limiting examples include radioisotopes, enzymes, colloidal metals, fluorescent compounds, bioluminescent compounds, and chemiluminescent compounds.

[0685] The amount of agent: polypeptide complexes formed during the binding reaction can be quantified by standard quantitative assays. As illustrated above, the formation of agent: polypeptide complex can be measured directly by the amount of label remained at the site of binding. In an alternative, the protein associated with a signaling biochemical pathway is tested for its ability to compete with a labeled analog for binding sites on the specific agent. In this competitive assay, the amount of label captured is inversely proportional to the amount of protein sequences associated with a signaling biochemical pathway present in a test sample.

[0686] A number of techniques for protein analysis based on the general principles outlined above are available in the art. They include but are not limited to radioimmunoassay, ELISA (enzyme linked immunoradiometric assays), “sandwich” immunoassays, immunoradiometric assays, in situ immunoassays (using e.g., colloidal gold, enzyme or radioisotope labels), western blot analysis, immunoprecipitation assays, immunofluorescent assays, and SDS-PAGE.

[0687] Antibodies that specifically recognize or bind to proteins associated with a signaling biochemical pathway are preferable for conducting the aforementioned protein analyses. Where desired, antibodies that recognize a specific type of post-translational modifications (e.g., signaling biochemical pathway inducible modifications) can be used. Post-translational modifications include but are not limited to glycosylation, lipidation, acetylation, and phosphorylation. These antibodies may be purchased from commercial vendors. For example, anti-phosphotyrosine antibodies that specifically recognize tyrosine-phosphorylated proteins are available from a number of vendors including Invitrogen and Perkin Elmer. Anti-phosphotyrosine antibodies are particularly useful in detecting proteins that are differentially phosphorylated on their tyrosine residues in response to an ER stress. Such proteins include but are not limited to eukaryotic translation initiation factor 2 alpha (eIF-2a). Alternatively, these antibodies can be generated using conventional polyclonal or monoclonal antibody technologies by immunizing a host animal or an antibody-producing cell with a target protein that exhibits the desired post-translational modification.

### Modification of a Cell or Organism

[0688] The present disclosure further provides cells comprising one or more components of the systems herein, e.g., the Fanzor polypeptide and/or nucleic acid component(s). Also provided include cells modified by the systems and methods herein, and cell cultures, tissues, organs, organism comprising such cells or progeny thereof. The invention comprehends a method of modifying an cell or organism. The cell may be a prokaryotic cell or a eukaryotic cell. The cell may be a mammalian cell. The mammalian cell many be a non-human primate, bovine, porcine, rodent or mouse cell. The cell may be a non-mammalian eukaryotic cell such as poultry, fish or shrimp. The cell may also be a plant cell. The plant cell may be of a crop plant such as cassava, corn, sorghum, wheat, or rice. The plant cell may also be of an algae, tree or vegetable. The modification introduced to the cell by the present invention may be such that the cell and progeny of the cell are altered for improved production of biologic products such as an antibody, starch, alcohol or other desired cellular output. The modification introduced to the cell by the present invention may be such that the cell and progeny of the cell include an alteration that changes the biologic product produced.

### Therapeutic Uses and Methods of Treatment

[0689] The systems, compositions, and formulations described herein can be used for diagnosing, prognosing, treating and/or preventing a disease, condition, disorder, or a symptom thereof. As such, also provided herein are methods of diagnosing, prognosing, treating, and/or preventing a disease, state, or condition in or of a subject. Generally, the methods of diagnosing, prognosing, treating, and/or preventing a disease, state, or condition in or of a subject can include modifying a polynucleotide in a subject or cell thereof using a composition, system, or component thereof described herein and/or include detecting a diseased or healthy polynucleotide in a subject or cell thereof using a composition, system, or component thereof described herein. In one embodiment, the method of treatment or prevention can include using a composition, system, or component thereof to modify a polynucleotide of an infectious organism (e.g., bacterial or virus) within a subject or cell thereof. In one embodiment, the method of treatment or prevention can include using a composition, system, or component thereof to modify a polynucleotide of an infectious organism or symbiotic organism within a subject. The composition, system, and components thereof can be used to develop models of diseases, states, or conditions. The composition, system, and components thereof can be used to detect a disease state or correction thereof, such as by a method of treatment or prevention described herein. The composition, system, and components thereof can be used to screen and select cells that can be used, for example, as treatments or preventions described herein. The composition, system, and components thereof can be used to develop biologically active agents that can be used to modify one or more biologic functions or activities in a subject or a cell thereof.

[0690] In general, the method can include delivering a composition, system, and/or component thereof to a subject or cell thereof, or to an infectious or symbiotic organism by a suitable delivery technique and/or composition. Once administered the components can operate as described elsewhere herein to elicit a nucleic acid modification event. In some aspects, the nucleic acid modification event can occur at the genomic, epigenomic, and/or transcriptomic level. DNA and/or RNA cleavage, gene activation, and/or gene deactivation can occur. Additional features, uses, and advantages are described in greater detail below. On the basis of this concept, several variations are appropriate to elicit a genomic locus event, including DNA cleavage, gene activation, or gene deactivation. Using the provided compositions, the person skilled in the art can advantageously and specifically target single or multiple loci with the same or different functional domains to elicit one or more genomic locus events. In addition to treating and/or preventing a disease in a subject, the compositions may be applied in a wide variety of methods for screening in libraries in cells and functional modeling in vivo (e.g., gene activation of lincRNA and identification of function; gain-of-function modeling; loss-of-function modeling; the use the compositions of the invention to establish cell lines and transgenic animals for optimization and screening purposes).

[0691] The composition, system, and components thereof described elsewhere herein can be used to treat and/or prevent a disease, such as a genetic and/or epigenetic disease, in a subject. The composition, system, and components thereof described elsewhere herein can be used to treat and/or prevent genetic infectious diseases in a subject, such as bacterial infections, viral infections, fungal infections, parasite infections, and combinations thereof. The composition, system, and components thereof described elsewhere herein can be used to modify the composition or profile of a microbiome in a subject, which can in turn modify the health status of the subject. The composition, system, described herein can be used to modify cells ex vivo, which can then be administered to the subject whereby the modified cells can treat or prevent a disease or symptom thereof. This is also referred to in some contexts as adoptive therapy. The composition, system, described herein can be used to treat mitochondrial diseases, where the mitochondrial disease etiology involves a mutation in the mitochondrial DNA.

[0692] Also provided is a method of treating a subject, e.g., a subject in need thereof, comprising inducing gene editing by transforming the subject with the polynucleotide encoding one or more components of the composition, system, or complex or any of polynucleotides or vectors described herein and administering them to the subject. A suitable repair template may also be provided, for example delivered by a vector comprising said repair template. The repair template may be a recombination template herein. Also provided is a method of treating a subject, e.g., a subject in need thereof, comprising inducing transcriptional activation or repression of multiple target gene loci by transforming the subject with the polynucleotides or vectors described herein, wherein said polynucleotide or vector encodes or comprises one or more components of composition, system, complex or component thereof comprising multiple Fanzor polypeptides. Where any treatment is occurring ex vivo, for example in a cell culture, then it will be appreciated that the term ‘subject’ may be replaced by the phrase “cell or cell culture.”

[0693] Also provided is a method of treating a subject, e.g., a subject in need thereof, comprising inducing gene editing by transforming the subject with the Fanzor polypeptide(s), advantageously encoding and expressing in vivo the remaining portions of the composition, system, (e.g., RNA). A suitable repair template may also be provided, for example delivered by a vector comprising said repair template. Also provided is a method of treating a subject, e.g., a subject in need thereof, comprising inducing transcriptional activation or repression by transforming the subject with the Fanzor polypeptide(s) advantageously encoding and expressing in vivo the remaining portions of the composition, system, (e.g., nucleic acid component molecule); advantageously in one embodiment the Fanzor polypeptide is a catalytically inactive Fanzor polypeptide and includes one or more associated functional domains. Where any treatment is occurring ex vivo, for example in a cell culture, then it will be appreciated that the term ‘subject’ may be replaced by the phrase “cell or cell culture.”

[0694] One or more components of the composition and system described herein can be included in a composition, such as a pharmaceutical composition, and administered to a host individually or collectively. Alternatively, these components may be provided in a single composition for administration to a host. Administration to a host may be performed via viral vectors known to the skilled person or described herein for delivery to a host (e.g., lentiviral vector, adenoviral vector, AAV vector). As explained herein, use of different selection markers (e.g., for lentiviral nucleic acid component selection) and concentration of nucleic acid component (e.g., dependent on whether multiple nucleic acid components are used) may be advantageous for eliciting an improved effect.

[0695] Thus, also described herein are methods of inducing one or more polynucleotide modifications in a eukaryotic or prokaryotic cell or component thereof (e.g., a mitochondria) of a subject, infectious organism, and/or organism of the microbiome of the subject. The modification can include the introduction, deletion, or substitution of one or more nucleotides at a target sequence of a polynucleotide of one or more cell(s). The modification can occur in vitro, ex vivo, in situ, or in vivo.

[0696] In one embodiment, the method of treating or inhibiting a condition or a disease caused by one or more mutations in a genomic locus in a eukaryotic organism or a non-human organism can include manipulation of a target sequence within a coding, non-coding or regulatory element of said genomic locus in a target sequence in a subject or a non-human subject in need thereof comprising modifying the subject or a non-human subject by manipulation of the target sequence and wherein the condition or disease is susceptible to treatment or inhibition by manipulation of the target sequence including providing treatment comprising delivering a composition comprising the particle delivery system or the delivery system or the virus particle of any one of the above embodiment or the cell of any one of the above embodiment.

[0697] Also provided herein is the use of the particle delivery system or the delivery system or the virus particle of any one of the above embodiments or the cell of any one of the above embodiment in ex vivo or in vivo gene or genome editing; or for use in in vitro, ex vivo or in vivo gene therapy. Also provided herein are particle delivery systems, non-viral delivery systems, and/or the virus particle of any one of the above embodiments or the cell of any one of the above embodiments used in the manufacture of a medicament for in vitro, ex vivo or in vivo gene or genome editing or for use in in vitro, ex vivo or in vivo gene therapy or for use in a method of modifying an organism or a non-human organism by manipulation of a target sequence in a genomic locus associated with a disease or in a method of treating or inhibiting a condition or disease caused by one or more mutations in a genomic locus in a eukaryotic organism or a non-human organism.

[0698] In one embodiment, polynucleotide modification can include the introduction, deletion, or substitution of 1-75 nucleotides at each target sequence of said polynucleotide of said cell(s). The modification can include the introduction, deletion, or substitution of at least 1, 5, 10, 11, 12, 13, 14, 15, 16, 17, 18, 19, 20, 21, 22, 23, 24, 25, 26, 27, 28, 29, 30, 35, 40, 45, 50, or 75 nucleotides at each target sequence. The modification can include the introduction, deletion, or substitution of at least 5, 10, 11, 12, 13, 14, 15, 16, 17, 18, 19, 20, 21, 22, 23, 24, 25, 26, 27, 28, 29, 30, 35, 40, 45, 50, or 75 nucleotides at each target sequence of said cell(s). The modification can include the introduction, deletion, or substitution of at least 10, 11, 12, 13, 14, 15, 16, 17, 18, 19, 20, 21, 22, 23, 24, 25, 26, 27, 28, 29, 30, 35, 40, 45, 50, or 75 nucleotides at each target sequence of said cell(s). The modification can include the introduction, deletion, or substitution of at least 20, 21, 22, 23, 24, 25, 26, 27, 28, 29, 30, 35, 40, 45, 50, or 75 nucleotides at each target sequence of said cell(s). The modification can include the introduction, deletion, or substitution of at least 40, 45, 50, 75, 100, 200, 300, 400 or 500 nucleotides at each target sequence of said cell(s). The modification can include the introduction, deletion, or substitution of at least 500, 600, 700, 800, 900, 1000, 1100, 1200, 1300, 1400, 1500, 1600, 1700, 1800, 1900, 2000, 2100, 2200, 2300, 2400, 2500, 2600, 2700, 2800, 2900, 3000, 3100, 3200, 3300, 3400, 3500, 3600, 3700, 3800, 3900, 4000, 4100, 4200, 4300, 4400, 4500, 4600, 4700, 4800, 4900, 5000, 5100, 5200, 5300, 5400, 5500, 5600, 5700, 5800, 5900, 6000, 6100, 6200, 6300, 6400, 6500, 6600, 6700, 6800, 6900, 7000, 7100, 7200, 7300, 7400, 7500, 7600, 7700, 7800, 7900, 8000, 8100, 8200, 8300, 8400, 8500, 8600, 8700, 8800, 8900, 9000, 9100, 9200, 9300, 9400, 9500, 9600, 9700, 9800, or 9900 to 10000 nucleotides at each target sequence of said cell(s).

[0699] In one embodiment, the modifications can include the introduction, deletion, or substitution of nucleotides at each target sequence of said cell(s) via nucleic acid components (e.g. nucleic acid component molecule(s) RNA(s) or nucleic acid component(s)), such as those mediated by a composition, system, or a component thereof described elsewhere herein. In one embodiment, the modifications can include the introduction, deletion, or substitution of nucleotides at a target or random sequence of said cell(s) via a composition, system, or technique.

[0700] In one embodiment, the composition, system, or component thereof can promote Non-Homologous End-Joining (NHEJ). In one embodiment, modification of a polynucleotide by a composition, system, or a component thereof, such as a diseased polynucleotide, can include NHEJ. In one embodiment, promotion of this repair pathway by the composition, system, or a component thereof can be used to target gene or polynucleotide specific knock-outs and/or knock-ins. In one embodiment, promotion of this repair pathway by the composition, system, or a component thereof can be used to generate NHEJ-mediated indels. Nuclease-induced NHEJ can also be used to remove (e.g., delete) sequence in a gene of interest. Generally, NHEJ repairs a double-strand break in the DNA by joining together the two ends; however, generally, the original sequence is restored only if two compatible ends, exactly as they were formed by the double-strand break, are perfectly ligated. The DNA ends of the double-strand break are frequently the subject of enzymatic processing, resulting in the addition or removal of nucleotides, at one or both strands, prior to rejoining of the ends. This results in the presence of insertion and/or deletion (indel) mutations in the DNA sequence at the site of the NHEJ repair. The indel can range in size from 1-50 or more base pairs. In one embodiment thee indel can be 1, 2, 3, 4, 5, 6, 7, 8, 9, 10, 11, 12, 13, 14, 15, 16, 17, 18, 19, 20, 21, 22, 23, 24, 25, 26, 27, 28, 29, 30, 31, 32, 33, 34, 35, 36, 37, 38, 39, 40, 41, 42, 43, 44, 45, 46, 47, 48, 49, 50, 51, 52, 53, 54, 55, 56, 57, 58, 59, 60, 61, 62, 63, 64, 65, 66, 67, 68, 69, 70, 71, 72, 73, 74, 75, 76, 77, 78, 79, 80, 81, 82, 83, 84, 85, 86, 87, 88, 89, 90, 91, 92, 93, 94, 95, 96, 97, 98, 99, 100, 101, 102, 103, 104, 105, 106, 107, 108, 109, 110, 111, 112, 113, 114, 115, 116, 117, 118, 119, 120, 121, 122, 123, 124, 125, 126, 127, 128, 129, 130, 131, 132, 133, 134, 135, 136, 137, 138, 139, 140, 141, 142, 143, 144, 145, 146, 147, 148, 149, 150, 151, 152, 153, 154, 155, 156, 157, 158, 159, 160, 161, 162, 163, 164, 165, 166, 167, 168, 169, 170, 171, 172, 173, 174, 175, 176, 177, 178, 179, 180, 181, 182, 183, 184, 185, 186, 187, 188, 189, 190, 191, 192, 193, 194, 195, 196, 197, 198, 199, 200, 201, 202, 203, 204, 205, 206, 207, 208, 209, 210, 211, 212, 213, 214, 215, 216, 217, 218, 219, 220, 221, 222, 223, 224, 225, 226, 227, 228, 229, 230, 231, 232, 233, 234, 235, 236, 237, 238, 239, 240, 241, 242, 243, 244, 245, 246, 247, 248, 249, 250, 251, 252, 253, 254, 255, 256, 257, 258, 259, 260, 261, 262, 263, 264, 265, 266, 267, 268, 269, 270, 271, 272, 273, 274, 275, 276, 277, 278, 279, 280, 281, 282, 283, 284, 285, 286, 287, 288, 289, 290, 291, 292, 293, 294, 295, 296, 297, 298, 299, 300, 301, 302, 303, 304, 305, 306, 307, 308, 309, 310, 311, 312, 313, 314, 315, 316, 317, 318, 319, 320, 321, 322, 323, 324, 325, 326, 327, 328, 329, 330, 331, 332, 333, 334, 335, 336, 337, 338, 339, 340, 341, 342, 343, 344, 345, 346, 347, 348, 349, 350, 351, 352, 353, 354, 355, 356, 357, 358, 359, 360, 361, 362, 363, 364, 365, 366, 367, 368, 369, 370, 371, 372, 373, 374, 375, 376, 377, 378, 379, 380, 381, 382, 383, 384, 385, 386, 387, 388, 389, 390, 391, 392, 393, 394, 395, 396, 397, 398, 399, 400, 401, 402, 403, 404, 405, 406, 407, 408, 409, 410, 411, 412, 413, 414, 415, 416, 417, 418, 419, 420, 421, 422, 423, 424, 425, 426, 427, 428, 429, 430, 431, 432, 433, 434, 435, 436, 437, 438, 439, 440, 441, 442, 443, 444, 445, 446, 447, 448, 449, 450, 451, 452, 453, 454, 455, 456, 457, 458, 459, 460, 461, 462, 463, 464, 465, 466, 467, 468, 469, 470, 471, 472, 473, 474, 475, 476, 477, 478, 479, 480, 481, 482, 483, 484, 485, 486, 487, 488, 489, 490, 491, 492, 493, 494, 495, 496, 497, 498, 499, or 500 base pairs or more. If a double-strand break is targeted near to a short target sequence, the deletion mutations caused by the NHEJ repair often span, and therefore remove, the unwanted nucleotides. For the deletion of larger DNA segments, introducing two double-strand breaks, one on each side of the sequence, can result in NHEJ between the ends with removal of the entire intervening sequence. Both of these approaches can be used to delete specific DNA sequences.

[0701] In one embodiment, composition, system, mediated NHEJ can be used in the method to delete small sequence motifs. In one embodiment, composition, system, mediated NHEJ can be used in the method to generate NHEJ-mediate indels that can be targeted to the gene, e.g., a coding region, e.g., an early coding region of a gene of interest can be used to knockout (i.e., eliminate expression of) a gene of interest. For example, early coding region of a gene of interest includes sequence immediately following a transcription start site, within a first exon of the coding sequence, or within 500 bp of the transcription start site (e.g., less than 500, 450, 400, 350, 300, 250, 200, 150, 100 or 50 bp). In an embodiment, in which a nucleic acid component and Fanzor polypeptide generate a double strand break for the purpose of inducing NHEJ-mediated indels, a nucleic acid component may be configured to position one double-strand break in close proximity to a nucleotide of the target position. In an embodiment, the cleavage site may be between 0-500 bp away from the target position (e.g., less than 500, 400, 300, 200, 100, 50, 40, 30, 25, 20, 15, 10, 9, 8, 7, 6, 5, 4, 3, 2 or 1 bp from the target position). In an embodiment, in which two component RNAs complexing with one or more nickases induce two single strand breaks for the purpose of inducing NHEJ-mediated indels, two component RNAs may be configured to position two single-strand breaks to provide for NHEJ repair a nucleotide of the target position.

[0702] For minimization of toxicity and off-target effect, it may be important to control the concentration of Fanzor polypeptide mRNA and component RNA delivered. Optimal concentrations of Fanzor polypeptide mRNA and component RNA can be determined by testing different concentrations in a cellular or non-human eukaryote animal model and using deep sequencing the analyze the extent of modification at potential off-target genomic loci. Alternatively, to minimize the level of toxicity and off-target effect, nickase mRNA (for example a mutated Fanzor) can be delivered with a pair of nucleic acid components targeting a site of interest.

[0703] Typically, in the context of an endogenous Fanzor polypeptide, formation of a Fanzor polypeptide or complex (comprising a polynucleotide component sequence hybridized to a target sequence and complexed with one or more Fanzor polypeptides) results in cleavage, nicking, and/or another modification of one or both strands in or near (e.g., within 1, 2, 3, 4, 5, 6, 7, 8, 9, 10, 20, 50, or more base pairs from) the target sequence.

[0704] In one embodiment, a method of modifying a target polynucleotide in a cell to treat or prevent a disease can include allowing a composition, system, or component thereof to bind to the target polynucleotide, e.g., to effect cleavage, nicking, or other modification as the composition, system, is capable of said target polynucleotide, thereby modifying the target polynucleotide, wherein the composition, system, or component thereof, complex with a nucleic acid component molecule sequence, and hybridize said nucleic acid component molecule sequence to a target sequence within the target polynucleotide, wherein said nucleic acid component molecule sequence is optionally linked to a nucleic acid component scaffold sequence. In some of these embodiments, the composition, system, or component thereof can be or include a Fanzor polypeptide complexed with a nucleic acid component molecule sequence. In one embodiment, modification can include cleaving or nicking one or two strands at the location of the target sequence by one or more components of the composition, system, or component thereof.

[0705] The cleavage, nicking, or other modification capable of being performed by the composition, system, can modify transcription of a target polynucleotide. In one embodiment, modification of transcription can include decreasing transcription of a target polynucleotide. In one embodiment, modification can include increasing transcription of a target polynucleotide. In one embodiment, the method includes repairing said cleaved target polynucleotide by homologous recombination with an recombination template polynucleotide, wherein said repair results in a modification such as, but not limited to, an insertion, deletion, or substitution of one or more nucleotides of said target polynucleotide. In one embodiment, said modification results in one or more amino acid changes in a protein expressed from a gene comprising the target sequence. In one embodiment, the modification imparted by the composition, system, or component thereof provides a transcript and/or protein that can correct a disease or a symptom thereof, including but not limited to, any of those described in greater detail elsewhere herein.

[0706] In one embodiment, the method of treating or preventing a disease can include delivering one or more vectors or vector systems to a cell, such as a eukaryotic or prokaryotic cell, wherein one or more vectors or vector systems include the composition, system, or component thereof. In one embodiment, the vector(s) or vector system(s) can be a viral vector or vector system, such as an AAV or lentiviral vector system, which are described in greater detail elsewhere herein. In one embodiment, the method of treating or preventing a disease can include delivering one or more viral particles, such as an AAV or lentiviral particle, containing the composition, system, or component thereof. In one embodiment, the viral particle has a tissue specific tropism. In one embodiment, the viral particle has a liver, muscle, eye, heart, pancreas, kidney, neuron, epithelial cell, endothelial cell, astrocyte, glial cell, immune cell, or red blood cell specific tropism.

[0707] It will be understood that the composition and system, according to the invention as described herein, such as the composition and system, for use in the methods according to the invention as described herein, may be suitably used for any type of application known for composition, system, preferably in eukaryotes. In certain aspects, the application is therapeutic, preferably therapeutic in a eukaryote organism, such as including but not limited to animals (including human), plants, algae, fungi (including yeasts), etc. Alternatively, or in addition, in certain aspects, the application may involve accomplishing or inducing one or more particular traits or characteristics, such as genotypic and/or phenotypic traits or characteristics, as also described elsewhere herein.

### Exemplary Disease Treatments

[0708] The following discussion provides non-limiting exemplary uses of the systems and compositions of the present invention in the context of non-limiting exemplary diseases.

### Treating Diseases of the Circulatory System

[0709] In one embodiment, the composition, system, and/or component thereof described herein can be used to treat and/or prevent a circulatory system disease. Exemplary disease is provided, for example, in Tables 4A-4B. In one embodiment the plasma exosomes of Wahlgren et al. (Nucleic Acids Research, 2012, Vol. 40, No. 17 e¹³⁰) can be used to deliver the composition, system, and/or component thereof described herein to the blood. In one embodiment, the circulatory system disease can be treated by using a lentivirus to deliver the composition, system, described herein to modify hematopoietic stem cells (HSCs) in vivo or ex vivo (see e.g. Drakopoulou, “Review Article, The Ongoing Challenge of Hematopoietic Stem Cell-Based Gene Therapy for-Thalassemia,” Stem Cells International, Volume 2011, Article ID 987980, 10 pages, doi: 10.4061/2011/987980, which can be adapted for use with the composition, system, herein in view of the description herein). In one embodiment, the circulatory system disorder can be treated by correcting HSCs as to the disease using a composition, system, herein or a component thereof, wherein the composition, system, optionally includes a suitable HDR repair template (see e.g. Cavazzana, “Outcomes of Gene Therapy for B-Thalassemia Major via Transplantation of Autologous Hematopoietic Stem Cells Transduced Ex Vivo with a Lentiviral BA-T87Q-Globin Vector.”; Cavazzana-Calvo, “Transfusion independence and HMGA2 activation after gene therapy of human β-thalassaemia”, Nature 467, 318-322 (16 Sep. 2010) doi: 10.1038/nature⁰⁹³²⁸; Nienhuis, “Development of Gene Therapy for Thalassemia, Cold Spring Harbor Perspectives in Medicine, doi: 10.1101/cshperspect.α011833 (2012), LentiGlobin BB305, a lentiviral vector containing an engineered B-globin gene (BA-T87Q); and Xie et al., “Seamless gene correction of B-thalassaemia mutations in patient-specific iPSCs using CRISPR/Cas9 and piggyback” Genome Research gr.173427.114 (2014) www.genome.org/cgi/doi/10.1101/gr.173427.114 (Cold Spring Harbor Laboratory Press; Watts, “Hematopoietic Stem Cell Expansion and Gene Therapy” Cytotherapy 13 (10): 1164-1171. doi: 10.3109/14653249.2011.620748 (2011), which can be adapted for use with the composition, system, herein in view of the description herein). In one embodiment, iPSCs can be modified using a composition, system, described herein to correct a disease polynucleotide associated with a circulatory disease. In this regard, the teachings of Xu et al. (Sci Rep. 2015 Jul. 9; 5:12065. doi: 10.1038/srep12065) and Song et al. (Stem Cells Dev. 2015 May 1;24 (9): 1053-65. doi: 10.1089/scd.2014.0347. Epub 2015 Feb. 5) with respect to modifying iPSCs can be adapted for use in view of the description herein with the composition, system, described herein.

[0710] The term “Hematopoietic Stem Cell” or “HSC” refers broadly those cells considered to be an HSC, e.g., blood cells that give rise to all the other blood cells and are derived from mesoderm; located in the red bone marrow, which is contained in the core of most bones. HSCs of the invention include cells having a phenotype of hematopoietic stem cells, identified by small size, lack of lineage (lin) markers, and markers that belong to the cluster of differentiation series, like: CD34, CD38, CD90, CD133, CD105, CD45, and also c-kit,—the receptor for stem cell factor. Hematopoietic stem cells are negative for the markers that are used for detection of lineage commitment, and are, thus, called Lin-; and, during their purification by FACS, a number of up to 14 different mature blood-lineage markers, e.g., CD13 & CD33 for myeloid, CD71 for erythroid, CD19 for B cells, CD61 for megakaryocytic, etc. for humans; and, β220 (murine CD45) for B cells, Mac-1 (CD11b/CD18) for monocytes, Gr-1 for Granulocytes, Ter119 for erythroid cells, Il7Ra, CD3, CD4, CD5, CD8 for T cells, etc. Mouse HSC markers: CD34lo/−, SCA-1+, Thyl.1+/lo, CD38+, C-kit+, lin-, and Human HSC markers: CD34+, CD59+, Thyl/CD90+, CD38lo/−, C-kit/CD117+, and lin-. HSCs are identified by markers. Hence in embodiments discussed herein, the HSCs can be CD34+ cells. HSCs can also be hematopoietic stem cells that are CD34-/CD38-. Stem cells that may lack c-kit on the cell surface that are considered in the art as HSCs are within the ambit of the invention, as well as CD133+ cells likewise considered HSCs in the art.

[0711] In one embodiment, the treatment or prevention for treating a circulatory system or blood disease can include modifying a human cord blood cell with any modification described herein. In one embodiment, the treatment or prevention for treating a circulatory system or blood disease can include modifying a granulocyte colony-stimulating factor-mobilized peripheral blood cell (mPB) with any modification described herein. In one embodiment, the human cord blood cell or mPB can be CD34+. In one embodiment, the cord blood cell(s) or mPB cell(s) modified can be autologous. In one embodiment, the cord blood cell(s) or mPB cell(s) can be allogenic. In addition to the modification of the disease gene(s), allogenic cells can be further modified using the composition, system, described herein to reduce the immunogenicity of the cells when delivered to the recipient. Such techniques are described elsewhere herein and e.g., Cartier, “MINI-SYMPOSIUM: X-Linked Adrenoleukodystrophypa, Hematopoietic Stem Cell Transplantation and Hematopoietic Stem Cell Gene Therapy in X-Linked Adrenoleukodystrophy,” Brain Pathology 20 (2010) 857-862, which can be adapted for use with the composition, system, herein. The modified cord blood cell(s) or mPB cell(s) can be optionally expanded in vitro. The modified cord blood cell(s) or mPB cell(s) can be derived to a subject in need thereof using any suitable delivery technique.

[0712] The compositions may be engineered to target genetic locus or loci in HSCs. In one embodiment, the Fanzor polypeptide(s) can be codon-optimized for a eukaryotic cell and especially a mammalian cell, e.g., a human cell, for instance, HSC, or iPSC and nucleic acid component targeting a locus or loci in HSC, such as circulatory disease, can be prepared. These may be delivered via particles. The particles may be formed by the Fanzor polypeptide and the nucleic acid component being admixed. The nucleic acid component and Fanzor polypeptide mixture can be, for example, admixed with a mixture comprising or consisting essentially of or consisting of surfactant, phospholipid, biodegradable polymer, lipoprotein and alcohol, whereby particles containing the nucleic acid component and Fanzor polypeptide may be formed. The invention comprehends so making particles and particles from such a method as well as uses thereof. Particles suitable delivery of the composition in the context of blood or circulatory system or HSC delivery to the blood or circulatory system are described in greater detail elsewhere herein.

[0713] In one embodiment, after ex vivo modification the HSCs or iPCS can be expanded prior to administration to the subject. Expansion of HSCs can be via any suitable method such as that described by, Lee, “Improved ex vivo expansion of adult hematopoietic stem cells by overcoming CUL4-mediated degradation of HOXB4.” Blood. 2013 May 16;121 (20): 4082-9. doi: 10.1182/blood-2012-09-455204. Epub 2013 Mar. 21.

[0714] In one embodiment, the HSCs or iPSCs modified can be autologous. In one embodiment, the HSCs or iPSCs can be allogenic. In addition to the modification of the disease gene(s), allogenic cells can be further modified using the composition, system, described herein to reduce the immunogenicity of the cells when delivered to the recipient. Such techniques are described elsewhere herein and e.g., Cartier, “MINI-SYMPOSIUM: X-Linked Adrenoleukodystrophypa, Hematopoietic Stem Cell Transplantation and Hematopoietic Stem Cell Gene Therapy in X-Linked Adrenoleukodystrophy,” Brain Pathology 20 (2010) 857-862, which can be adapted for use with the composition, system, herein.

### Treating Neurological Diseases

[0715] In one embodiment, the compositions, systems, described herein can be used to treat diseases of the brain and CNS. Delivery options for the brain include encapsulation of Fanzor polypeptide and nucleic acid component molecule in the form of either DNA or RNA into liposomes and conjugating to molecular Trojan horses for trans-blood brain barrier (BBB) delivery. Molecular Trojan horses have been shown to be effective for delivery of B-gal expression vectors into the brain of non-human primates. The same approach can be used to delivery vectors containing Fanzor polypeptide and nucleic acid component molecule. For instance, Xia CF and Boado RJ, Pardridge WM (“Antibody-mediated targeting of siRNA via the human insulin receptor using avidin-biotin technology.” Mol Pharm. 2009 May-Jun;6 (3): 747-51. doi: 10.1021/mp800194) describes how delivery of short interfering RNA (siRNA) to cells in culture, and in vivo, is possible with combined use of a receptor-specific monoclonal antibody (mAb) and avidin-biotin technology. The authors also report that because the bond between the targeting mAb and the siRNA is stable with avidin-biotin technology, and RNAi effects at distant sites such as brain are observed in vivo following an intravenous administration of the targeted siRNA, the teachings of which can be adapted for use with the compositions, systems, herein. In other embodiments, an artificial virus can be generated for CNS and/or brain delivery. See e.g., Zhang et al. (Mol Ther. 2003 January;7 (1): 11-8.)), the teachings of which can be adapted for use with the compositions, systems, herein.

### Treating Hearing Diseases

[0716] In one embodiment the composition and system described herein can be used to treat a hearing disease or hearing loss in one or both ears. Deafness is often caused by lost or damaged hair cells that cannot relay signals to auditory neurons. In such cases, cochlear implants may be used to respond to sound and transmit electrical signals to the nerve cells. But these neurons often degenerate and retract from the cochlea as fewer growth factors are released by impaired hair cells.

[0717] In one embodiment, the composition, system, or modified cells can be delivered to one or both ears for treating or preventing hearing disease or loss by any suitable method or technique. Suitable methods and techniques include, but are not limited to, those set forth in US Patent Publication No. 20120328580 describes injection of a pharmaceutical composition into the ear (e.g., auricular administration), such as into the luminae of the cochlea (e.g., the Scala media, Sc vestibulae, and Sc tympani), e.g., using a syringe, e.g., a single-dose syringe. For example, one or more of the compounds described herein can be administered by intratympanic injection (e.g., into the middle ear), and/or injections into the outer, middle, and/or inner ear; administration in situ, via a catheter or pump (see e.g. McKenna et al., (U.S. Patent Publication No. 2006/0030837) and Jacobsen et al., (U.S. Pat. No. 7,206,639); administration in combination with a mechanical device such as a cochlear implant or a hearing aid, which is worn in the outer ear (see e.g. U.S. Patent Publication No. 2007/0093878, which provides an exemplary cochlear implant suitable for delivery of the compositions, systems, described herein to the ear). Such methods are routinely used in the art, for example, for the administration of steroids and antibiotics into human ears. Injection can be, for example, through the round window of the ear or through the cochlear capsule. Other inner ear administration methods are known in the art (see, e.g., Salt and Plontke, Drug Discovery Today, 10:1299-1306, 2005). In one embodiment, a catheter or pump can be positioned, e.g., in the ear (e.g., the outer, middle, and/or inner ear) of a patient during a surgical procedure. In one embodiment, a catheter or pump can be positioned, e.g., in the ear (e.g., the outer, middle, and/or inner ear) of a patient without the need for a surgical procedure.

[0718] In general, the cell therapy methods described in US Patent Publication No. 20120328580 can be used to promote complete or partial differentiation of a cell to or towards a mature cell type of the inner ear (e.g., a hair cell) in vitro. Cells resulting from such methods can then be transplanted or implanted into a patient in need of such treatment. The cell culture methods required to practice these methods, including methods for identifying and selecting suitable cell types, methods for promoting complete or partial differentiation of selected cells, methods for identifying complete or partially differentiated cell types, and methods for implanting complete or partially differentiated cells are described below.

[0719] Cells suitable for use in the present invention include, but are not limited to, cells that are capable of differentiating completely or partially into a mature cell of the inner ear, e.g., a hair cell (e.g., an inner and/or outer hair cell), when contacted, e.g., in vitro, with one or more of the compounds described herein. Exemplary cells that are capable of differentiating into a hair cell include, but are not limited to stem cells (e.g., inner ear stem cells, adult stem cells, bone marrow derived stem cells, embryonic stem cells, mesenchymal stem cells, skin stem cells, iPS cells, and fat derived stem cells), progenitor cells (e.g., inner ear progenitor cells), support cells (e.g., Deiters' cells, pillar cells, inner phalangeal cells, tectal cells and Hensen's cells), and/or germ cells. The use of stem cells for the replacement of inner ear sensory cells is described in Li et al., (U.S. Patent Publication No. 2005/0287127) and Li et al., (U.S. patent application Ser. No. 11/953,797). The use of bone marrow derived stem cells for the replacement of inner ear sensory cells is described in Edge et al., PCT/US2007/084654. iPS cells are described, e.g., at Takahashi et al., Cell, Volume 131, Issue 5, Pages 861-872 (2007); Takahashi and Yamanaka, Cell 126, 663-76 (2006); Okita et al., Nature 448, 260-262 (2007); Yu, J. et al., Science 318 (5858): 1917-1920 (2007); Nakagawa et al., Nat. Biotechnol. 26:101-106 (2008); and Zaehres and Scholer, Cell 131 (5): 834-835 (2007). Such suitable cells can be identified by analyzing (e.g., qualitatively or quantitatively) the presence of one or more tissue specific genes. For example, gene expression can be detected by detecting the protein product of one or more tissue-specific genes. Protein detection techniques involve staining proteins (e.g., using cell extracts or whole cells) using antibodies against the appropriate antigen. In this case, the appropriate antigen is the protein product of the tissue-specific gene expression. Although, in principle, a first antibody (i.e., the antibody that binds the antigen) can be labeled, it is more common (and improves the visualization) to use a second antibody directed against the first (e.g., an anti-IgG). This second antibody is conjugated either with fluorochromes, or appropriate enzymes for colorimetric reactions, or gold beads (for electron microscopy), or with the biotin-avidin system, so that the location of the primary antibody, and thus the antigen, can be recognized.

[0720] The composition and system may be delivered to the ear by direct application of pharmaceutical composition to the outer ear, with compositions modified from US Patent Publication No. 20110142917. In one embodiment the pharmaceutical composition is applied to the ear canal. Delivery to the ear may also be referred to as aural or otic delivery.

[0721] In one embodiment, the compositions, systems, or components thereof and/or vectors or vector systems can be delivered to ear via a transfection to the inner ear through the intact round window by a novel proteidic delivery technology which may be applied to the nucleic acid-targeting system of the present invention (see, e.g., Qi et al., Gene Therapy (2013), 1-9). About 40 μl of 10 mM RNA may be contemplated as the dosage for administration to the ear.

[0722] According to Rejali et al. (Hear Res. 2007 June;228 (1-2): 180-7), cochlear implant function can be improved by good preservation of the spiral ganglion neurons, which are the target of electrical stimulation by the implant and brain derived neurotrophic factor (BDNF) has previously been shown to enhance spiral ganglion survival in experimentally deafened ears. Rejali et al. tested a modified design of the cochlear implant electrode that includes a coating of fibroblast cells transduced by a viral vector with a BDNF gene insert. To accomplish this type of ex vivo gene transfer, Rejali et al. transduced guinea pig fibroblasts with an adenovirus with a BDNF gene cassette insert, and determined that these cells secreted BDNF and then attached BDNF-secreting cells to the cochlear implant electrode via an agarose gel, and implanted the electrode in the scala tympani. Rejali et al. determined that the BDNF expressing electrodes were able to preserve significantly more spiral ganglion neurons in the basal turns of the cochlea after 48 days of implantation when compared to control electrodes and demonstrated the feasibility of combining cochlear implant therapy with ex vivo gene transfer for enhancing spiral ganglion neuron survival. Such a system may be applied to the nucleic acid-targeting system of the present invention for delivery to the ear.

[0723] In one embodiment, the system set forth in Mukherjea et al. (Antioxidants & Redox Signaling, Volume 13, Number 5, 2010) can be adapted for transtympanic administration of the composition, system, or component thereof to the ear. In one embodiment, a dosage of about 2 mg to about 4 mg of Fanzor polypeptide for administration to a human.

[0724] In one embodiment, the system set forth in [Jung et al. (Molecular Therapy, vol. 21 no. 4, 834-841 Apr. 2013) can be adapted for vestibular epithelial delivery of the composition, system, or component thereof to the ear. In one embodiment, a dosage of about 1 to about 30 mg of Fanzor polypeptide for administration to a human.

### Treating Diseases in Non-Dividing Cells

[0725] In one embodiment, the gene or transcript to be corrected is in a non-dividing cell. Exemplary non-dividing cells are muscle cells or neurons. Non-dividing (especially non-dividing, fully differentiated) cell types present issues for gene targeting or genome engineering, for example because homologous recombination (HR) is generally suppressed in the G1 cell-cycle phase. However, while studying the mechanisms by which cells control normal DNA repair systems, Durocher discovered a previously unknown switch that keeps HR “off”′ in non-dividing cells and devised a strategy to toggle this switch back on. Orthwein et al. (Daniel Durocher's lab at the Mount Sinai Hospital in Ottawa, Canada) recently reported (Nature 16142, published online 9 Dec. 2015) have shown that the suppression of HR can be lifted and gene targeting successfully concluded in both kidney (293T) and osteosarcoma (U2OS) cells. Tumor suppressors, BRCA1, PALB2 and BRAC2 are known to promote DNA DSB repair by HR. They found that formation of a complex of BRCA1 with PALB2-BRAC2 is governed by a ubiquitin site on PALB2, such that action on the site by an E3 ubiquitin ligase. This E3 ubiquitin ligase is composed of KEAP1 (a PALB2-interacting protein) in complex with cullin-3 (CUL3)-RBX1. PALB2 ubiquitylation suppresses its interaction with BRCA1 and is counteracted by the deubiquitylase USP11, which is itself under cell cycle control. Restoration of the BRCA1-PALB2 interaction combined with the activation of DNA-end resection is sufficient to induce homologous recombination in G1, as measured by a number of methods including a Cas polypeptide nuclease-based gene-targeting assay directed at USP11 or KEAP1 (expressed from a pX459 vector). However, when the BRCA1-PALB2 interaction was restored in resection-competent G1 cells using either KEAP1 depletion or expression of the PALB2-KR mutant, a robust increase in gene-targeting events was detected. These teachings can be adapted for and/or applied to the compositions, systems, described herein.

[0726] Thus, reactivation of HR in cells, especially non-dividing, fully differentiated cell types is preferred, In one embodiment. In one embodiment, promotion of the BRCA1-PALB2 interaction is preferred In one embodiment. In one embodiment, the target ell is a non-dividing cell. In one embodiment, the target cell is a neuron or muscle cell. In one embodiment, the target cell is targeted in vivo. In one embodiment, the cell is in G1 and HR is suppressed. In one embodiment, use of KEAP1 depletion, for example inhibition of expression of KEAP1 activity, is preferred. KEAP1 depletion may be achieved through siRNA, for example as shown in Orthwein et al. Alternatively, expression of the PALB2-KR mutant (lacking all eight Lys residues in the BRCA1-interaction domain is preferred, either in combination with KEAP1 depletion or alone. PALB2-KR interacts with BRCA1 irrespective of cell cycle position. Thus, promotion or restoration of the BRCA1-PALB2 interaction, especially in G1 cells, is preferred In one embodiment, especially where the target cells are non-dividing, or where removal and return (ex vivo gene targeting) is problematic, for example neuron or muscle cells. KEAP1 siRNA is available from ThermoFischer. In one embodiment, a BRCA1-PALB2 complex may be delivered to the G1 cell. In one embodiment, PALB2 deubiquitylation may be promoted for example by increased expression of the deubiquitylase USP11, so it is envisaged that a construct may be provided to promote or up-regulate expression or activity of the deubiquitylase USP11.

### Treating Diseases of the Eye

[0727] In one embodiment, the disease to be treated is a disease that affects the eyes. Thus, In one embodiment, the composition, system, or component thereof described herein is delivered to one or both eyes.

[0728] The composition, system, can be used to correct ocular defects that arise from several genetic mutations further described in Genetic Diseases of the Eye, Second Edition, edited by Elias I. Traboulsi, Oxford University Press, 2012.

[0729] In one embodiment, the condition to be treated or targeted is an eye disorder. In one embodiment, the eye disorder may include glaucoma. In one embodiment, the eye disorder includes a retinal degenerative disease. In one embodiment, the retinal degenerative disease is selected from Stargardt disease, Bardet-Biedl Syndrome, Best disease, Blue Cone Monochromacy, Choroidermia, Cone-rod dystrophy, Congenital Stationary Night Blindness, Enhanced S-Cone Syndrome, Juvenile X-Linked Retinoschisis, Leber Congenital Amaurosis, Malattia Leventinesse, Norrie Disease or X-linked Familial Exudative Vitreoretinopathy, Pattern Dystrophy, Sorsby Dystrophy, Usher Syndrome, Retinitis Pigmentosa, Achromatopsia or Macular dystrophies or degeneration, Retinitis Pigmentosa, Achromatopsia, and age related macular degeneration. In one embodiment, the retinal degenerative disease is Leber Congenital Amaurosis (LCA) or Retinitis Pigmentosa. Other exemplary eye diseases are described in greater detail elsewhere herein.

[0730] In one embodiment, the composition, system, is delivered to the eye, optionally via intravitreal injection or subretinal injection. Intraocular injections may be performed with the aid of an operating microscope. For subretinal and intravitreal injections, eyes may be prolapsed by gentle digital pressure and fundi visualized using a contact lens system consisting of a drop of a coupling medium solution on the cornea covered with a glass microscope slide coverslip. For subretinal injections, the tip of a 10-mm 34-gauge needle, mounted on a 5-μl Hamilton syringe may be advanced under direct visualization through the superior equatorial sclera tangentially towards the posterior pole until the aperture of the needle was visible in the subretinal space. Then, 2 μl of vector suspension may be injected to produce a superior bullous retinal detachment, thus confirming subretinal vector administration. This approach creates a self-sealing sclerotomy allowing the vector suspension to be retained in the subretinal space until it is absorbed by the RPE, usually within 48 h of the procedure. This procedure may be repeated in the inferior hemisphere to produce an inferior retinal detachment. This technique results in the exposure of approximately 70% of neurosensory retina and RPE to the vector suspension. For intravitreal injections, the needle tip may be advanced through the sclera 1 mm posterior to the corneoscleral limbus and 2 μl of vector suspension injected into the vitreous cavity. For intracameral injections, the needle tip may be advanced through a corneoscleral limbal paracentesis, directed towards the central cornea, and 2 μl of vector suspension may be injected. For intracameral injections, the needle tip may be advanced through a corneoscleral limbal paracentesis, directed towards the central cornea, and 2 μl of vector suspension may be injected. These vectors may be injected at titers of either 1.0-1.4×10¹⁰ or 1.0-1.4×10⁹ transducing units (TU)/ml.

[0731] In one embodiment, for administration to the eye, lentiviral vectors. In one embodiment, the lentiviral vector is an equine infectious anemia virus (EIAV) vector. Exemplary EIAV vectors for eye delivery are described in Balagaan, J Gene Med 2006; 8:275-285, Published online 21 Nov. 2005 in Wiley InterScience (www.interscience.wiley.com). DOI: 10.1002/jgm.845; Binley et al., HUMAN GENE THERAPY 23:980-991 (September 2012), which can be adapted for use with the composition, system, described herein. In one embodiment, the dosage can be 1.1×105 transducing units per eye (TU/eye) in a total volume of 100 μl.

[0732] Other viral vectors can also be used for delivery to the eye, such as AAV vectors, such as those described in Campochiaro et al., Human Gene Therapy 17:167-176 (February 2006), Millington-Ward et al. (Molecular Therapy, vol. 19 no. 4, 642-649 Apr. 2011; Dalkara et al. (Sci Transl Med 5, 189ra76 (2013)), which can be adapted for use with the composition, system, described herein. In one embodiment, the dose can range from about 106 to 109.5 particle units. In the context of the Millington-Ward AAV vectors, a dose of about 2×10¹¹ to about 6×10¹³ virus particles can be administered. In the context of Dalkara vectors, a dose of about 1×10¹⁵ to about 1×10¹⁶ vg/ml administered to a human.

[0733] In one embodiment, the sd-rxRNA® system of R×i Pharmaceuticals may be used/and or adapted for delivering composition, system, to the eye. In this system, a single intravitreal administration of 3 μg of sd-rxRNA results in sequence-specific reduction of PPIB mRNA levels for 14 days. The sd-rxRNA® system may be applied to the nucleic acid-targeting system of the present invention, contemplating a dose of about 3 to 20 mg of composition administered to a human.

[0734] In other embodiments, the methods of US Patent Publication No. 20130183282, which is directed to methods of cleaving a target sequence from the human rhodopsin gene, may also be modified to the nucleic acid-targeting system of the present invention.

[0735] In other embodiments, the methods of US Patent Publication No. 20130202678 for treating retinopathies and sight-threatening ophthalmologic disorders relating to delivering of the Puf-A gene (which is expressed in retinal ganglion and pigmented cells of eye tissues and displays a unique anti-apoptotic activity) to the sub-retinal or intravitreal space in the eye may be used or adapted. In particular, desirable targets are zgc: 193933, prdmla, spata2, tex10, rbb4, ddx3, zp2.2, Blimp-1 and HtrA2, all of which may be targeted by the composition, system, of the present invention.

[0736] Wu (Cell Stem Cell, 13:659-62, 2013) designed a guide RNA that led Cas9 to a single base pair mutation that causes cataracts in mice, where it induced DNA cleavage. Then using either the other wild-type allele or oligos given to the zygotes repair mechanisms corrected the sequence of the broken allele and corrected the cataract-causing genetic defect in mutant mouse. This approach can be adapted to and/or applied to the Fanzor compositions, systems, described herein.

[0737] US Patent Publication No. 20120159653, describes use of zinc finger nucleases to genetically modify cells, animals and proteins associated with macular degeneration (MD), the teachings of which can be applied to and/or adapted for the Fanzor compositions, systems, described herein.

[0738] One aspect of US Patent Publication No. 20120159653 relates to editing of any chromosomal sequences that encode proteins associated with MD which may be applied to the nucleic acid-targeting system of the present invention.

### Treating Muscle Diseases and Cardiovascular Diseases

[0739] In one embodiment, the composition, system can be used to treat and/or prevent a muscle disease and associated circulatory or cardiovascular disease or disorder. The present invention also contemplates delivering the composition, system, described herein, e.g., Fanzor effector protein systems, to the heart. For the heart, a myocardium tropic adeno-associated virus (AAVM) is preferred, in particular AAVM41 which showed preferential gene transfer in the heart (see, e.g., Lin-Yanga et al., PNAS, Mar. 10, 2009, vol. 106, no. 10). Administration may be systemic or local. A dosage of about 1-10×10¹⁴ vector genomes are contemplated for systemic administration. See also, e.g., Eulalio et al. (2012) Nature 492:376 and Somasuntharam et al. (2013) Biomaterials 34:7790, the teachings of which can be adapted for and/or applied to the compositions, systems, described herein.

[0740] For example, US Patent Publication No. 20110023139, the teachings of which can be adapted for and/or applied to the compositions, systems, described herein describes use of zinc finger nucleases to genetically modify cells, animals and proteins associated with cardiovascular disease. Cardiovascular diseases generally include high blood pressure, heart attacks, heart failure, and stroke and TIA. Any chromosomal sequence involved in cardiovascular disease, or the protein encoded by any chromosomal sequence involved in cardiovascular disease may be utilized in the methods described in this disclosure. The cardiovascular-related proteins are typically selected based on an experimental association of the cardiovascular-related protein to the development of cardiovascular disease. For example, the production rate or circulating concentration of a cardiovascular-related protein may be elevated or depressed in a population having a cardiovascular disorder relative to a population lacking the cardiovascular disorder. Differences in protein levels may be assessed using proteomic techniques including but not limited to Western blot, immunohistochemical staining, enzyme linked immunosorbent assay (ELISA), and mass spectrometry. Alternatively, the cardiovascular-related proteins may be identified by obtaining gene expression profiles of the genes encoding the proteins using genomic techniques including but not limited to DNA microarray analysis, serial analysis of gene expression (SAGE), and quantitative real-time polymerase chain reaction (Q-PCR).

[0741] The compositions, systems, herein can be used for treating diseases of the muscular system. The present invention also contemplates delivering the composition, system, described herein, effector protein systems, to muscle(s).

[0742] In one embodiment, the muscle disease to be treated is a muscle dystrophy such as DMD. In one embodiment, the composition, system, such as a system capable of RNA modification, described herein can be used to achieve exon skipping to achieve correction of the diseased gene. As used herein, the term “exon skipping” refers to the modification of pre-mRNA splicing by the targeting of splice donor and/or acceptor sites within a pre-mRNA with one or more complementary antisense oligonucleotide(s) (AONs). By blocking access of a spliceosome to one or more splice donor or acceptor site, an AON may prevent a splicing reaction thereby causing the deletion of one or more exons from a fully-processed mRNA. Exon skipping may be achieved in the nucleus during the maturation process of pre-mRNAs. In some examples, exon skipping may include the masking of key sequences involved in the splicing of targeted exons by using a composition, system, described herein capable of RNA modification. In one embodiment, exon skipping can be achieved in dystrophin mRNA. In one embodiment, the composition, system, can induce exon skipping at exon 1, 2, 3, 4, 5, 6, 7, 8, 10, 11, 12, 13, 14, 15, 16, 17, 18, 19, 20, 21, 22, 23, 24, 25, 26, 27, 28, 29, 30, 31, 32, 33, 34, 45, 36, 37, 38, 39, 40, 41, 42, 43, 44, 45, 46, 47, 48, 49, 50, 51, 52, 53, 54, 55, 56, 57, 58, 59, 60, 61, 62, 63, 64, 65, 66, 67, 68, 69, 70, 71, 72, 73, 74, 75, 76, 77, 78, 79, or any combination thereof of the dystrophin mRNA. In one embodiment, the composition, system, can induce exon skipping at exon 43, 44, 50, 51, 52, 55, or any combination thereof of the dystrophin mRNA. Mutations in these exons, can also be corrected using non-exon skipping polynucleotide modification methods.

[0743] In one embodiment, for treatment of a muscle disease, the method of Bortolanza et al. Molecular Therapy vol. 19 no. 11, 2055-264 Nov. 2011) may be applied to an AAV expressing Fanzor polypeptide and injected into humans at a dosage of about 2×1015 or 2× 1016 vg of vector. The teachings of Bortolanza et al., can be adapted for and/or applied to the compositions, systems, described herein.

[0744] In one embodiment, the method of Dumonceaux et al. (Molecular Therapy vol. 18 no. 5, 881-887 May 2010) may be applied to an AAV expressing Fanzor polypeptide and injected into humans, for example, at a dosage of about 1014 to about 1015 vg of vector. The teachings of Dumonceaux described herein can be adapted for and/or applied to the compositions, systems, described herein.

[0745] In one embodiment, the method of Kinouchi et al. (Gene Therapy (2008) 15, 1126-1130) may be applied to compositions described herein and injected into a human, for example, at a dosage of about 500 to 1000 ml of a 40 uM solution into the muscle.

[0746] In one embodiment, the method of Hagstrom et al. (Molecular Therapy Vol. 10, No. 2, August 2004) can be adapted for and/or applied to the compositions, systems, herein and injected at a dose of about 15 to about 50 mg into the great saphenous vein of a human.

[0747] In one embodiment, the method comprises treating a sickle cell related disease, e.g., sickle cell trait, sickle cell disease such as sickle cell anemia, B-thalassaemia. For example, the method and system may be used to modify the genome of the sickle cell, e.g., by correcting one or more mutations of the β-globin gene. In the case of B-thalassaemia, sickle cell anemia can be corrected by modifying HSCs with the systems. The system allows the specific editing of the cell's genome by cutting its DNA and then letting it repair itself. The Fanzor polypeptide is inserted and directed by a nucleic acid component molecule to the mutated point and then it cuts the DNA at that point. Simultaneously, a healthy version of the sequence is inserted. This sequence is used by the cell's own repair system to fix the induced cut. In this way, the Fanzor polypeptide allows the correction of the mutation in the previously obtained stem cells. The methods and systems may be used to correct HSCs as to sickle cell anemia using a systems that targets and corrects the mutation (e.g., with a suitable HDR template that delivers a coding sequence for β-globin, advantageously non-sickling β-globin); specifically, the nucleic acid component molecule can target mutation that give rise to sickle cell anemia, and the HDR can provide coding for proper expression of B-globin. A nucleic acid component molecule that targets the mutation- and-Fanzor polypeptide containing particle is contacted with HSCs carrying the mutation. The particle also can contain a suitable HDR template to correct the mutation for proper expression of B-globin; or the HSC can be contacted with a second particle or a vector that contains or delivers the HDR template. The so contacted cells can be administered; and optionally treated/expanded; cf. Cartier. The HDR template can provide for the HSC to express an engineered B-globin gene (e.g., BA-T87Q), or β-globin.

### Treating Diseases of the Liver and Kidney

[0748] In one embodiment, the composition, system, or component thereof described herein can be used to treat a disease of the kidney or liver. Thus, in one embodiment, delivery of the composition or component thereof described herein is to the liver or kidney.

[0749] Delivery strategies to induce cellular uptake of the therapeutic nucleic acid include physical force or vector systems such as viral-, lipid- or complex-based delivery, or nanocarriers. From the initial applications with less possible clinical relevance, when nucleic acids were addressed to renal cells with hydrodynamic high-pressure injection systemically, a wide range of gene therapeutic viral and non-viral carriers have been applied already to target posttranscriptional events in different animal kidney disease models in vivo (Csaba Révész and Péter Hamar (2011). Delivery Methods to Target RNAs in the Kidney, Gene Therapy Applications, Prof. Chunsheng Kang (Ed.), ISBN: 978-953-307-541-9, InTech, Available from: www.intechopen.com/books/gene-therapy-applications/delivery-methods-to-target-rnas-inthe-kidney). Delivery methods to the kidney may include those in Yuan et al. (Am J Physiol Renal Physiol 295: F605-F617, 2008). The method of Yuang et al. may be applied to the composition of the present invention contemplating a 1-2 g subcutaneous injection of polypeptide nuclease conjugated with cholesterol to a human for delivery to the kidneys. In one embodiment, the method of Molitoris et al. (J Am Soc Nephrol 20:1754-1764, 2009) can be adapted to the composition and a cumulative dose of 12-20 mg/kg to a human can be used for delivery to the proximal tubule cells of the kidneys. In one embodiment, the methods of Thompson et al. (Nucleic Acid Therapeutics, Volume 22, Number 4, 2012) can be adapted to the compositions and a dose of up to 25 mg/kg can be delivered via i.v. administration. In one embodiment, the method of Shimizu et al. (J Am Soc Nephrol 21:622-633, 2010) can be adapted to the compositions and a dose of about of 10-20 μmol compositions complexed with nanocarriers in about 1-2 liters of a physiologic fluid for i.p. administration can be used.

[0750] Other various delivery vehicles can be used to deliver the composition, system to the kidney such as viral, hydrodynamic, lipid, polymer nanoparticles, aptamers and various combinations thereof (see e.g. Larson et al., Surgery, (August 2007), Vol. 142, No. 2, pp. (262-269); Hamar et al., Proc Natl Acad Sci, (October 2004), Vol. 101, No. 41, pp. (14883-14888); Zheng et al., Am J Pathol, (October 2008), Vol. 173, No. 4, pp. (973-980); Feng et al., Transplantation, (May 2009), Vol. 87, No. 9, pp. (1283-1289); Q. Zhang et al., PloS ONE, (July 2010), Vol. 5, No. 7, e¹¹⁷⁰⁹, pp. (1-13); Kushibikia et al., J Controlled Release, (July 2005), Vol. 105, No. 3, pp. (318-331); Wang et al., Gene Therapy, (July 2006), Vol. 13, No. 14, pp. (1097-1103); Kobayashi et al., Journal of Pharmacology and Experimental Therapeutics, (February 2004), Vol. 308, No. 2, pp. (688-693); Wolfrum et al., Nature Biotechnology, (September 2007), Vol. 25, No. 10, pp. (1149-1157); Molitoris et al., J Am Soc Nephrol, (August 2009), Vol. 20, No. 8 pp. (1754-1764); Mikhaylova et al., Cancer Gene Therapy, (March 2011), Vol. 16, No. 3, pp. (217-226); Y. Zhang et al., J Am Soc Nephrol, (April 2006), Vol. 17, No. 4, pp. (1090-1101); Singhal et al., Cancer Res, (May 2009), Vol. 69, No. 10, pp. (4244-4251); Malek et al., Toxicology and Applied Pharmacology, (April 2009), Vol. 236, No. 1, pp. (97-108); Shimizu et al., J Am Soc Nephrology, (April 2010), Vol. 21, No. 4, pp. (622-633); Jiang et al., Molecular Pharmaceutics, (May-June 2009), Vol. 6, No. 3, pp. (727-737); Cao et al, J Controlled Release, (June 2010), Vol. 144, No. 2, pp. (203-212); Ninichuk et al., Am J Pathol, (March 2008), Vol. 172, No. 3, pp. (628-637); Purschke et al., Proc Natl Acad Sci, (March 2006), Vol. 103, No. 13, pp. (5173-5178).

[0751] In one embodiment, delivery is to liver cells. In one embodiment, the liver cell is a hepatocyte. Delivery of the composition and system herein may be via viral vectors, especially AAV (and in particular AAV2/6) vectors. These can be administered by intravenous injection. A preferred target for the liver, whether in vitro or in vivo, is the albumin gene. This is a so-called ‘safe harbor” as albumin is expressed at very high levels and so some reduction in the production of albumin following successful gene editing is tolerated. It is also preferred as the high levels of expression seen from the albumin promoter/enhancer allows for useful levels of correct or transgene production (from the inserted recombination template) to be achieved even if only a small fraction of hepatocytes are edited. See sites identified by Wechsler et al. (reported at the 57th Annual Meeting and Exposition of the American Society of Hematology—abstract available online at ash.confex.com/ash/2015/webprogram/Paper86495.html and presented on 6th December 2015) which can be adapted for use with the compositions, systems, herein.

[0752] Exemplary liver and kidney diseases that can be treated and/or prevented are described elsewhere herein.

### Treating Epithelial and Lung Diseases

[0753] In one embodiment, the disease treated or prevented by the composition and system described herein can be a lung or epithelial disease. The compositions and systems described herein can be used for treating epithelial and/or lung diseases. The present invention also contemplates delivering the composition, system, described herein, to one or both lungs.

[0754] In one embodiment, as viral vector can be used to deliver the composition, system, or component thereof to the lungs. In one embodiment, the AAV is an AAV-1, AAV-2, AAV-5, AAV-6, and/or AAV-9 for delivery to the lungs. (see, e.g., Li et al., Molecular Therapy, vol. 17 no. 12, 2067-277 Dec. 2009). In one embodiment, the MOI can vary from 1×10³ to 4 ×105 vector genomes/cell. In one embodiment, the delivery vector can be an RSV vector as in Zamora et al. (Am J Respir Crit Care Med Vol 183. pp 531-538, 2011. The method of Zamora et al. may be applied to the nucleic acid-targeting system of the present invention and an aerosolized composition, for example with a dosage of 0.6 mg/kg, may be contemplated for the present invention.

[0755] Subjects treated for a lung disease may for example receive pharmaceutically effective amount of aerosolized AAV vector system per lung endobronchially delivered while spontaneously breathing. As such, aerosolized delivery is preferred for AAV delivery in general. An adenovirus or an AAV particle may be used for delivery. Suitable gene constructs, each operably linked to one or more regulatory sequences, may be cloned into the delivery vector. In this instance, the following constructs are provided as examples: Cbh or EFla promoter for Fanzor, U6 or H1 promoter for nucleic acid component molecule). A preferred arrangement is to use a CFTRdelta508 targeting nucleic acid component molecule, a repair template for deltaF508 mutation and a codon optimized composition, with optionally one or more nuclear localization signal or sequence(s) (NLS(s)), e.g., two (2) NLSs.

### Treating Diseases of the Skin

[0756] The compositions and systems described herein can be used for the treatment of skin diseases. The present invention also contemplates delivering the composition and system, described herein, to the skin.

[0757] In one embodiment, delivery to the skin (intradermal delivery) of the composition, system, or component thereof can be via one or more microneedles or microneedle containing device. For example, In one embodiment the device and methods of Hickerson et al. (Molecular Therapy-Nucleic Acids (2013) 2, e129) can be used and/or adapted to deliver the composition, system, described herein, for example, at a dosage of up to 300 μl of 0.1 mg/ml compositions to the skin.

[0758] In one embodiment, the methods and techniques of Leachman et al. (Molecular Therapy, vol. 18 no. 2, 442-446 Feb. 2010) can be used and/or adapted for delivery of a compositions described herein to the skin.

[0759] In one embodiment, the methods and techniques of Zheng et al. (PNAS, Jul. 24, 2012, vol. 109, no. 30, 11975-11980) can be used and/or adapted for nanoparticle delivery of a compositions described herein to the skin. In one embodiment, as dosage of about 25 nM applied in a single application can achieve gene knockdown in the skin.

### Treating Cancer

[0760] The compositions, systems, described herein can be used for the treatment of cancer. The present invention also contemplates delivering the composition, system, described herein, to a cancer cell. Also, as is described elsewhere herein the compositions, systems, can be used to modify an immune cell, such as a CAR or CAR T cell, which can then in turn be used to treat and/or prevent cancer. This is also described in International Patent Publication No. WO 2015/161276, the disclosure of which is hereby incorporated by reference and described herein below.

[0761] Target genes suitable for the treatment or prophylaxis of cancer can include those set forth in Tables 4A and 4B. In one embodiment, target genes for cancer treatment and prevention can also include those described in International Patent Publication No. WO 2015/048577 the disclosure of which is hereby incorporated by reference and can be adapted for and/or applied to the composition, system, described herein.

### Adoptive Cell Therapy

[0762] The compositions, systems, and components thereof described herein can be used to modify cells for an adoptive cell therapy. In an aspect of the invention, methods and compositions which involve editing a target nucleic acid sequence, or modulating expression of a target nucleic acid sequence, and applications thereof in connection with cancer immunotherapy are comprehended by adapting the composition, system, of the present invention. In some examples, the compositions, systems, and methods may be used to modify a stem cell (e.g., induced pluripotent cell) to derive modified natural killer cells, gamma delta T cells, and alpha beta T cells, which can be used for the adoptive cell therapy. In certain examples, the compositions, systems, and methods may be used to modify modified natural killer cells, gamma delta T cells, and alpha beta T cells.

[0763] As used herein, “ACT”, “adoptive cell therapy” and “adoptive cell transfer” may be used interchangeably. In one embodiment, Adoptive cell therapy (ACT) can refer to the transfer of cells to a patient with the goal of transferring the functionality and characteristics into the new host by engraftment of the cells (see, e.g., Mettananda et al., Editing an a-globin enhancer in primary human hematopoietic stem cells as a treatment for β-thalassemia, Nat Commun. 2017 Sep. 4;8 (1): 424). As used herein, the term “engraft” or “engraftment” refers to the process of cell incorporation into a tissue of interest in vivo through contact with existing cells of the tissue. Adoptive cell therapy (ACT) can refer to the transfer of cells, most commonly immune-derived cells, back into the same patient or into a new recipient host with the goal of transferring the immunologic functionality and characteristics into the new host. If possible, use of autologous cells helps the recipient by minimizing GVHD issues. The adoptive transfer of autologous tumor infiltrating lymphocytes (TIL) (Zacharakis et al., (2018) Nat Med. 2018 June;24 (6): 724-730; Besser et al., (2010) Clin. Cancer Res 16 (9) 2646-55; Dudley et al., (2002) Science 298 (5594): 850-4; and Dudley et al., (2005) Journal of Clinical Oncology 23 (10): 2346-57.) or genetically re-directed peripheral blood mononuclear cells (Johnson et al., (2009) Blood 114 (3): 535-46; and Morgan et al., (2006) Science 314 (5796) 126-9) has been used to successfully treat patients with advanced solid tumors, including melanoma, metastatic breast cancer and colorectal carcinoma, as well as patients with CD19-expressing hematologic malignancies (Kalos et al., (2011) Science Translational Medicine 3 (95): 95ra73). In one embodiment, allogenic cells immune cells are transferred (see, e.g., Ren et al., (2017) Clin Cancer Res 23 (9) 2255-2266). As described further herein, allogenic cells can be edited to reduce alloreactivity and prevent graft-versus-host disease. Thus, use of allogenic cells allows for cells to be obtained from healthy donors and prepared for use in patients as opposed to preparing autologous cells from a patient after diagnosis.

[0764] Aspects of the invention involve the adoptive transfer of immune system cells, such as T cells, specific for selected antigens, such as tumor associated antigens or tumor specific neoantigens (see, e.g., Maus et al., 2014, Adoptive Immunotherapy for Cancer or Viruses, Annual Review of Immunology, Vol. 32:189-225; Rosenberg and Restifo, 2015, Adoptive cell transfer as personalized immunotherapy for human cancer, Science Vol. 348 no. 6230 pp. 62-68; Restifo et al., 2015, Adoptive immunotherapy for cancer: harnessing the T cell response. Nat. Rev. Immunol. 12 (4): 269-281; and Jenson and Riddell, 2014, Design and implementation of adoptive therapy with chimeric antigen receptor-modified T cells. Immunol Rev. 257 (1): 127-144; and Rajasagi et al., 2014, Systematic identification of personal tumor-specific neoantigens in chronic lymphocytic leukemia. Blood. 2014 Jul. 17;124 (3): 453-62).

[0765] In one embodiment, an antigen (such as a tumor antigen) to be targeted in adoptive cell therapy (such as particularly CAR or TCR T-cell therapy) of a disease (such as particularly of tumor or cancer) may be selected from a group consisting of: MR1 (see, e.g., Crowther, et al., 2020, Genome-wide CRISPR-Cas9 screening reveals ubiquitous T cell cancer targeting via the monomorphic MHC class I-related protein MR1, Nature Immunology volume 21, pages178-185), B cell maturation antigen (BCMA) (see, e.g., Friedman et al., Effective Targeting of Multiple BCMA-Expressing Hematological Malignancies by Anti-BCMA CAR T Cells, Hum Gene Ther. 2018 Mar. 8; Berdeja J G, et al. Durable clinical responses in heavily pretreated patients with relapsed/refractory multiple myeloma: updated results from a multicenter study of bb2121 anti-Bcma CAR T cell therapy. Blood. 2017; 130:740; and Mouhieddine and Ghobrial, Immunotherapy in Multiple Myeloma: The Era of CAR T Cell Therapy, Hematologist, May-June 2018, Volume 15, issue 3); PSA (prostate-specific antigen); prostate-specific membrane antigen (PSMA); PSCA (Prostate stem cell antigen); Tyrosine-protein kinase transmembrane receptor ROR1; fibroblast activation protein (FAP); Tumor-associated glycoprotein 72 (TAG72); Carcinoembryonic antigen (CEA); Epithelial cell adhesion molecule (EPCAM); Mesothelin; Human Epidermal growth factor Receptor 2 (ERBB2 (Her2/neu)); Prostase; Prostatic acid phosphatase (PAP); elongation factor 2 mutant (ELF2M); Insulin-like growth factor 1 receptor (IGF-1R); gplOO; BCR-ABL (breakpoint cluster region-Abelson); tyrosinase; New York esophageal squamous cell carcinoma 1 (NY-ESO-1); K-light chain, LAGE (L antigen); MAGE (melanoma antigen); Melanoma-associated antigen 1 (MAGE-A1); MAGE A3; MAGE A6; legumain; Human papillomavirus (HPV) E6; HPV E7; prostein; survivin; PCTA1 (Galectin 8); Melan-A/MART-1; Ras mutant; TRP-1 (tyrosinase related protein 1, or gp75); Tyrosinase-related Protein 2 (TRP2); TRP-2/INT2 (TRP-2/intron 2); RAGE (renal antigen); receptor for advanced glycation end products 1 (RAGE1); Renal ubiquitous 1, 2 (RU1, RU2); intestinal carboxyl esterase (iCE); Heat shock protein 70-2 (HSP70-2) mutant; thyroid stimulating hormone receptor (TSHR); CD123; CD171; CD19; CD20; CD22; CD26; CD3ζ; CD33; CD44v7/8 (cluster of differentiation 44, exons 7/8); CD53; CD92; CD100; CD148; CD150; CD200; CD261; CD262; CD362; CS-1 (CD2 subset 1, CRACC, SLAMF7, CD319, and 19A24); C-type lectin-like molecule-1 (CLL-1); ganglioside GD3 (aNeu5Ac (2-8) aNeu5Ac (2-3) bDGalp (1-4) bDGlcp (1-1) Cer); Tn antigen (Tn Ag); Fms-Like Tyrosine Kinase 3 (FLT3); CD38; CD138; CD44v6; β7H3 (CD276); KIT (CD117); Interleukin-13 receptor subunit alpha-2 (IL-13Ra2); Interleukin 11 receptor alpha (IL-11Ra); prostate stem cell antigen (PSCA); Protease Serine 21 (PRSS21); vascular endothelial growth factor receptor 2 (VEGFR2); Lewis (Y) antigen; CD24; Platelet-derived growth factor receptor beta (PDGFR-beta); stage-specific embryonic antigen-4 (SSEA-4); Mucin 1, cell surface associated (MUC1); mucin 16 (MUC16); epidermal growth factor receptor (EGFR); epidermal growth factor receptor variant III (EGFRvIII); neural cell adhesion molecule (NCAM); carbonic anhydrase IX (CAIX); Proteasome (Prosome, Macropain) Subunit, Beta Type, 9 (LMP2); ephrin type-A receptor 2 (EphA2); Ephrin β2; Fucosyl GM1; sialyl Lewis adhesion molecule (sLe); ganglioside GM3 (aNeu5Ac (2-3) bDGalp (1-4) bDGlcp (1-1) Cer); TGS5; high molecular weight-melanoma-associated antigen (HMWMAA); o-acetyl-GD2 ganglioside (OAcGD2); Folate receptor alpha; Folate receptor beta; tumor endothelial marker 1 (TEMI/CD248); tumor endothelial marker 7-related (TEM7R); claudin 6 (CLDN6); G protein-coupled receptor class C group 5, member D (GPRC5D); chromosome X open reading frame 61 (CXORF61); CD97; CD179a; anaplastic lymphoma kinase (ALK); Polysialic acid; placenta-specific 1 (PLAC1); hexasaccharide portion of globoH glycoceramide (GloboH); mammary gland differentiation antigen (NY-BR-1); uroplakin 2 (UPK2); Hepatitis A virus cellular receptor 1 (HAVCR1); adrenoceptor beta 3 (ADRB3); pannexin 3 (PANX3); G protein-coupled receptor 20 (GPR20); lymphocyte antigen 6 complex, locus K 9 (LY6K); Olfactory receptor 51E2 (OR51E2); TCR Gamma Alternate Reading Frame Protein (TARP); Wilms tumor protein (WT1); ETS translocation-variant gene 6, located on chromosome 12p (ETV6-AML); sperm protein 17 (SPA17); X Antigen Family, Member 1A (XAGE1); angiopoietin-binding cell surface receptor 2 (Tie 2); CT (cancer/testis (antigen)); melanoma cancer testis antigen-1 (MAD-CT-1); melanoma cancer testis antigen-2 (MAD-CT-2); Fos-related antigen 1; p53; p53 mutant; human Telomerase reverse transcriptase (hTERT); sarcoma translocation breakpoints; melanoma inhibitor of apoptosis (ML-IAP); ERG (transmembrane protease, serine 2 (TMPRSS2) ETS fusion gene); N-Acetyl glucosaminyl-transferase V (NA17); paired box protein Pax-3 (PAX3); Androgen receptor; Cyclin β1; Cyclin D₁; v-myc avian myelocytomatosis viral oncogene neuroblastoma derived homolog (MYCN); Ras Homolog Family Member C (RhoC); Cytochrome P450 1β1 (CYP1β1); CCCTC-Binding Factor (Zinc Finger Protein)-Like (BORIS); Squamous Cell Carcinoma Antigen Recognized By T Cells-1 or 3 (SARTI, SART3); Paired box protein Pax-5 (PAX5); proacrosin binding protein sp32 (OY-TES1); lymphocyte-specific protein tyrosine kinase (LCK); A kinase anchor protein 4 (AKAP-4); synovial sarcoma, X breakpoint-1, -2, -3 or -4 (SSX1, SSX2, SSX3, SSX4); CD79a; CD79b; CD72; Leukocyte-associated immunoglobulin-like receptor 1 (LAIR1); Fc fragment of IgA receptor (FCAR); Leukocyte immunoglobulin-like receptor subfamily A member 2 (LILRA2); CD3ζ0 molecule-like family member f (CD3ζ0LF); C-type lectin domain family 12 member A (CLEC12A); bone marrow stromal cell antigen 2 (BST2); EGF-like module-containing mucin-like hormone receptor-like 2 (EMR2); lymphocyte antigen 75 (LY75); Glypican-3 (GPC3); Fc receptor-like 5 (FCRL5); mouse double minute 2 homolog (MDM2); livin; alphafetoprotein (AFP); transmembrane activator and CAML Interactor (TACI); B-cell activating factor receptor (BAFF-R); V-Ki-ras2 Kirsten rat sarcoma viral oncogene homolog (KRAS); immunoglobulin lambda-like polypeptide 1 (IGLL1); 707-AP (707 alanine proline); ART-4 (adenocarcinoma antigen recognized by T4 cells); BAGE (B antigen; b-catenin/m, b-catenin/mutated); CAMEL (CTL-recognized antigen on melanoma); CAP1 (carcinoembryonic antigen peptide 1); CASP-8 (caspase-8); CDC27m (cell-division cycle 27 mutated); CDK4/m (cycline-dependent kinase 4 mutated); Cyp-B (cyclophilin B); DAM (differentiation antigen melanoma); EGP-2 (epithelial glycoprotein 2); EGP-40 (epithelial glycoprotein 40); Erbb2, 3, 4 (erythroblastic leukemia viral oncogene homolog-2, -3, 4); FBP (folate binding protein); fAchR (Fetal acetylcholine receptor); G250 (glycoprotein 250); GAGE (G antigen); GnT-V (N-acetylglucosaminyltransferase V); HAGE (helicose antigen); ULA-A (human leukocyte antigen-A); HST2 (human signet ring tumor 2); KIAA0205; KDR (kinase insert domain receptor); LDLR/FUT (low density lipid receptor/GDP L-fucose: b-D-galactosidase 2-a-L fucosyltransferase); LICAM (L1 cell adhesion molecule); MC1R (melanocortin 1 receptor); Myosin/m (myosin mutated); MUM-1, -2, -3 (melanoma ubiquitous mutated 1, 2, 3); NA88-A (NA cDNA clone of patient M88); KG2D (Natural killer group 2, member D) ligands; oncofetal antigen (h5T4); p190 minor bcr-abl (protein of 190KD bcr-abl); Pml/RARa (promyelocytic leukemia/retinoic acid receptor a); PRAME (preferentially expressed antigen of melanoma); SAGE (sarcoma antigen); TEL/AML1 (translocation Ets-family leukemia/acute myeloid leukemia 1); TPI/m (triosephosphate isomerase mutated); CD70; and any combination thereof.

[0766] In one embodiment, an antigen to be targeted in adoptive cell therapy (such as particularly CAR or TCR T-cell therapy) of a disease (such as particularly of tumor or cancer) is a tumor-specific antigen (TSA).

[0767] In one embodiment, an antigen to be targeted in adoptive cell therapy (such as particularly CAR or TCR T-cell therapy) of a disease (such as particularly of tumor or cancer) is a neoantigen.

[0768] In one embodiment, an antigen to be targeted in adoptive cell therapy (such as particularly CAR or TCR T-cell therapy) of a disease (such as particularly of tumor or cancer) is a tumor-associated antigen (TAA).

[0769] In one embodiment, an antigen to be targeted in adoptive cell therapy (such as particularly CAR or TCR T-cell therapy) of a disease (such as particularly of tumor or cancer) is a universal tumor antigen. In certain preferred embodiments, the universal tumor antigen is selected from the group consisting of: a human telomerase reverse transcriptase (hTERT), survivin, mouse double minute 2 homolog (MDM2), cytochrome P450 1B 1 (CYP1B), HER2/neu, Wilms’ tumor gene 1 (WT1), livin, alphafetoprotein (AFP), carcinoembryonic antigen (CEA), mucin 16 (MUC16), MUC1, prostate-specific membrane antigen (PSMA), p53, cyclin (DI), and any combinations thereof.

[0770] In one embodiment, an antigen (such as a tumor antigen) to be targeted in adoptive cell therapy (such as particularly CAR or TCR T-cell therapy) of a disease (such as particularly of tumor or cancer) may be selected from a group consisting of: CD19, BCMA, CD70, CLL-1, MAGE A3, MAGE A6, HPV E6, HPV E7, WT1, CD22, CD171, ROR1, MUC16, and SSX2.

[0771] In certain preferred embodiments, the antigen may be CD19. For example, CD19 may be targeted in hematologic malignancies, such as in lymphomas, more particularly in B-cell lymphomas, such as without limitation in diffuse large B-cell lymphoma, primary mediastinal b-cell lymphoma, transformed follicular lymphoma, marginal zone lymphoma, mantle cell lymphoma, acute lymphoblastic leukemia including adult and pediatric ALL, non-Hodgkin lymphoma, indolent non-Hodgkin lymphoma, or chronic lymphocytic leukemia. For example, BCMA may be targeted in multiple myeloma or plasma cell leukemia (see, e.g., 2018 American Association for Cancer Research (AACR) Annual meeting Poster: Allogeneic Chimeric Antigen Receptor T Cells Targeting B Cell Maturation Antigen). For example, CLL1 may be targeted in acute myeloid leukemia. For example, MAGE A3, MAGE A6, SSX2, and/or KRAS may be targeted in solid tumors. For example, HPV E6 and/or HPV E7 may be targeted in cervical cancer or head and neck cancer. For example, WT1 may be targeted in acute myeloid leukemia (AML), myelodysplastic syndromes (MDS), chronic myeloid leukemia (CML), non-small cell lung cancer, breast, pancreatic, ovarian or colorectal cancers, or mesothelioma. For example, CD22 may be targeted in B cell malignancies, including non-Hodgkin lymphoma, diffuse large B-cell lymphoma, or acute lymphoblastic leukemia. For example, CD171 may be targeted in neuroblastoma, glioblastoma, or lung, pancreatic, or ovarian cancers. For example, ROR1 may be targeted in ROR1+malignancies, including non-small cell lung cancer, triple negative breast cancer, pancreatic cancer, prostate cancer, ALL, chronic lymphocytic leukemia, or mantle cell lymphoma. For example, MUC16 may be targeted in MUC16ecto+epithelial ovarian, fallopian tube or primary peritoneal cancer. For example, CD70 may be targeted in both hematologic malignancies as well as in solid cancers such as renal cell carcinoma (RCC), gliomas (e.g., GBM), and head and neck cancers (HNSCC). CD70 is expressed in both hematologic malignancies as well as in solid cancers, while its expression in normal tissues is restricted to a subset of lymphoid cell types (see, e.g., 2018 American Association for Cancer Research (AACR) Annual meeting Poster: Allogeneic CRISPR Engineered Anti-CD70 CAR-T Cells Demonstrate Potent Preclinical Activity Against Both Solid and Hematological Cancer Cells).

[0772] Various strategies may for example be employed to genetically modify T cells by altering the specificity of the T cell receptor (TCR) for example by introducing new TCR a and β chains with selected peptide specificity (see U.S. Pat. No. 8,697,854; PCT Patent Publications: WO2003020763, WO2004033685, WO2004044004, WO2005114215, WO2006000830, WO2008038002, WO2008039818, WO2004074322, WO2005113595, WO2006125962, WO2013166321, WO2013039889, WO2014018863, WO2014083173; U.S. Pat. No. 8,088,379).

[0773] As an alternative to, or addition to, TCR modifications, chimeric antigen receptors (CARs) may be used in order to generate immunoresponsive cells, such as T cells, specific for selected targets, such as malignant cells, with a wide variety of receptor chimera constructs having been described (see U.S. Pat. Nos. 5,843,728; 5,851,828; 5,912,170; 6,004,811; 6,284,240; 6,392,013; 6,410,014; 6,753,162; 8,211,422; and, PCT Publication WO 9215322).

[0774] In general, CARs are comprised of an extracellular domain, a transmembrane domain, and an intracellular domain, wherein the extracellular domain comprises an antigen-binding domain that is specific for a predetermined target. While the antigen-binding domain of a CAR is often an antibody or antibody fragment (e.g., a single chain variable fragment, scFv), the binding domain is not particularly limited so long as it results in specific recognition of a target. For example, In one embodiment, the antigen-binding domain may comprise a receptor, such that the CAR is capable of binding to the ligand of the receptor. Alternatively, the antigen-binding domain may comprise a ligand, such that the CAR is capable of binding the endogenous receptor of that ligand.

[0775] The antigen-binding domain of a CAR is generally separated from the transmembrane domain by a hinge or spacer. The spacer is also not particularly limited, and it is designed to provide the CAR with flexibility. For example, a spacer domain may comprise a portion of a human Fc domain, including a portion of the CH3 domain, or the hinge region of any immunoglobulin, such as IgA, IgD, IgE, IgG, or IgM, or variants thereof. Furthermore, the hinge region may be modified so as to prevent off-target binding by FcRs or other potential interfering objects. For example, the hinge may comprise an IgG4 Fc domain with or without a S228P, L235E, and/or N297Q mutation (according to Kabat numbering) in order to decrease binding to FcRs. Additional spacers/hinges include, but are not limited to, CD4, CD8, and CD28 hinge regions.

[0776] The transmembrane domain of a CAR may be derived either from a natural or from a synthetic source. Where the source is natural, the domain may be derived from any membrane bound or transmembrane protein. Transmembrane regions of particular use in this disclosure may be derived from CD8, CD28, CD3, CD45, CD4, CD5, CDS, CD9, CD 16, CD22, CD33, CD37, CD64, CD80, CD86, CD 134, CD137, CD 154, TCR. Alternatively, the transmembrane domain may be synthetic, in which case it will comprise predominantly hydrophobic residues such as leucine and valine. Preferably a triplet of phenylalanine, tryptophan and valine will be found at each end of a synthetic transmembrane domain. Optionally, a short oligo- or polypeptide linker, preferably between 2 and 10 amino acids in length may form the linkage between the transmembrane domain and the cytoplasmic signaling domain of the CAR. A glycine-serine doublet provides a particularly suitable linker.

[0777] Alternative CAR constructs may be characterized as belonging to successive generations. First-generation CARs typically consist of a single-chain variable fragment of an antibody specific for an antigen, for example comprising a VL linked to a VH of a specific antibody, linked by a flexible linker, for example by a CD8a hinge domain and a CD8a transmembrane domain, to the transmembrane and intracellular signaling domains of either CD3ζ or FcRγ (scFv-CD3 ζ or scFv-FcRγ; see U.S. Pat. Nos. 7,741,465; 5,912,172; 5,906,936). Second-generation CARs incorporate the intracellular domains of one or more costimulatory molecules, such as CD28, OX40 (CD134), or 4-1BB (CD137) within the endodomain (for example scFv-CD28/OX40/4-1BB-CD3ζ; see U.S. Pat. Nos. 8,911,993; 8,916,381; 8,975,071; 9,101,584; 9,102,760; 9,102,761). Third-generation CARs include a combination of costimulatory endodomains, such a CD3g-chain, CD97, GDI 1a-CD18, CD2, ICOS, CD27, CD154, CDS, OX40, 4-1BB, CD2, CD7, LIGHT, LFA-1, NKG2C, β7-H3, CD3ζ, CD40, PD-1, or CD28 signaling domains (for example scFv-CD28-4-1BB-CD3ζ or scFv-CD28-OX40-CD3ζ; see U.S. Pat. Nos. 8,906,682; 8,399,645; 5,686,281; PCT Publication No. WO 2014/134165; PCT Publication No. WO 2012/079000). In one embodiment, the primary signaling domain comprises a functional signaling domain of a protein selected from the group consisting of CD3 zeta, CD3 gamma, CD3 delta, CD3 epsilon, common FcR gamma (FCERIG), FcR beta (Fc Epsilon R1b), CD79a, CD79b, Fc gamma RIIa, DAP10, and DAP12. In certain preferred embodiments, the primary signaling domain comprises a functional signaling domain of CD3ζ or FcRγ. In one embodiment, the one or more costimulatory signaling domains comprise a functional signaling domain of a protein selected, each independently, from the group consisting of: CD27, CD28, 4-1BB (CD137), OX40, CD3ζ, CD40, PD-1, ICOS, lymphocyte function-associated antigen-1 (LFA-1), CD2, CD7, LIGHT, NKG2C, β7-H3, a ligand that specifically binds with CD83, CDS, ICAM-1, GITR, BAFFR, HVEM (LIGHTR), SLAMF7, NKp80 (KLRF1), CD160, CD19, CD4, CD8 alpha, CD8 beta, IL2R beta, IL2R gamma, IL7R alpha, ITGA4, VLA1, CD49a, ITGA4, IA4, CD49D, ITGA6, VLA-6, CD49f, ITGAD, CD11d, ITGAE, CD103, ITGAL, CD11a, LFA-1, ITGAM, CD11b, ITGAX, CD11c, ITGB1, CD29, ITGB2, CD18, ITGB7, TNFR2, TRANCE/RANKL, DNAMI (CD226), SLAMF4 (CD244, 2β4), CD84, CD96 (Tactile), CEACAMI, CRTAM, Ly9 (CD229), CD160 (BY55), PSGL1, CD100 (SEMA4D), CD69, SLAMF6 (NTB-A, Ly108), SLAM (SLAMF1, CD150, IPO-3), BLAME (SLAMF8), SELPLG (CD162), LTBR, LAT, GADS, SLP-76, PAG/Cbp, NKp44, NKp30, NKp46, and NKG2D. In one embodiment, the one or more costimulatory signaling domains comprise a functional signaling domain of a protein selected, each independently, from the group consisting of: 4-1BB, CD27, and CD28. In one embodiment, a chimeric antigen receptor may have the design as described in U.S. Pat. No. 7,446,190, comprising an intracellular domain of CD3ζ chain (such as amino acid residues 52-163 of the human CD3 zeta chain, as shown in SEQ ID NO: 14 of U.S. Pat. No. 7,446,190), a signaling region from CD28 and an antigen-binding element (or portion or domain; such as scFv). The CD28 portion, when between the zeta chain portion and the antigen-binding element, may suitably include the transmembrane and signaling domains of CD28 (such as amino acid residues 114-220 of SEQ ID NO: 10, full sequence shown in SEQ ID NO: 6 of U.S. Pat. No. 7,446,190; these can include the following portion of CD28 as set forth in Genbank identifier NM_006139. Alternatively, when the zeta sequence lies between the CD28 sequence and the antigen-binding element, intracellular domain of CD28 can be used alone (such as amino sequence set forth in SEQ ID NO: 9 of U.S. Pat. No. 7,446,190). Hence, certain embodiments employ a CAR comprising (a) a zeta chain portion comprising the intracellular domain of human CD3ζ chain, (b) a costimulatory signaling region, and (c) an antigen-binding element (or portion or domain), wherein the costimulatory signaling region comprises the amino acid sequence encoded by SEQ ID NO: 6 of U.S. Pat. No. 7,446,190.

[0778] Alternatively, costimulation may be orchestrated by expressing CARs in antigen-specific T cells, chosen so as to be activated and expanded following engagement of their native αβTCR, for example by antigen on professional antigen-presenting cells, with attendant costimulation. In addition, additional engineered receptors may be provided on the immunoresponsive cells, for example to improve targeting of a T-cell attack and/or minimize side effects

[0779] By means of an example and without limitation, Kochenderfer et al., (2009) J Immunother. 32 (7): 689-702 described anti-CD19 chimeric antigen receptors (CAR). FMC63-28Z CAR contained a single chain variable region moiety (scFv) recognizing CD19 derived from the FMC63 mouse hybridoma (described in Nicholson et al., (1997) Molecular Immunology 34:1157-1165), a portion of the human CD28 molecule, and the intracellular component of the human TCR-ζ molecule. FMC63-CD828BBZ CAR contained the FMC63 scFv, the hinge and transmembrane regions of the CD8 molecule, the cytoplasmic portions of CD28 and 4-1BB, and the cytoplasmic component of the TCR-ζ molecule. The exact sequence of the CD28 molecule included in the FMC63-28Z CAR corresponded to Genbank identifier NM_006139; the sequence included all amino acids starting with the amino acid sequence IEVMYPPPY (SEQ ID NO: 560). and continuing all the way to the carboxy-terminus of the protein. To encode the anti-CD19 scFv component of the vector, the authors designed a DNA sequence which was based on a portion of a previously published CAR (Cooper et al., (2003) Blood 101:1637-1644). This sequence encoded the following components in frame from the 5′ end to the 3′ end: an XhoI site, the human granulocyte-macrophage colony-stimulating factor (GM-CSF) receptor α-chain signal sequence, the FMC63 light chain variable region (as in Nicholson et al., supra), a linker peptide (as in Cooper et al., supra), the FMC63 heavy chain variable region (as in Nicholson et al., supra), and a NotI site. A plasmid encoding this sequence was digested with XhoI and NotI. To form the MSGV-FMC63-28Z retroviral vector, the XhoI and NotI-digested fragment encoding the FMC63 scFv was ligated into a second XhoI and NotI-digested fragment that encoded the MSGV retroviral backbone (as in Hughes et al., (2005) Human Gene Therapy 16:457-472) as well as part of the extracellular portion of human CD28, the entire transmembrane and cytoplasmic portion of human CD28, and the cytoplasmic portion of the human TCR-(molecule (as in Maher et al., 2002) Nature Biotechnology 20:70-75). The FMC63-28Z CAR is included in the KTE-C19 (axicabtagene ciloleucel) anti-CD19 CAR-T therapy product in development by Kite Pharma, Inc. for the treatment of inter alia patients with relapsed/refractory aggressive B-cell non-Hodgkin lymphoma (NHL). Accordingly, In one embodiment, cells intended for adoptive cell therapies, more particularly immunoresponsive cells such as T cells, may express the FMC63-28Z CAR as described by Kochenderfer et al. (supra). Hence, in one embodiment, cells intended for adoptive cell therapies, more particularly immunoresponsive cells such as T cells, may comprise a CAR comprising an extracellular antigen-binding element (or portion or domain; such as scFv) that specifically binds to an antigen, an intracellular signaling domain comprising an intracellular domain of a CD3ζ chain, and a costimulatory signaling region comprising a signaling domain of CD28. Preferably, the CD28 amino acid sequence is as set forth in Genbank identifier NM_006139 (sequence version 1, 2 or 3) starting with the amino acid sequence IEVMYPPPY (SEQ ID NO: 560) and continuing all the way to the carboxy-terminus of the protein. Preferably, the antigen is CD19, more preferably the antigen-binding element is an anti-CD19 scFv, even more preferably the anti-CD19 scFv as described by Kochenderfer et al. (supra).

[0780] Additional anti-CD19 CARs are further described in International Patent Publication No. WO 2015/187528. More particularly Example 1 and Table 1 of WO2015187528, incorporated by reference herein, demonstrate the generation of anti-CD19 CARs based on a fully human anti-CD19 monoclonal antibody (47G4, as described in US20100104509) and murine anti-CD19 monoclonal antibody (as described in Nicholson et al. and explained above). Various combinations of a signal sequence (human CD8-alpha or GM-CSF receptor), extracellular and transmembrane regions (human CD8-alpha) and intracellular T-cell signaling domains (CD28-CD3ζ; 4-1BB-CD3ζ; CD27-CD3ζ; CD28-CD27-CD3ζ, 4-1BB-CD27-CD3ζ; CD27-4-1BB-CD3ζ; CD28-CD27-FcERI gamma chain; or CD28-FcERI gamma chain) were disclosed. Hence, in one embodiment, cells intended for adoptive cell therapies, more particularly immunoresponsive cells such as T cells, may comprise a CAR comprising an extracellular antigen-binding element that specifically binds to an antigen, an extracellular and transmembrane region as set forth in Table 1 of WO2015187528 and an intracellular T-cell signaling domain as set forth in Table 1 of International Application No. WO 2015/187528. Preferably, the antigen is CD19, more preferably the antigen-binding element is an anti-CD19 scFv, even more preferably the mouse or human anti-CD19 scFv as described in Example 1 of WO 2015/187528. In one embodiment, the CAR comprises, consists essentially of or consists of an amino acid sequence of SEQ ID NO: 1, SEQ ID NO: 2, SEQ ID NO: 3, SEQ ID NO: 4, SEQ ID NO: 5, SEQ ID NO: 6, SEQ ID NO: 7, SEQ ID NO: 8, SEQ ID NO: 9, SEQ ID NO: 10, SEQ ID NO: 11, SEQ ID NO: 12, or SEQ ID NO: 13 as set forth in Table 1 of WO2015187528.

[0781] By means of an example and without limitation, chimeric antigen receptor that recognizes the CD70 antigen is described in WO2012058460A2 (see also, Park et al., CD70 as a target for chimeric antigen receptor T cells in head and neck squamous cell carcinoma, Oral Oncol. 2018 March;78:145-150; and Jin et al., CD70, a novel target of CAR T-cell therapy for gliomas, Neuro Oncol. 2018 Jan. 10;20 (1): 55-65). CD70 is expressed by diffuse large B-cell and follicular lymphoma and also by the malignant cells of Hodgkins lymphoma, Waldenstrom's macroglobulinemia and multiple myeloma, and by HTLV-1- and EBV-associated malignancies. (Agathanggelou et al. Am. J. Pathol. 1995; 147:1152-1160; Hunter et al., Blood 2004; 104:4881. 26; Lens et al., J Immunol. 2005; 174:6212-6219; Baba et al., J Virol. 2008; 82:3843-3852.) In addition, CD70 is expressed by non-hematological malignancies such as renal cell carcinoma and glioblastoma. (Junker et al., J Urol. 2005; 173:2150-2153; Chahlavi et al., Cancer Res 2005; 65:5428-5438) Physiologically, CD70 expression is transient and restricted to a subset of highly activated T, B, and dendritic cells.

[0782] By means of an example and without limitation, chimeric antigen receptor that recognizes BCMA has been described (see, e.g., US20160046724A1; WO2016014789A2; WO2017211900A1; WO2015158671A1; US20180085444A1; WO2018028647A1; US20170283504A1; and WO2013154760A1).

[0783] In one embodiment, the immune cell may, in addition to a CAR or exogenous TCR as described herein, further comprise a chimeric inhibitory receptor (inhibitory CAR) that specifically binds to a second target antigen and is capable of inducing an inhibitory or immunosuppressive or repressive signal to the cell upon recognition of the second target antigen. In one embodiment, the chimeric inhibitory receptor comprises an extracellular antigen-binding element (or portion or domain) configured to specifically bind to a target antigen, a transmembrane domain, and an intracellular immunosuppressive or repressive signaling domain. In one embodiment, the second target antigen is an antigen that is not expressed on the surface of a cancer cell or infected cell or the expression of which is downregulated on a cancer cell or an infected cell. In one embodiment, the second target antigen is an MHC-class I molecule. In one embodiment, the intracellular signaling domain comprises a functional signaling portion of an immune checkpoint molecule, such as for example PD-1 or CTLA4. Advantageously, the inclusion of such inhibitory CAR reduces the chance of the engineered immune cells attacking non-target (e.g., non-cancer) tissues.

[0784] Alternatively, T-cells expressing CARs may be further modified to reduce or eliminate expression of endogenous TCRs in order to reduce off-target effects. Reduction or elimination of endogenous TCRs can reduce off-target effects and increase the effectiveness of the T cells (U.S. Pat. No. 9,181,527). T cells stably lacking expression of a functional TCR may be produced using a variety of approaches. T cells internalize, sort, and degrade the entire T cell receptor as a complex, with a half-life of about 10 hours in resting T cells and 3 hours in stimulated T cells (von Essen, M. et al. 2004. J. Immunol. 173:384-393). Proper functioning of the TCR complex requires the proper stoichiometric ratio of the proteins that compose the TCR complex. TCR function also requires two functioning TCR zeta proteins with ITAM motifs. The activation of the TCR upon engagement of its MHC-peptide ligand requires the engagement of several TCRs on the same T cell, which all must signal properly. Thus, if a TCR complex is destabilized with proteins that do not associate properly or cannot signal optimally, the T cell will not become activated sufficiently to begin a cellular response.

[0785] Accordingly, in one embodiment, TCR expression may eliminated using RNA interference (e.g., snucleic acid component, siRNA, miRNA, etc.), Fanzor polypeptide, or other methods that target the nucleic acids encoding specific TCRs (e.g., TCR-a and TCR-β) and/or CD3 chains in primary T cells. By blocking expression of one or more of these proteins, the T cell will no longer produce one or more of the key components of the TCR complex, thereby destabilizing the TCR complex and preventing cell surface expression of a functional TCR.

[0786] In some instances, CAR may also comprise a switch mechanism for controlling expression and/or activation of the CAR. For example, a CAR may comprise an extracellular, transmembrane, and intracellular domain, in which the extracellular domain comprises a target-specific binding element that comprises a label, binding domain, or tag that is specific for a molecule other than the target antigen that is expressed on or by a target cell. In such embodiments, the specificity of the CAR is provided by a second construct that comprises a target antigen binding domain (e.g., an scFv or a bispecific antibody that is specific for both the target antigen and the label or tag on the CAR) and a domain that is recognized by or binds to the label, binding domain, or tag on the CAR. See, e.g., WO 2013/044225, WO 2016/000304, WO 2015/057834, WO 2015/057852, WO 2016/070061, U.S. Pat. No. 9,233,125, US 2016/0129109. In this way, a T-cell that expresses the CAR can be administered to a subject, but the CAR cannot bind its target antigen until the second composition comprising an antigen-specific binding domain is administered.

[0787] Alternative switch mechanisms include CARs that require multimerization in order to activate their signaling function (see, e.g., US Patent Publication Nos. US 2015/0368342, US 2016/0175359, US 2015/0368360) and/or an exogenous signal, such as a small molecule drug (US 2016/0166613, Yung et al., Science, 2015), in order to elicit a T-cell response. Some CARs may also comprise a “suicide switch” to induce cell death of the CAR T-cells following treatment (Buddee et al., PLOS One, 2013) or to downregulate expression of the CAR following binding to the target antigen (International Patent Publication No. WO 2016/011210).

[0788] Alternative techniques may be used to transform target immunoresponsive cells, such as protoplast fusion, lipofection, transfection or electroporation. A wide variety of vectors may be used, such as retroviral vectors, lentiviral vectors, adenoviral vectors, adeno-associated viral vectors, plasmids or transposons, such as a Sleeping Beauty transposon (see U.S. Pat. Nos. 6,489,458; 7,148,203; 7,160,682; 7,985,739; 8,227,432), may be used to introduce CARs, for example using 2nd generation antigen-specific CARs signaling through CD3ζ and either CD28 or CD137. Viral vectors may for example include vectors based on HIV, SV40, EBV, HSV or BPV.

[0789] Cells that are targeted for transformation may for example include T cells, Natural Killer (NK) cells, cytotoxic T lymphocytes (CTL), regulatory T cells, human embryonic stem cells, tumor-infiltrating lymphocytes (TIL) or a pluripotent stem cell from which lymphoid cells may be differentiated. T cells expressing a desired CAR may for example be selected through co-culture with y-irradiated activating and propagating cells (AaPC), which co-express the cancer antigen and co-stimulatory molecules. The engineered CAR T-cells may be expanded, for example by co-culture on AaPC in presence of soluble factors, such as IL-2 and IL-21. This expansion may for example be carried out so as to provide memory CAR+ T cells (which may for example be assayed by non-enzymatic digital array and/or multi-panel flow cytometry). In this way, CAR T cells may be provided that have specific cytotoxic activity against antigen-bearing tumors (optionally in conjunction with production of desired chemokines such as interferon-y). CAR T cells of this kind may for example be used in animal models, for example to treat tumor xenografts.

[0790] In one embodiment, ACT includes co-transferring CD4+Th1 cells and CD8+CTLs to induce a synergistic antitumor response (see, e.g., Li et al., Adoptive cell therapy with CD4+T helper 1 cells and CD8+ cytotoxic T cells enhances complete rejection of an established tumor, leading to generation of endogenous memory responses to non-targeted tumor epitopes. Clin Transl Immunology. 2017 October; 6 (10): e¹⁶⁰).

[0791] In one embodiment, Th17 cells are transferred to a subject in need thereof. Th17 cells have been reported to directly eradicate melanoma tumors in mice to a greater extent than Th1 cells (Muranski P, et al., Tumor-specific Th17-polarized cells eradicate large established melanoma. Blood. 2008 Jul. 15; 112 (2): 362-73; and Martin-Orozco N, et al., T helper 17 cells promote cytotoxic T cell activation in tumor immunity. Immunity. 2009 Nov. 20; 31 (5): 787-98). Those studies involved an adoptive T cell transfer (ACT) therapy approach, which takes advantage of CD4+ T cells that express a TCR recognizing tyrosinase tumor antigen. Exploitation of the TCR leads to rapid expansion of Th17 populations to large numbers ex vivo for reinfusion into the autologous tumor-bearing hosts.

[0792] In one embodiment, ACT may include autologous iPSC-based vaccines, such as irradiated iPSCs in autologous anti-tumor vaccines (see e.g., Kooreman, Nigel G. et al., Autologous iPSC-Based Vaccines Elicit Anti-tumor Responses In Vivo, Cell Stem Cell 22, 1-13, 2018, doi.org/10.1016/j.stem.2018.01.016).

[0793] Unlike T-cell receptors (TCRs) that are MHC restricted, CARs can potentially bind any cell surface-expressed antigen and can thus be more universally used to treat patients (see Irving et al., Engineering Chimeric Antigen Receptor T-Cells for Racing in Solid Tumors: Don't Forget the Fuel, Front. Immunol., 3 Apr. 2017, doi.org/10.3389/fimmu.2017.00267). In one embodiment, in the absence of endogenous T-cell infiltrate (e.g., due to aberrant antigen processing and presentation), which precludes the use of TIL therapy and immune checkpoint blockade, the transfer of CAR T-cells may be used to treat patients (see, e.g., Hinrichs CS, Rosenberg SA. Exploiting the curative potential of adoptive T-cell therapy for cancer. Immunol Rev (2014) 257 (1): 56-71. doi: 10.1111/imr.12132).

[0794] Approaches such as the foregoing may be adapted to provide methods of treating and/or increasing survival of a subject having a disease, such as a neoplasia, for example by administering an effective amount of an immunoresponsive cell comprising an antigen recognizing receptor that binds a selected antigen, wherein the binding activates the immunoresponsive cell, thereby treating or preventing the disease (such as a neoplasia, a pathogen infection, an autoimmune disorder, or an allogeneic transplant reaction).

[0795] In one embodiment, the treatment can be administered after lymphodepleting pretreatment in the form of chemotherapy (typically a combination of cyclophosphamide and fludarabine) or radiation therapy. Initial studies in ACT had short lived responses and the transferred cells did not persist in vivo for very long (Houot et al., T-cell-based immunotherapy: adoptive cell transfer and checkpoint inhibition. Cancer Immunol Res (2015) 3 (10): 1115-22; and Kamta et al., Advancing Cancer Therapy with Present and Emerging Immuno-Oncology Approaches. Front. Oncol. (2017) 7:64). Immune suppressor cells like Tregs and MDSCs may attenuate the activity of transferred cells by outcompeting them for the necessary cytokines. Not being bound by a theory lymphodepleting pretreatment may eliminate the suppressor cells allowing the TILs to persist.

[0796] In one embodiment, the treatment can be administrated into patients undergoing an immunosuppressive treatment (e.g., glucocorticoid treatment). The cells or population of cells may be made resistant to at least one immunosuppressive agent due to the inactivation of a gene encoding a receptor for such immunosuppressive agent. In one embodiment, the immunosuppressive treatment provides for the selection and expansion of the immunoresponsive T cells within the patient.

[0797] In one embodiment, the treatment can be administered before primary treatment (e.g., surgery or radiation therapy) to shrink a tumor before the primary treatment. In another embodiment, the treatment can be administered after primary treatment to remove any remaining cancer cells.

[0798] In one embodiment, immunometabolic barriers can be targeted therapeutically prior to and/or during ACT to enhance responses to ACT or CAR T-cell therapy and to support endogenous immunity (see, e.g., Irving et al., Engineering Chimeric Antigen Receptor T-Cells for Racing in Solid Tumors: Don't Forget the Fuel, Front. Immunol., 3 Apr. 2017, doi.org/10.3389/fimmu.2017.00267).

[0799] The administration of cells or population of cells, such as immune system cells or cell populations, such as more particularly immunoresponsive cells or cell populations, as disclosed herein may be carried out in any convenient manner, including by aerosol inhalation, injection, ingestion, transfusion, implantation or transplantation. The cells or population of cells may be administered to a patient subcutaneously, intradermally, intratumorally, intranodally, intramedullary, intramuscularly, intrathecally, by intravenous or intralymphatic injection, or intraperitoneally. In one embodiment, the disclosed CARs may be delivered or administered into a cavity formed by the resection of tumor tissue (i.e., intracavity delivery) or directly into a tumor prior to resection (i.e., intratumoral delivery). In one embodiment, the cell compositions of the present invention are preferably administered by intravenous injection.

[0800] The administration of the cells or population of cells can consist of the administration of 104-109 cells per kg body weight, preferably 105 to 106 cells/kg body weight including all integer values of cell numbers within those ranges. Dosing in CAR T cell therapies may for example involve administration of from 106 to 10⁹ cells/kg, with or without a course of lymphodepletion, for example with cyclophosphamide. The cells or population of cells can be administrated in one or more doses. In another embodiment, the effective amount of cells are administrated as a single dose. In another embodiment, the effective amount of cells are administrated as more than one dose over a period time. Timing of administration is within the judgment of managing physician and depends on the clinical condition of the patient. The cells or population of cells may be obtained from any source, such as a blood bank or a donor. While individual needs vary, determination of optimal ranges of effective amounts of a given cell type for a particular disease or conditions are within the skill of one in the art. An effective amount means an amount which provides a therapeutic or prophylactic benefit. The dosage administrated will be dependent upon the age, health and weight of the recipient, kind of concurrent treatment, if any, frequency of treatment and the nature of the effect desired.

[0801] In another embodiment, the effective amount of cells or composition comprising those cells are administrated parenterally. The administration can be an intravenous administration. The administration can be directly done by injection within a tumor.

[0802] To guard against possible adverse reactions, engineered immunoresponsive cells may be equipped with a transgenic safety switch, in the form of a transgene that renders the cells vulnerable to exposure to a specific signal. For example, the herpes simplex viral thymidine kinase (TK) gene may be used in this way, for example by introduction into allogeneic T lymphocytes used as donor lymphocyte infusions following stem cell transplantation (Greco, et al., Improving the safety of cell therapy with the TK-suicide gene. Front. Pharmacol. 2015; 6:95). In such cells, administration of a nucleoside prodrug such as ganciclovir or acyclovir causes cell death. Alternative safety switch constructs include inducible caspase 9, for example triggered by administration of a small-molecule dimerizer that brings together two nonfunctional icasp9 molecules to form the active enzyme. A wide variety of alternative approaches to implementing cellular proliferation controls have been described (see U.S. Patent Publication No. 20130071414; International Patent Publication WO 2011/146862; International Patent Publication WO 2014/011987; International Patent Publication WO 2013/040371; Zhou et al. BLOOD, 2014, 123/25:3895-3905; Di Stasi et al., The New England Journal of Medicine 2011; 365:1673-1683; Sadelain M, The New England Journal of Medicine 2011; 365:1735-173; Ramos et al., Stem Cells 28 (6): 1107-15 (2010)).

[0803] In a further refinement of adoptive therapies, genome editing may be used to tailor immunoresponsive cells to alternative implementations, for example providing edited CAR T cells (see Poirot et al., 2015, Multiplex genome edited T-cell manufacturing platform for “off-the-shelf” adoptive T-cell immunotherapies, Cancer Res 75 (18): 3853; Ren et al., 2017, Multiplex genome editing to generate universal CAR T cells resistant to PD1 inhibition, Clin Cancer Res. 2017 May 1;23 (9): 2255-2266. doi: 10.1158/1078-0432.CCR-16-1300. Epub 2016 Nov. 4; Qasim et al., 2017, Molecular remission of infant B-ALL after infusion of universal TALEN gene-edited CAR T cells, Sci Transl Med. 2017 Jan. 25;9 (374); Legut, et al., 2018, CRISPR-mediated TCR replacement generates superior anticancer transgenic T cells. Blood, 131 (3), 311-322; and Georgiadis et al., Long Terminal Repeat CRISPR-CAR-Coupled “Universal” T Cells Mediate Potent Anti-leukemic Effects, Molecular Therapy, In Press, Corrected Proof, Available online 6 Mar. 2018). Cells may be edited using any CRISPR system and method of use thereof as described herein. The composition and systems may be delivered to an immune cell by any method described herein. In preferred embodiments, cells are edited ex vivo and transferred to a subject in need thereof. Immunoresponsive cells, CAR T cells or any cells used for adoptive cell transfer may be edited. Editing may be performed for example to insert or knock-in an exogenous gene, such as an exogenous gene encoding a CAR or a TCR, at a preselected locus in a cell (e.g. TRAC locus); to eliminate potential alloreactive T-cell receptors (TCR) or to prevent inappropriate pairing between endogenous and exogenous TCR chains, such as to knock-out or knock-down expression of an endogenous TCR in a cell; to disrupt the target of a chemotherapeutic agent in a cell; to block an immune checkpoint, such as to knock-out or knock-down expression of an immune checkpoint protein or receptor in a cell; to knock-out or knock-down expression of other gene or genes in a cell, the reduced expression or lack of expression of which can enhance the efficacy of adoptive therapies using the cell; to knock-out or knock-down expression of an endogenous gene in a cell, said endogenous gene encoding an antigen targeted by an exogenous CAR or TCR; to knock-out or knock-down expression of one or more MHC constituent proteins in a cell; to activate a T cell; to modulate cells such that the cells are resistant to exhaustion or dysfunction; and/or increase the differentiation and/or proliferation of functionally exhausted or dysfunctional CD8+ T-cells (see International Patent Publication Nos. WO 2013/176915, WO 2014/059173, WO 2014/172606, WO 2014/184744, and WO 2014/191128).

[0804] In one embodiment, editing may result in inactivation of a gene. By inactivating a gene, it is intended that the gene of interest is not expressed in a functional protein form. In a particular embodiment, the system specifically catalyzes cleavage in one targeted gene thereby inactivating said targeted gene. The nucleic acid strand breaks caused are commonly repaired through the distinct mechanisms of homologous recombination or non-homologous end joining (NHEJ). However, NHEJ is an imperfect repair process that often results in changes to the DNA sequence at the site of the cleavage. Repair via non-homologous end joining (NHEJ) often results in small insertions or deletions (Indel) and can be used for the creation of specific gene knockouts. Cells in which a cleavage induced mutagenesis event has occurred can be identified and/or selected by well-known methods in the art. In one embodiment, homology directed repair (HDR) is used to concurrently inactivate a gene (e.g., TRAC) and insert an endogenous TCR or CAR into the inactivated locus.

[0805] Hence, in one embodiment, editing of cells, particularly cells intended for adoptive cell therapies, more particularly immunoresponsive cells such as T cells, may be performed to insert or knock-in an exogenous gene, such as an exogenous gene encoding a CAR or a TCR, at a preselected locus in a cell. Conventionally, nucleic acid molecules encoding CARs or TCRs are transfected or transduced to cells using randomly integrating vectors, which, depending on the site of integration, may lead to clonal expansion, oncogenic transformation, variegated transgene expression and/or transcriptional silencing of the transgene. Directing of transgene(s) to a specific locus in a cell can minimize or avoid such risks and advantageously provide for uniform expression of the transgene(s) by the cells. Without limitation, suitable ‘safe harbor’ loci for directed transgene integration include CCR5 or AAVS1. Homology-directed repair (HDR) strategies are known and described elsewhere in this specification allowing to insert transgenes into desired loci (e.g., TRAC locus).

[0806] Further suitable loci for insertion of transgenes, in particular CAR or exogenous TCR transgenes, include without limitation loci comprising genes coding for constituents of endogenous T-cell receptor, such as T-cell receptor alpha locus (TRA) or T-cell receptor beta locus (TRB), for example T-cell receptor alpha constant (TRAC) locus, T-cell receptor beta constant 1 (TRBC1) locus or T-cell receptor beta constant 2 (TRBC1) locus. Advantageously, insertion of a transgene into such locus can simultaneously achieve expression of the transgene, potentially controlled by the endogenous promoter, and knock-out expression of the endogenous TCR. This approach has been exemplified in Eyquem et al., (2017) Nature 543:113-117, wherein the authors used CRISPR/Cas9 gene editing to knock-in a DNA molecule encoding a CD19-specific CAR into the TRAC locus downstream of the endogenous promoter; the CAR-T cells obtained by CRISPR were significantly superior in terms of reduced tonic CAR signaling and exhaustion.

[0807] T cell receptors (TCR) are cell surface receptors that participate in the activation of T cells in response to the presentation of antigen. The TCR is generally made from two chains, α and β, which assemble to form a heterodimer and associates with the CD3-transducing subunits to form the T cell receptor complex present on the cell surface. Each a and B chain of the TCR consists of an immunoglobulin-like N-terminal variable (V) and constant (C) region, a hydrophobic transmembrane domain, and a short cytoplasmic region. As for immunoglobulin molecules, the variable region of the a and B chains are generated by V (D) J recombination, creating a large diversity of antigen specificities within the population of T cells. However, in contrast to immunoglobulins that recognize intact antigen, T cells are activated by processed peptide fragments in association with an MHC molecule, introducing an extra dimension to antigen recognition by T cells, known as MHC restriction. Recognition of MHC disparities between the donor and recipient through the T cell receptor leads to T cell proliferation and the potential development of graft versus host disease (GVHD). The inactivation of TCRα or TCRB can result in the elimination of the TCR from the surface of T cells preventing recognition of alloantigen and thus GVHD. However, TCR disruption generally results in the elimination of the CD3 signaling component and alters the means of further T cell expansion.

[0808] Hence, in one embodiment, editing of cells, particularly cells intended for adoptive cell therapies, more particularly immunoresponsive cells such as T cells, may be performed to knock-out or knock-down expression of an endogenous TCR in a cell. For example, NHEJ-based or HDR-based gene editing approaches can be employed to disrupt the endogenous TCR alpha and/or beta chain genes. For example, gene editing system or systems, such as Fanzor system or systems, can be designed to target a sequence found within the TCR beta chain conserved between the beta 1 and beta 2 constant region genes (TRBC1 and TRBC2) and/or to target the constant region of the TCR alpha chain (TRAC) gene.

[0809] Allogeneic cells are rapidly rejected by the host immune system. It has been demonstrated that, allogeneic leukocytes present in non-irradiated blood products will persist for no more than 5 to 6 days (Boni, Muranski et al. 2008 Blood 1;112 (12): 4746-54). Thus, to prevent rejection of allogeneic cells, the host's immune system usually has to be suppressed to some extent. However, in the case of adoptive cell transfer the use of immunosuppressive drugs also have a detrimental effect on the introduced therapeutic T cells. Therefore, to effectively use an adoptive immunotherapy approach in these conditions, the introduced cells would need to be resistant to the immunosuppressive treatment. Thus, in a particular embodiment, the present invention further comprises a step of modifying T cells to make them resistant to an immunosuppressive agent, preferably by inactivating at least one gene encoding a target for an immunosuppressive agent. An immunosuppressive agent is an agent that suppresses immune function by one of several mechanisms of action. An immunosuppressive agent can be, but is not limited to a calcineurin inhibitor, a target of rapamycin, an interleukin-2 receptor α-chain blocker, an inhibitor of inosine monophosphate dehydrogenase, an inhibitor of dihydrofolic acid reductase, a corticosteroid or an immunosuppressive antimetabolite. The present invention allows conferring immunosuppressive resistance to T cells for immunotherapy by inactivating the target of the immunosuppressive agent in T cells. As non-limiting examples, targets for an immunosuppressive agent can be a receptor for an immunosuppressive agent such as: CD52, glucocorticoid receptor (GR), a FKBP family gene member and a cyclophilin family gene member.

[0810] In one embodiment, editing of cells, particularly cells intended for adoptive cell therapies, more particularly immunoresponsive cells such as T cells, may be performed to block an immune checkpoint, such as to knock-out or knock-down expression of an immune checkpoint protein or receptor in a cell. Immune checkpoints are inhibitory pathways that slow down or stop immune reactions and prevent excessive tissue damage from uncontrolled activity of immune cells. In one embodiment, the immune checkpoint targeted is the programmed death-1 (PD-1 or CD279) gene (PDCD1). In other embodiments, the immune checkpoint targeted is cytotoxic T-lymphocyte-associated antigen (CTLA-4). In additional embodiments, the immune checkpoint targeted is another member of the CD28 and CTLA4 Ig superfamily such as BTLA, LAG3, ICOS, PDL1 or KIR. In further additional embodiments, the immune checkpoint targeted is a member of the TNFR superfamily such as CD40, OX40, CD137, GITR, CD27 or TIM-3.

[0811] Additional immune checkpoints include Src homology 2 domain-containing protein tyrosine phosphatase 1 (SHP-1) (Watson H A, et al., SHP-1: the next checkpoint target for cancer immunotherapy? Biochem Soc Trans. 2016 Apr. 15;44 (2): 356-62). SHP-1 is a widely expressed inhibitory protein tyrosine phosphatase (PTP). In T-cells, it is a negative regulator of antigen-dependent activation and proliferation. It is a cytosolic protein, and therefore not amenable to antibody-mediated therapies, but its role in activation and proliferation makes it an attractive target for genetic manipulation in adoptive transfer strategies, such as chimeric antigen receptor (CAR) T cells. Immune checkpoints may also include T cell immunoreceptor with Ig and ITIM domains (TIGIT/Vstm3/WUCAM/VSIG9) and VISTA (Le Mercier I, et al., (2015) Beyond CTLA-4 and PD-1, the generation Z of negative checkpoint regulators. Front. Immunol. 6:418).

[0812] International Patent Publication No. WO 2014/172606 relates to the use of MT1 and/or MT2 inhibitors to increase proliferation and/or activity of exhausted CD8+ T-cells and to decrease CD8+ T-cell exhaustion (e.g., decrease functionally exhausted or unresponsive CD8+immune cells). In one embodiment, metallothioneins are targeted by gene editing in adoptively transferred T cells.

[0813] In one embodiment, targets of gene editing may be at least one targeted locus involved in the expression of an immune checkpoint protein. Such targets may include, but are not limited to CTLA4, PPP2CA, PPP2CB, PTPN6, PTPN22, PDCD1, ICOS (CD278), PDL1, KIR, LAG3, HAVCR2, BTLA, CD160, TIGIT, CD96, CRTAM, LAIR1, SIGLEC7, SIGLEC9, CD244 (2β4), TNFRSF10B, TNFRSF10A, CASP8, CASP10, CASP3, CASP6, CASP7, FADD, FAS, TGFBRII, TGFRBRI, SMAD2, SMAD3, SMAD4, SMAD10, SKI, SKIL, TGIF1, IL1OR, IL10RB, HMOX2, IL6R, IL6ST, EIF2AK4, CSK, PAGI, SITI, FOXP3, PRDM1, BATF, VISTA, GUCY1A2, GUCY1A3, GUCY1β2, GUCY1β3, MT1, MT2, CD40, OX40, CD137, GITR, CD27, SHP-1, TIM-3, CEACAM-1, CEACAM-3, or CEACAM-5. In preferred embodiments, the gene locus involved in the expression of PD-1 or CTLA-4 genes is targeted. In other preferred embodiments, combinations of genes are targeted, such as but not limited to PD-1 and TIGIT.

[0814] By means of an example and without limitation, International Patent Publication No. WO 2016/196388 concerns an engineered T cell comprising (a) a genetically engineered antigen receptor that specifically binds to an antigen, which receptor may be a CAR; and (b) a disrupted gene encoding a PD-L1, an agent for disruption of a gene encoding a PD-L1, and/or disruption of a gene encoding PD-L1, wherein the disruption of the gene may be mediated by a gene editing nuclease, a zinc finger nuclease (ZFN), CRISPR/Cas9 and/or TALEN. WO2015142675 relates to immune effector cells comprising a CAR in combination with an agent (such as the composition or system herein) that increases the efficacy of the immune effector cells in the treatment of cancer, wherein the agent may inhibit an immune inhibitory molecule, such as PD1, PD-L1, CTLA-4, TIM-3, LAG-3, VISTA, BTLA, TIGIT, LAIR1, CD160, 2β4, TGFR beta, CEACAM-1, CEACAM-3, or CEACAM-5. Ren et al., (2017) Clin Cancer Res 23 (9) 2255-2266 performed lentiviral delivery of CAR and electro-transfer of Cas9 mRNA and gRNAs targeting endogenous TCR, B-2 microglobulin (β2M) and PD1 simultaneously, to generate gene-disrupted allogeneic CAR T cells deficient of TCR, HLA class I molecule and PD1.

[0815] In one embodiment, cells may be engineered to express a CAR, wherein expression and/or function of methylcytosine dioxygenase genes (TET1, TET2 and/or TET3) in the cells has been reduced or eliminated, (such as the composition or system herein) (for example, as described in WO201704916).

[0816] In one embodiment, editing of cells, particularly cells intended for adoptive cell therapies, more particularly immunoresponsive cells such as T cells, may be performed to knock-out or knock-down expression of an endogenous gene in a cell, said endogenous gene encoding an antigen targeted by an exogenous CAR or TCR, thereby reducing the likelihood of targeting of the engineered cells. In one embodiment, the targeted antigen may be one or more antigen selected from the group consisting of CD38, CD138, CS-1, CD33, CD26, CD3ζ, CD53, CD92, CD100, CD148, CD150, CD200, CD261, CD262, CD362, human telomerase reverse transcriptase (hTERT), survivin, mouse double minute 2 homolog (MDM2), cytochrome P450 1β1 (CYP1B), HER2/neu, Wilms' tumor gene 1 (WT1), livin, alphafetoprotein (AFP), carcinoembryonic antigen (CEA), mucin 16 (MUC16), MUC1, prostate-specific membrane antigen (PSMA), p53, cyclin (D₁), B cell maturation antigen (BCMA), transmembrane activator and CAML Interactor (TACI), and B-cell activating factor receptor (BAFF-R) (for example, as described in International Patent Publication Nos. WO 2016/011210 and WO 2017/011804).

[0817] In one embodiment, editing of cells, particularly cells intended for adoptive cell therapies, more particularly immunoresponsive cells such as T cells, may be performed to knock-out or knock-down expression of one or more MHC constituent proteins, such as one or more HLA proteins and/or beta-2 microglobulin (β2M), in a cell, whereby rejection of non-autologous (e.g., allogeneic) cells by the recipient's immune system can be reduced or avoided. In preferred embodiments, one or more HLA class I proteins, such as HLA-A, B and/or C, and/or β2M may be knocked-out or knocked-down. Preferably, β2M may be knocked-out or knocked-down. By means of an example, Ren et al., (2017) Clin Cancer Res 23 (9) 2255-2266 performed lentiviral delivery of CAR and electro-transfer of Cas mRNA and gRNAs targeting endogenous TCR, β-2 microglobulin (β2M) and PD1 simultaneously, to generate gene-disrupted allogeneic CAR T cells deficient of TCR, HLA class I molecule and PD1.

[0818] In other embodiments, at least two genes are edited. Pairs of genes may include, but are not limited to PD1 and TCRa, PD1 and TCRB, CTLA-4 and TCRa, CTLA-4 and TCRB, LAG3 and TCRa, LAG3 and TCRB, Tim3 and TCRa, Tim3 and TCRB, BTLA and TCRa, BTLA and TCRB, BY55 and TCRa, BY55 and TCRB, TIGIT and TCRa, TIGIT and TCRB, β7H5 and TCRa, β7H5 and TCRB, LAIR1 and TCRa, LAIR1 and TCRB, SIGLEC10 and TCRa, SIGLEC10 and TCRB, 2β4 and TCRa, 2β4 and TCRB, β2M and TCRa, β2M and TCRB.

[0819] In one embodiment, a cell may be multiplied edited (multiplex genome editing) as taught herein to (1) knock-out or knock-down expression of an endogenous TCR (for example, TRBC1, TRBC2 and/or TRAC), (2) knock-out or knock-down expression of an immune checkpoint protein or receptor (for example PD1, PD-L1 and/or CTLA4); and (3) knock-out or knock-down expression of one or more MHC constituent proteins (for example, HLA-A, B and/or C, and/or β2M, preferably β2M).

[0820] Whether prior to or after genetic modification of the T cells, the T cells can be activated and expanded generally using methods as described, for example, in U.S. Pat. Nos. 6,352,694; 6,534,055; 6,905,680; 5,858,358; 6,887,466; 6,905,681; 7,144,575; 7,232,566; 7,175,843; 5,883,223; 6,905,874; 6,797,514; 6,867,041; and 7,572,631. T cells can be expanded in vitro or in vivo.

[0821] Immune cells may be obtained using any method known in the art. In one embodiment, allogenic T cells may be obtained from healthy subjects. In one embodiment T cells that have infiltrated a tumor are isolated. T cells may be removed during surgery. T cells may be isolated after removal of tumor tissue by biopsy. T cells may be isolated by any means known in the art. In one embodiment, T cells are obtained by apheresis. In one embodiment, the method may comprise obtaining a bulk population of T cells from a tumor sample by any suitable method known in the art. For example, a bulk population of T cells can be obtained from a tumor sample by dissociating the tumor sample into a cell suspension from which specific cell populations can be selected. Suitable methods of obtaining a bulk population of T cells may include, but are not limited to, any one or more of mechanically dissociating (e.g., mincing) the tumor, enzymatically dissociating (e.g., digesting) the tumor, and aspiration (e.g., as with a needle).

[0822] The bulk population of T cells obtained from a tumor sample may comprise any suitable type of T cell. Preferably, the bulk population of T cells obtained from a tumor sample comprises tumor infiltrating lymphocytes (TILs).

[0823] The tumor sample may be obtained from any mammal. Unless stated otherwise, as used herein, the term “mammal” refers to any mammal including, but not limited to, mammals of the order Logomorpha, such as rabbits; the order Carnivora, including Felines (cats) and Canines (dogs); the order Artiodactyla, including Bovines (cows) and Swines (pigs); or of the order Perssodactyla, including Equines (horses). The mammals may be non-human primates, e.g., of the order Primates, Ceboids, or Simoids (monkeys) or of the order Anthropoids (humans and apes). In one embodiment, the mammal may be a mammal of the order Rodentia, such as mice and hamsters. Preferably, the mammal is a non-human primate or a human. An especially preferred mammal is the human.

[0824] T cells can be obtained from a number of sources, including peripheral blood mononuclear cells (PBMC), bone marrow, lymph node tissue, spleen tissue, and tumors. In one embodiment of the present invention, T cells can be obtained from a unit of blood collected from a subject using any number of techniques known to the skilled artisan, such as Ficoll separation. In one preferred embodiment, cells from the circulating blood of an individual are obtained by apheresis or leukapheresis. The apheresis product typically contains lymphocytes, including T cells, monocytes, granulocytes, B cells, other nucleated white blood cells, red blood cells, and platelets. In one embodiment, the cells collected by apheresis may be washed to remove the plasma fraction and to place the cells in an appropriate buffer or media for subsequent processing steps. In one embodiment of the invention, the cells are washed with phosphate buffered saline (PBS). In an alternative embodiment, the wash solution lacks calcium and may lack magnesium or may lack many if not all divalent cations. Initial activation steps in the absence of calcium lead to magnified activation. As those of ordinary skill in the art would readily appreciate a washing step may be accomplished by methods known to those in the art, such as by using a semi-automated “flow-through” centrifuge (for example, the Cobe 2991 cell processor) according to the manufacturer's instructions. After washing, the cells may be resuspended in a variety of biocompatible buffers, such as, for example, Ca-free, Mg-free PBS. Alternatively, the undesirable components of the apheresis sample may be removed and the cells directly resuspended in culture media.

[0825] In another embodiment, T cells are isolated from peripheral blood lymphocytes by lysing the red blood cells and depleting the monocytes, for example, by centrifugation through a PERCOLL™ gradient. A specific subpopulation of T cells, such as CD28+, CD4+, CDC, CD45RA+, and CD45RO+ T cells, can be further isolated by positive or negative selection techniques. For example, in one preferred embodiment, T cells are isolated by incubation with anti-CD3/anti-CD28 (i.e., 3×28)-conjugated beads, such as DYNABEADS® M-450 CD3/CD28 T, or XCYTE DYNABEADS™ for a time period sufficient for positive selection of the desired T cells. In one embodiment, the time period is about 30 minutes. In a further embodiment, the time period ranges from 30 minutes to 36 hours or longer and all integer values there between. In a further embodiment, the time period is at least 1, 2, 3, 4, 5, or 6 hours. In yet another preferred embodiment, the time period is 10 to 24 hours. In one preferred embodiment, the incubation time period is 24 hours. For isolation of T cells from patients with leukemia, use of longer incubation times, such as 24 hours, can increase cell yield. Longer incubation times may be used to isolate T cells in any situation where there are few T cells as compared to other cell types, such in isolating tumor infiltrating lymphocytes (TIL) from tumor tissue or from immunocompromised individuals. Further, use of longer incubation times can increase the efficiency of capture of CD8+ T cells.

[0826] Enrichment of a T cell population by negative selection can be accomplished with a combination of antibodies directed to surface markers unique to the negatively selected cells. A preferred method is cell sorting and/or selection via negative magnetic immunoadherence or flow cytometry that uses a cocktail of monoclonal antibodies directed to cell surface markers present on the cells negatively selected. For example, to enrich for CD4+ cells by negative selection, a monoclonal antibody cocktail typically includes antibodies to CD14, CD20, CD11b, CD16, HLA-DR, and CD8.

[0827] Further, monocyte populations (e.g., CD14+ cells) may be depleted from blood preparations by a variety of methodologies, including anti-CD14 coated beads or columns, or utilization of the phagocytotic activity of these cells to facilitate removal. Accordingly, in one embodiment, the invention uses paramagnetic particles of a size sufficient to be engulfed by phagocytotic monocytes. In one embodiment, the paramagnetic particles are commercially available beads, for example, those produced by Life Technologies under the trade name Dynabeads™. In one embodiment, other non-specific cells are removed by coating the paramagnetic particles with “irrelevant” proteins (e.g., serum proteins or antibodies). Irrelevant proteins and antibodies include those proteins and antibodies or fragments thereof that do not specifically target the T cells to be isolated. In one embodiment, the irrelevant beads include beads coated with sheep anti-mouse antibodies, goat anti-mouse antibodies, and human serum albumin.

[0828] In brief, such depletion of monocytes is performed by preincubating T cells isolated from whole blood, apheresed peripheral blood, or tumors with one or more varieties of irrelevant or non-antibody coupled paramagnetic particles at any amount that allows for removal of monocytes (approximately a 20:1 bead: cell ratio) for about 30 minutes to 2 hours at 22 to 37 degrees C., followed by magnetic removal of cells which have attached to or engulfed the paramagnetic particles. Such separation can be performed using standard methods available in the art. For example, any magnetic separation methodology may be used including a variety of which are commercially available, (e.g., DYNAL® Magnetic Particle Concentrator (DYNAL MPC®)). Assurance of requisite depletion can be monitored by a variety of methodologies known to those of ordinary skill in the art, including flow cytometric analysis of CD14 positive cells, before and after depletion.

[0829] For isolation of a desired population of cells by positive or negative selection, the concentration of cells and surface (e.g., particles such as beads) can be varied. In one embodiment, it may be desirable to significantly decrease the volume in which beads and cells are mixed together (i.e., increase the concentration of cells), to ensure maximum contact of cells and beads. For example, in one embodiment, a concentration of 2 billion cells/ml is used. In one embodiment, a concentration of 1 billion cells/ml is used. In a further embodiment, greater than 100 million cells/ml is used. In a further embodiment, a concentration of cells of 10, 15, 20, 25, 30, 35, 40, 45, or 50 million cells/ml is used. In yet another embodiment, a concentration of cells from 75, 80, 85, 90, 95, or 100 million cells/ml is used. In further embodiments, concentrations of 125 or 150 million cells/ml can be used. Using high concentrations can result in increased cell yield, cell activation, and cell expansion. Further, use of high cell concentrations allows more efficient capture of cells that may weakly express target antigens of interest, such as CD28-negative T cells, or from samples where there are many tumor cells present (i.e., leukemic blood, tumor tissue, etc.). Such populations of cells may have therapeutic value and would be desirable to obtain. For example, using high concentration of cells allows more efficient selection of CD8+ T cells that normally have weaker CD28 expression.

[0830] In a related embodiment, it may be desirable to use lower concentrations of cells. By significantly diluting the mixture of T cells and surface (e.g., particles such as beads), interactions between the particles and cells are minimized. This selects for cells that express high amounts of desired antigens to be bound to the particles. For example, CD4+ T cells express higher levels of CD28 and are more efficiently captured than CD8+ T cells in dilute concentrations. In one embodiment, the concentration of cells used is 5×10⁶/ml. In other embodiments, the concentration used can be from about 1×10⁵/ml to 1×10⁶/ml, and any integer value in between.

[0831] T cells can also be frozen. Wishing not to be bound by theory, the freeze and subsequent thaw step provides a more uniform product by removing granulocytes and to some extent monocytes in the cell population. After a washing step to remove plasma and platelets, the cells may be suspended in a freezing solution. While many freezing solutions and parameters are known in the art and will be useful in this context, one method involves using PBS containing 20% DMSO and 8% human serum albumin, or other suitable cell freezing media, the cells then are frozen to −80° C. at a rate of 1° per minute and stored in the vapor phase of a liquid nitrogen storage tank. Other methods of controlled freezing may be used as well as uncontrolled freezing immediately at −20° C. or in liquid nitrogen.

[0832] T cells for use in the present invention may also be antigen-specific T cells. For example, tumor-specific T cells can be used. In one embodiment, antigen-specific T cells can be isolated from a patient of interest, such as a patient afflicted with a cancer or an infectious disease. In one embodiment, neoepitopes are determined for a subject and T cells specific to these antigens are isolated. Antigen-specific cells for use in expansion may also be generated in vitro using any number of methods known in the art, for example, as described in U.S. Patent Publication No. US20040224402 entitled, Generation and Isolation of Antigen-Specific T Cells, or in U.S. Pat. No. 6,040,177. Antigen-specific cells for use in the present invention may also be generated using any number of methods known in the art, for example, as described in Current Protocols in Immunology, or Current Protocols in Cell Biology, both published by John Wiley & Sons, Inc., Boston, Mass.

[0833] In a related embodiment, it may be desirable to sort or otherwise positively select (e.g., via magnetic selection) the antigen specific cells prior to or following one or two rounds of expansion. Sorting or positively selecting antigen-specific cells can be carried out using peptide-MHC tetramers (Altman, et al., Science. 1996 Oct. 4; 274 (5284): 94-6). In another embodiment, the adaptable tetramer technology approach is used (Andersen et al., 2012 Nat Protoc. 7:891-902). Tetramers are limited by the need to utilize predicted binding peptides based on prior hypotheses, and the restriction to specific HLAs. Peptide-MHC tetramers can be generated using techniques known in the art and can be made with any MHC molecule of interest and any antigen of interest as described herein. Specific epitopes to be used in this context can be identified using numerous assays known in the art. For example, the ability of a polypeptide to bind to MHC class I may be evaluated indirectly by monitoring the ability to promote incorporation of 125I labeled β2-microglobulin (2m) into MHC class I/β2m/peptide heterotrimeric complexes (see Parker et al., J. Immunol. 152:163, 1994).

[0834] In one embodiment cells are directly labeled with an epitope-specific reagent for isolation by flow cytometry followed by characterization of phenotype and TCRs. In one embodiment, T cells are isolated by contacting with T cell specific antibodies. Sorting of antigen-specific T cells, or generally any cells of the present invention, can be carried out using any of a variety of commercially available cell sorters, including, but not limited to, MoFlo sorter (DakoCytomation, Fort Collins, Colo.), FACSAria™, FACSArray™, FACSVantage™, BD™ LSR II, and FACSCalibur™ (BD Biosciences, San Jose, Calif.).

[0835] In a preferred embodiment, the method comprises selecting cells that also express CD3. The method may comprise specifically selecting the cells in any suitable manner. Preferably, the selecting is carried out using flow cytometry. The flow cytometry may be carried out using any suitable method known in the art. The flow cytometry may employ any suitable antibodies and stains. Preferably, the antibody is chosen such that it specifically recognizes and binds to the particular biomarker being selected. For example, the specific selection of CD3, CD8, TIM-3, LAG-3, 4-1BB, or PD-1 may be carried out using anti-CD3, anti-CD8, anti-TIM-3, anti-LAG-3, anti-4-1BB, or anti-PD-1 antibodies, respectively. The antibody or antibodies may be conjugated to a bead (e.g., a magnetic bead) or to a fluorochrome. Preferably, the flow cytometry is fluorescence-activated cell sorting (FACS). TCRs expressed on T cells can be selected based on reactivity to autologous tumors. Additionally, T cells that are reactive to tumors can be selected for based on markers using the methods described in patent publication Nos. WO2014133567 and WO2014133568, herein incorporated by reference in their entirety. Additionally, activated T cells can be selected for based on surface expression of CD107a.

[0836] In one embodiment of the invention, the method further comprises expanding the numbers of T cells in the enriched cell population. Such methods are described in U.S. Pat. No. 8,637,307 and is herein incorporated by reference in its entirety. The numbers of T cells may be increased at least about 3-fold (or 4-, 5-, 6-, 7-, 8-, or 9-fold), more preferably at least about 10-fold (or 20-, 30-, 40-, 50-, 60-, 70-, 80-, or 90-fold), more preferably at least about 100-fold, more preferably at least about 1,000 fold, or most preferably at least about 100,000-fold. The numbers of T cells may be expanded using any suitable method known in the art. Exemplary methods of expanding the numbers of cells are described in patent publication No. WO 2003/057171, U.S. Pat. No. 8,034,334, and U.S. Patent Publication No. 2012/0244133, each of which is incorporated herein by reference.

[0837] In one embodiment, ex vivo T cell expansion can be performed by isolation of T cells and subsequent stimulation or activation followed by further expansion. In one embodiment of the invention, the T cells may be stimulated or activated by a single agent. In another embodiment, T cells are stimulated or activated with two agents, one that induces a primary signal and a second that is a co-stimulatory signal. Ligands useful for stimulating a single signal or stimulating a primary signal and an accessory molecule that stimulates a second signal may be used in soluble form. Ligands may be attached to the surface of a cell, to an Engineered Multivalent Signaling Platform (EMSP), or immobilized on a surface. In a preferred embodiment, both primary and secondary agents are co-immobilized on a surface, for example a bead or a cell. In one embodiment, the molecule providing the primary activation signal may be a CD3 ligand, and the co-stimulatory molecule may be a CD28 ligand or 4-1BB ligand.

[0838] In one embodiment, T cells comprising a CAR or an exogenous TCR, may be manufactured as described in International Patent Publication No. WO 2015/120096, by a method comprising enriching a population of lymphocytes obtained from a donor subject; stimulating the population of lymphocytes with one or more T-cell stimulating agents to produce a population of activated T cells, wherein the stimulation is performed in a closed system using serum-free culture medium; transducing the population of activated T cells with a viral vector comprising a nucleic acid molecule which encodes the CAR or TCR, using a single cycle transduction to produce a population of transduced T cells, wherein the transduction is performed in a closed system using serum-free culture medium; and expanding the population of transduced T cells for a predetermined time to produce a population of engineered T cells, wherein the expansion is performed in a closed system using serum-free culture medium. In one embodiment, T cells comprising a CAR or an exogenous TCR, may be manufactured as described in WO 2015/120096, by a method comprising: obtaining a population of lymphocytes; stimulating the population of lymphocytes with one or more stimulating agents to produce a population of activated T cells, wherein the stimulation is performed in a closed system using serum-free culture medium; transducing the population of activated T cells with a viral vector comprising a nucleic acid molecule which encodes the CAR or TCR, using at least one cycle transduction to produce a population of transduced T cells, wherein the transduction is performed in a closed system using serum-free culture medium; and expanding the population of transduced T cells to produce a population of engineered T cells, wherein the expansion is performed in a closed system using serum-free culture medium. The predetermined time for expanding the population of transduced T cells may be 3 days. The time from enriching the population of lymphocytes to producing the engineered T cells may be 6 days. The closed system may be a closed bag system. Further provided is population of T cells comprising a CAR or an exogenous TCR obtainable or obtained by said method, and a pharmaceutical composition comprising such cells.

[0839] In one embodiment, T cell maturation or differentiation in vitro may be delayed or inhibited by the method as described in International Patent Publication No. WO 2017/070395, comprising contacting one or more T cells from a subject in need of a T cell therapy with an AKT inhibitor (such as, e.g., one or a combination of two or more AKT inhibitors disclosed in claim 8 of WO2017070395) and at least one of exogenous Interleukin-7 (IL-7) and exogenous Interleukin-15 (IL-15), wherein the resulting T cells exhibit delayed maturation or differentiation, and/or wherein the resulting T cells exhibit improved T cell function (such as, e.g., increased T cell proliferation; increased cytokine production; and/or increased cytolytic activity) relative to a T cell function of a T cell cultured in the absence of an AKT inhibitor.

[0840] In one embodiment, a patient in need of a T cell therapy may be conditioned by a method as described in International Patent Publication No. WO 2016/191756 comprising administering to the patient a dose of cyclophosphamide between 200 mg/m2/day and 2000 mg/m2/day and a dose of fludarabine between 20 mg/m2/day and 900 mg/m²/day.

### Further Exemplary Diseases and Disease Treatments

[0841] The following provides additional exemplary diseases for which the systems and compositions of the present invention can be used to treat and/or prevent, such as by a method described herein.

Genetic Diseases and Diseases with a Genetic and/or Epigenetic Aspect

[0842] The compositions, systems, or components thereof can be used to treat and/or prevent a genetic disease or a disease with a genetic and/or epigenetic aspect. The genes and conditions exemplified herein are not exhaustive. In one embodiment, a method of treating and/or preventing a genetic disease can include administering a composition, system, and/or one or more components thereof to a subject, where the composition, system, and/or one or more components thereof is capable of modifying one or more copies of one or more genes associated with the genetic disease or a disease with a genetic and/or epigenetic aspect in one or more cells of the subject. In one embodiment, modifying one or more copies of one or more genes associated with a genetic disease or a disease with a genetic and/or epigenetic aspect in the subject can eliminate a genetic disease or a symptom thereof in the subject. In one embodiment, modifying one or more copies of one or more genes associated with a genetic disease or a disease with a genetic and/or epigenetic aspect in the subject can decrease the severity of a genetic disease or a symptom thereof in the subject. In one embodiment, the compositions, systems, or components thereof can modify one or more genes or polynucleotides associated with one or more diseases, including genetic diseases and/or those having a genetic aspect and/or epigenetic aspect, including but not limited to, any one or more set forth in Table 4A. It will be appreciated that those diseases and associated genes listed herein are non-exhaustive and non-limiting. Further some genes play roles in the development of multiple diseases.

TABLE 4A
Exemplary Genetic and Other Diseases and Associated Genes

| | Primary | | |
|---|---|---|---|
| | Tissues or | Additional | |
| | System | Tissues/Systems | |
| Disease Name | Affected | Affected | Genes |
| Achondroplasia | Bone and | | fibroblast growth factor receptor 3 |
| | Muscle | | (FGFR3) |
| Achromatopsia | eye | | CNGA3, CNGB3, GNAT2, PDE6C, |
| | | | PDE6H, ACHM2, ACHM3, |
| Acute Renal Injury | kidney | | NFkappaB, AATF, p85alpha, FAS, |
| | | | Apoptosis cascade elements (e.g. |
| | | | FASR, Caspase 2, 3, 4, 6, 7, 8, 9, 10, |
| | | | AKT, TNF alpha, IGF1, IGF1R, |
| | | | RIPK1), p53 |
| Age Related Macular | eye | | Abcr; CCL2; CC2; CP |
| Degeneration | | | (ceruloplasmin); Timp3; cathepsinD; |
| | | | VLDLR, CCR2 |
| AIDS | Immune System | | KIR3DL1, NKAT3, NKB1, AMB11, |
| | | | KIR3DS1, IFNG, CXCL12, SDF1 |
| Albinism (including | Skin, hair, eyes, | | TYR, OCA2, TYRP1, and SLC45A2, |
| oculocutaneous albinism (types | | | SLC24A5 and C10orf11 |
| 1-7) and ocular albinism) | | | |
| Alkaptonuria | Metabolism of | Tissues/organs | HGD |
| | amino acids | where | |
| | | homogentisic | |
| | | acid | |
| | | accumulates, | |
| | | particularly | |
| | | cartilage (joints), | |
| | | heart valves, | |
| | | kidneys | |
| alpha-1 antitrypsin deficiency | Lung | Liver, skin, | SERPINA1, those set forth in |
| (AATD or A1AD) | | vascular system, | WO2017165862, PiZ allele |
| | | kidneys, GI | |
| ALS | CNS | | SOD1; ALS2; ALS3; ALS5; |
| | | | ALS7; STEX; FUS; TARDBP; VEGF |
| | | | (VEGF-a; |
| | | | VEGF-b; VEGF-c); DPP6; NEFH, |
| | | | PTGS1, SLC1A2, TNFRSF10B, |
| | | | PRPH, HSP90AA1, CRIA2, IFNG, |
| | | | AMPA2 S100B, FGF2, AOX1, CS, |
| | | | TXN, RAPHJ1, MAP3K5, NBEAL1, |
| | | | GPX1, ICA1L, RAC1, MAPT, ITPR2, |
| | | | ALS2CR4, GLS, ALS2CR8, CNTFR, |
| | | | ALS2CR11, FOLH1, FAM117B, |
| | | | P4HB, CNTF, SQSTM1, STRADB, |
| | | | NAIP, NLR, YWHAQ, SLC33A1, |
| | | | TRAK2, SCA1, NIF3L1, NIF3, |
| | | | PARD3B, COX8A, CDK15, HECW1, |
| | | | HECT, C2, WW 15, NOS1, MET, |
| | | | SOD2, HSPB1, NEFL, CTSB, ANG, |
| | | | HSPA8, RNase A, VAPB, VAMP, |
| | | | SNCA, alpha HGF, CAT, ACTB, |
| | | | NEFM, TH, BCL2, FAS, CASP3, |
| | | | CLU, SMN1, G6PD, BAX, HSF1, |
| | | | RNF19A, JUN, ALS2CR12, HSPA5, |
| | | | MAPK14, APEX1, TXNRD1, NOS2, |
| | | | TIMP1, CASP9, XIAP, GLG1, EPO, |
| | | | VEGFA, ELN, GDNF, NFE2L2, |
| | | | SLC6A3, HSPA4, APOE, PSMB8, |
| | | | DCTN2, TIMP3, KIFAP3, SLC1A1, |
| | | | SMN2, CCNC, STUB1, ALS2, |
| | | | PRDX6, SYP, CABIN1, CASP1, |
| | | | GART, CDK5, ATXN3, RTN4, |
| | | | C1QB, VEGFC, HTT, PARK7, XDH, |
| | | | GFAP, MAP2, CYCS, FCGR3B, CCS, |
| | | | UBL5, MMP9m SLC18A3, TRPM7, |
| | | | HSPB2, AKTI, DEERL1, CCL2, |
| | | | NGRN, GSR, TPPP3, APAF1, |
| | | | BTBD10, GLUD1, CXCR4, S:C1A3, |
| | | | FLT1, PON1, AR, LIF, ERBB3, |
| | | | :GA:S1, CD44, TP53, TLR3, GRIA1, |
| | | | GAPDH, AMPA, GRIK1, DES, |
| | | | CHAT, FLT4, CHMP2B, BAG1, |
| | | | CRNA COMPONENT4, GSS, BAK1, |
| | | | KDR, GSTP1, OGG1, IL6 |
| Alzheimer's Disease | Brain | | E1; CHIP; UCH; UBB; Tau; LRP; |
| | | | PICALM; CLU; PS1; |
| | | | SORL1; CR1; VLDLR; UBA1; |
| | | | UBA3; CHIP28; AQP1; UCHL1; |
| | | | UCHL3; APP, AAA, CVAP, AD1, |
| | | | APOE, AD2, DCP1, ACE1, MPO, |
| | | | PACIP1, PAXIP1L, PTIP, A2M, |
| | | | BLMH, BMH, PSEN1, AD3, ALAS2, |
| | | | ABCA1, BIN1, BDNF, BTNL8, |
| | | | C1ORF49, CDH4, CHRNB2, |
| | | | CKLFSF2, CLEC4E, CR1L, CSF3R, |
| | | | CST3, CYP2C, DAPK1, ESR1, |
| | | | FCAR, FCGR3B, FFA2, FGA, GAB2, |
| | | | GALP, GAPDHS, GMPB, HP, HTR7, |
| | | | IDE, IF127, IFI6, IFIT2, IL1RN, IL- |
| | | | 1RA, IL8RA, IL8RB, JAG1, KCNJ15, |
| | | | LRP6, MAPT, MARK4, MPHOSPH1, |
| | | | MTHFR, NBN, NCSTN, NIACR2, |
| | | | NMNAT3, NTM, ORM1, P2RY13, |
| | | | PBEF1, PCK1, PICALM, PLAU, |
| | | | PLXNC1, PRNP, PSEN1, PSEN2, |
| | | | PTPRA, RALGPS2, RGSL2, |
| | | | SELENBP1, SLC25A37, SORL1, |
| | | | Mitoferrin-1, TF, TFAM, TNF, |
| | | | TNFRSF10C, UBE1C |
| Amyloidosis | | | APOA1, APP, AAA, CVAP, AD1, |
| | | | GSN, FGA, LYZ, TTR, PALB |
| Amyloid neuropathy | | | TTR, PALB |
| Anemia | Blood | | CDAN1, CDA1, RPS19, DBA, PKLR, |
| | | | PK1, NT5C3, UMPH1, PSN1, RHAG, |
| | | | RH50A, NRAMP2, SPTB, ALAS2, |
| | | | ANH1, ASB, ABCB7, ABC7, ASAT |
| Angelman Syndrome | Nervous system, | | UBE3A |
| | brain | | |
| Attention Deficit Hyperactivity | Brain | | PTCHD1 |
| Disorder (ADHD) | | | |
| Autoimmune lymphoproliferative | Immune system | | TNFRSF6, APT1, FAS, CD95, |
| syndrome | | | ALPS1A |
| Autism, Autism spectrum | Brain | | PTCHD1; Mecp2; BZRAP1; MDGA2; |
| disorders (ASDs), including | | | Sema5A; Neurexin 1; GLO1, RTT, |
| Asperger's and a general | | | PPMX, MRX16, RX79, NLGN3, |
| diagnostic category called | | | NLGN4, KIAA1260, AUTSX2, |
| Pervasive Developmental | | | FMR1, FMR2; FXR1; FXR2; |
| Disorders (PDDs) | | | MGLUR5, ATP10C, CDH10, GRM6, |
| | | | MGLUR6, CDH9, CNTN4, NLGN2, |
| | | | CNTNAP2, SEMA5A, DHCR7, |
| | | | NLGN4X, NLGN4Y, DPP6, NLGN5, |
| | | | EN2, NRCAM, MDGA2, NRXN1, |
| | | | FMR2, AFF2, FOXP2, OR4M2, |
| | | | OXTR, FXR1, FXR2, PAH, |
| | | | GABRA1, PTEN, GABRA5, PTPRZ1, |
| | | | GABRB3, GABRG1, HIRIP3, |
| | | | SEZ6L2, HOXA1, SHANK3, IL6, |
| | | | SHBZRAP1, LAMB1, SLC6A4, |
| | | | SERT, MAPK3, TAS2R1, MAZ, |
| | | | TSC1, MDGA2, TSC2, MECP2, |
| | | | UBE3A, WNT2, see also |
| | | | 20110023145 |
| autosomal dominant polycystic | kidney | liver | PKD1, PKD2 |
| kidney disease (ADPKD) - | | | |
| (includes diseases such as von | | | |
| Hippel-Lindau disease and | | | |
| tubreous sclerosis complex | | | |
| disease) | | | |
| Autosomal Recessive Polycystic | kidney | liver | PKDH1 |
| Kidney Disease (ARPKD) | | | |
| Ataxia-Telangiectasia (a.k.a | Nervous system, | various | ATM |
| Louis Bar syndrome) | immune system | | |
| B-Cell Non-Hodgkin Lymphoma | | | BCL7A, BCL7 |
| Bardet-Biedl syndrome | Eye, | Liver, ear, | ARL6, BBS1, BBS2, BBS4, BBS5, |
| | musculoskeletal | gastrointestinal | BBS7, BBS9, BBS10, BBS12, |
| | system, kidney, | system, brain | CEP290, INPP5E, LZTFL1, MKKS, |
| | reproductive | | MKS1, SDCCAG8, TRIM32, TTC8 |
| | organs | | |
| Bare Lymphocyte Syndrome | blood | | TAPBP, TPSN, TAP2, ABCB3, PSF2, |
| | | | RING11, MHC2TA, C2TA, RFX5, |
| | | | RFXAP, RFX5 |
| Bartter's Syndrome (types I, II, | kidney | | SLC12A1 (type I), KCNJ1 (type II), |
| III, IVA and B, and V) | | | CLCNKB (type III), BSND (type IV |
| | | | A), or both the CLCNKA CLCNKB |
| | | | genes (type IV B), CASR (type V). |
| Becker muscular dystrophy | Muscle | | DMD, BMD, MYF6 |
| Best Disease (Vitelliform | eye | | VMD2 |
| Macular Dystrophy type 2) | | | |
| Bleeding Disorders | blood | | TBXA2R, P2RX1, P2X1 |
| Blue Cone Monochromacy | eye | | OPN1LW, OPN1MW, and LCR |
| Breast Cancer | Breast tissue | | BRCA1, BRCA2, COX-2 |
| Bruton's Disease (aka X-linked | Immune system, | | BTK |
| Agammglobulinemia) | specifically B | | |
| | cells | | |
| Cancers (e.g., lymphoma, chronic | Various | | FAS, BID, CTLA4, PDCD1, CBLB, |
| lymphocytic leukemia (CLL), B | | | PTPN6, TRAC, TRBC, those |
| cell acute lymphocytic leukemia | | | described in WO2015048577 |
| (B-ALL), acute lymphoblastic | | | IL1B, XDH, TP53, PTGS, MB, IL4, |
| leukemia, acute myeloid | | | ANGPT1, ABCGu8, CTSK, PTGIR, |
| leukemia, non-Hodgkin's | | | KCNJ11, INS, CRP, PDGFRB, |
| lymphoma (NHL), diffuse large | | | CCNA2, PDGFB, KCNJ5, KCNN3, |
| cell lymphoma (DLCL), multiple | | | CAPN10, ADRA2B, ABCG5, |
| myeloma, renal cell carcinoma | | | PRDX2, CPAN5, PARP14, MEX3C, |
| (RCC), neuroblastoma, colorectal | | | ACE, RNF, IL6, TNF, STN, |
| cancer, breast cancer, ovarian | | | SERPINE1, ALB, ADIPOQ, APOB, |
| cancer, melanoma, sarcoma, | | | APOE, LEP, MTHFR, APOA1, |
| prostate cancer, lung cancer, | | | EDN1, NPPB, NOS3, PPARG, PLAT, |
| esophageal cancer, hepatocellular | | | PTGS2, CETP, AGTR1, HMGCR, |
| carcinoma, pancreatic cancer, | | | IGF1, SELE, REN, PPARA, PON1, |
| astrocytoma, mesothelioma, head | | | KNG1, CCL2, LPL, VWF, F2, |
| and neck cancer, and | | | ICAM1, TGFB, NPPA, IL10, EPO, |
| medulloblastoma | | | SOD1, VCAM1, IFNG, LPA, MPO, |
| Cardiovascular Diseases | heart | Vascular system | ESR1, MAPK, HP, F3, CST3, COG2, |
| | | | MMP9, SERPINC1, F8, HMOX1, |
| | | | APOC3, IL8, PROL1, CBS, NOS2, |
| | | | TLR4, SELP, ABCA1, AGT, LDLR, |
| | | | GPT, VEGFA, NR3C2, IL18, NOS1, |
| | | | NR3C1, FGB, HGF, IL1A, AKT1, |
| | | | LIPC, HSPD1, MAPK14, SPP1, |
| | | | ITGB3, CAT, UTS2, THBD, F10, CP, |
| | | | TNFRSF11B, EGFR, MMP2, PLG, |
| | | | NPY, RHOD, MAPK8, MYC, FN1, |
| | | | CMA1, PLAU, GNB3, ADRB2, |
| | | | SOD2, F5, VDR, ALOX5, HLA- |
| | | | DRB1, PARP1, CD40LG, PON2, |
| | | | AGER, IRS1, PTGS1, ECE1, F7, |
| | | | IRMN, EPHX2, IGFBP1, MAPK10, |
| | | | FAS, ABCB1, JUN, IGFBP3, CD14, |
| | | | PDE5A, AGTR2, CD40, LCAT, |
| | | | CCR5, MMP1, TIMP1, ADM, |
| | | | DYT10, STAT3, MMP3, ELN, USF1, |
| | | | CFH, HSPA4, MMP12, MME, F2R, |
| | | | SELL, CTSB, ANXA5, ADRB1, |
| | | | CYBA, FGA, GGT1, LIPG, HIF1A, |
| | | | CXCR4, PROC, SCARB1, CD79A, |
| | | | PLTP, ADD1, FGG, SAA1, KCNH2, |
| | | | DPP4, NPR1, VTN, KIAA0101, FOS, |
| | | | TLR2, PPIG, IL1R1, AR, CYP1A1, |
| | | | SERPINA1, MTR, RBP4, APOA4, |
| | | | CDKN2A, FGF2, EDNRB, ITGA2, |
| | | | VLA-2, CABIN1, SHBG, HMGB1, |
| | | | HSP90B2P, CYP3A4, GJA1, CAV1, |
| | | | ESR2, LTA, GDF15, BDNF, |
| | | | CYP2D6, NGF, SP1, TGIF1, SRC, |
| | | | EGF, PIK3CG, HLA-A, KCNQ1, |
| | | | CNR1, FBN1, CHKA, BEST1, |
| | | | CTNNB1, IL2, CD36, PRKAB1, TPO, |
| | | | ALDH7A1, CX3CR1, TH, F9, CH1, |
| | | | TF, HFE, IL17A, PTEN, GSTM1, |
| | | | DMD, GATA4, F13A1, TTR, FABP4, |
| | | | PON3, APOC1, INSR, TNFRSF1B, |
| | | | HTR2A, CSF3, CYP2C9, TXN, |
| | | | CYP11B2, PTH, CSF2, KDR, |
| | | | PLA2G2A, THBS1, GCG, RHOA, |
| | | | ALDH2, TCF7L2, NFE2L2, |
| | | | NOTCH1, UGT1A1, IFNA1, PPARD, |
| | | | SIRT1, GNHR1, PAPPA, ARR3, |
| | | | NPPC, AHSP, PTK2, IL13, MTOR, |
| | | | ITGB2, GSTT1, IL6ST, CPB2, |
| | | | CYP1A2, HNF4A, SLC64A, |
| | | | PLA2G6, TNFSF11, SLC8A1, F2RL1, |
| | | | AKR1A1, ALDH9A1, BGLAP, |
| | | | MTTP, MTRR, SULT1A3, RAGE, |
| | | | C4B, P2RY12, RNLS, CREB1, |
| | | | POMC, RAC1, LMNA, CD59, |
| | | | SCM5A, CYP1B1, MIF, MMP13, |
| | | | TIMP2, CYP19A1, CUP21A2, |
| | | | PTPN22, MYH14, MBL2, SELPLG, |
| | | | AOC3, CTSL1, PCNA, IGF2, ITGB1, |
| | | | CAST, CXCL12, IGHE, KCNE1, |
| | | | TFRC, COL1A1, COL1A2, IL2RB, |
| | | | PLA2G10, ANGPT2, PROCR, NOX4, |
| | | | HAMP, PTPN11, SLCA1, IL2RA, |
| | | | CCL5, IRF1, CF:AR, CA:CA, EIF4E, |
| | | | GSTP1, JAK2, CYP3A5, HSPG2, |
| | | | CCL3, MYD88, VIP, SOAT1, |
| | | | ADRBK1, NR4A2, MMP8, NPR2, |
| | | | GCH1, EPRS, PPARGC1A, F12, |
| | | | PECAM1, CCL4, CERPINA34, |
| | | | CASR, FABP2, TTF2, PROS1, CTF1, |
| | | | SGCB, YME1L1, CAMP, ZC3H12A, |
| | | | AKR1B1, MMP7, AHR, CSF1, |
| | | | HDAC9, CTGF, KCNMA1, UGT1A, |
| | | | PRKCA, COMT, S100B, EGR1, PRL, |
| | | | IL15, DRD4, CAMK2G, SLC22A2, |
| | | | CCL11, PGF, THPO, GP6, TACR1, |
| | | | NTS, HNF1A, SST, KCDN1, |
| | | | LOC646627, TBXAS1, CUP2J2, |
| | | | TBXA2R, ADH1C, ALOX12, AHSG, |
| | | | BHMT, GJA4, SLC25A4, ACLY, |
| | | | ALOX5AP, NUMA1, CYP27B1, |
| | | | CYSLTR2, SOD3, LTC4S, UCN, |
| | | | GHRL, APOC2, CLEC4A, |
| | | | KBTBD10, TNC, TYMS, SHC1, |
| | | | LRP1, SOCS3, ADH1B, KLK3, |
| | | | HSD11B1, VKORC1, SERPINB2, |
| | | | TNS1, RNF19A, EPOR, ITGAM, |
| | | | PITX2, MAPK7, FCGR3A, LEEPR, |
| | | | ENG, GPX1, GOT2, HRH1, NR112, |
| | | | CRH, HTR1A, VDAC1, HPSE, |
| | | | SFTPD, TAP2, RMF123, PTK2Bm |
| | | | NTRK2, IL6R, ACHE, GLP1R, GHR, |
| | | | GSR, NQO1, NR5A1, GJB2, |
| | | | SLC9A1, MAOA, PCSK9, FCGR2A, |
| | | | SERPINF1, EDN3, UCP2, TFAP2A, |
| | | | C4BPA, SERPINF2, TYMP, ALPP, |
| | | | CXCR2, SLC3A3, ABCG2, ADA, |
| | | | JAK3, HSPA1A, FASN, FGF1, F11, |
| | | | ATP7A, CR1, GFPA, ROCK1, |
| | | | MECP2, MYLK, BCHE, LIPE, |
| | | | ADORA1, WRN, CXCR3, CD81, |
| | | | SMAD7, LAMC2, MAP3K5, CHGA, |
| | | | IAPP, RHO, ENPP1, PTHLH, NRG1, |
| | | | VEGFC, ENPEP, CEBPB, NAGLU,. |
| | | | F2RL3, CX3CL1, BDKRB1, |
| | | | ADAMTS13, ELANE, ENPP2, CISH, |
| | | | GAST, MYOC, ATP1A2, NF1, GJB1, |
| | | | MEF2A, VCL, BMPR2, TUBB, |
| | | | CDC42, KRT18, HSF1, MYB, |
| | | | PRKAA2, ROCK2, TFP1, PRKG1, |
| | | | BMP2, CTNND1, CTH, CTSS, |
| | | | VAV2, NPY2R, IGFBP2, CD28, |
| | | | GSTA1, PPIA, APOH, S100A8, IL11, |
| | | | ALOX15, FBLN1, NR1H3, SCD, GIP, |
| | | | CHGB, PRKCB, SRD5A1, HSD11B2, |
| | | | CALCRL, GALNT2, ANGPTL4, |
| | | | KCNN4, PIK3C2A, HBEGF, |
| | | | CYP7A1, HLA-DRB5, BNIP3, |
| | | | GCKR, S100A12, PADI4, HSPA14, |
| | | | CXCR1, H19, KRTAP19-3, IDDM2, |
| | | | RAC2, YRY1, CLOCK, NGFR, DBH, |
| | | | CRNA COMPONENT4, CACNA1C, |
| | | | PRKAG2, CHAT, PTGDS, NR1H2, |
| | | | TEK, VEGFB, MEF2C, MAPKAPK2, |
| | | | TNFRSF11A, HSPA9, CYSLTR1, |
| | | | MAT1A, OPRL1, IMPA1, CLCN2, |
| | | | DLD, PSMA6, PSMB8, CHI3L1, |
| | | | ALDH1B1, PARP2, STAR, LBP, |
| | | | ABCC6, RGS2, EFNB2, GJB6, |
| | | | APOA2, AMPD1, DYSF, |
| | | | FDFT1, EMD2, CCR6, GJB3, IL1RL1, |
| | | | ENTPD1, BBS4, CELSR2, F11R, |
| | | | RAPGEF3, HYAL1, ZNF259, |
| | | | ATOX1, ATF6, KHK, SAT1, GGH, |
| | | | TIMP4, SLC4A4, PDE2A, PDE3B, |
| | | | FADS1, FADS2, TMSB4X, TXNIP, |
| | | | LIMS1, RHOB, LY96, FOXO1, |
| | | | PNPLA2, TRH, GJC1, S:C17A5, FTO, |
| | | | GJD2, PRSC1, CASP12, GPBAR1, |
| | | | PXK, IL33, TRIB1, PBX4, NUPR1, |
| | | | 15-SEP, CILP2, TERC, GGT2, |
| | | | MTCO1, UOX, AVP |
| Cataract | eye | | CRYAA, CRYA1, CRYBB2, CRYB2, |
| | | | PITX3, BFSP2, CP49, CP47, CRYAA, |
| | | | CRYA1, PAX6, AN2, MGDA, |
| | | | CRYBA1, CRYB1, CRYGC, CRYG3, |
| | | | CCL, LIM2, MP19, CRYGD, CRYG4, |
| | | | BFSP2, CP49, CP47, HSF4, CTM, |
| | | | HSF4, CTM, MIP, AQP0, CRYAB, |
| | | | CRYA2, CTPP2, CRYBB1, CRYGD, |
| | | | CRYG4, CRYBB2, CRYB2, CRYGC, |
| | | | CRYG3, CCL, CRYAA, CRYA1, |
| | | | GJA8, CX50, CAE1, GJA3, CX46, |
| | | | CZP3, CAE3, CCM1, CAM, KRIT1 |
| CDKL-5 Deficiencies or | Brain, CNS | | CDKL5 |
| Mediated Diseases | | | |
| Charcot-Marie-Tooth (CMT) | Nervous system | Muscles | PMP22 (CMT1A and E), MPZ |
| disease (Types 1, 2, 3, 4,) | | (dystrophy) | (CMT1B), LITAF (CMT1C), EGR2 |
| | | | (CMT1D), NEFL (CMT1F), GJB1 |
| | | | (CMT1X), MFN2 (CMT2A), KIF1B |
| | | | (CMT2A2B), RAB7A (CMT2B), |
| | | | TRPV4 (CMT2C), GARS (CMT2D), |
| | | | NEFL (CMT2E), GAPD1 (CMT2K), |
| | | | HSPB8 (CMT2L), DYNC1H1, |
| | | | CMT2O), LRSAM1 (CMT2P), |
| | | | IGHMBP2 (CMT2S), MORC2 |
| | | | (CMT2Z), GDAP1 (CMT4A), |
| | | | MTMR2 or SBF2/MTMR13 |
| | | | (CMT4B), SH3TC2 (CMT4C), |
| | | | NDRG1 (CMT4D), PRX (CMT4F), |
| | | | FIG. 4 (CMT4J), NT-3 |
| Chédiak-Higashi Syndrome | Immune system | Skin, hair, eyes, | LYST |
| | | neurons | |
| Choroidermia | | | CHM, REP1, |
| Chorioretinal atrophy | eye | | PRDM13, RGR, TEAD1 |
| Chronic Granulomatous Disease | Immune system | | CYBA, CYBB, NCF1, NCF2, NCF4 |
| Chronic Mucocutaneous | Immune system | | AIRE, CARD9, CLEC7A IL12B, |
| Candidiasis | | | IL12B1, IL1F, IL17RA, IL17RC, |
| | | | RORC, STAT1, STAT3, TRAF31P2 |
| Cirrhosis | liver | | KRT18, KRT8, CIRH1A, NAIC, |
| | | | TEX292, KIAA1988 |
| Colon cancer (Familial | Gastrointestinal | | FAP: APC HNPCC: MSH2, |
| adenomatous polyposis (FAP) | | | MLH1, PMS2, SH6, PMS1 |
| and hereditary nonpolyposis | | | |
| colon cancer (HNPCC)) | | | |
| Combined Immunodeficiency | Immune System | | IL2RG, SCIDX1, SCIDX, IMD4); |
| | | | HIV-1 (CCL5, SCYA5, D17S136E, |
| | | | TCP228 |
| Cone(-rod) dystrophy | eye | | AIPL1, CRX, GUA1A, GUCY2D, |
| | | | PITPM3, PROM1, PRPH2, RIMS1, |
| | | | SEMA4A, ABCA4, ADAM9, ATF6, |
| | | | C21ORF2, C8ORF37, CACNA2D4, |
| | | | CDHR1, CERKL, CNGA3, CNGB3, |
| | | | CNNM4, CNAT2, IFT81, KCNV2, |
| | | | PDE6C, PDE6H, POC1B, RAX2, |
| | | | RDH5, RPGRIP1, TTLL5, RetCG1, |
| | | | GUCY2E |
| Congenital Stationary Night | eye | | CABP4, CACNA1F, CACNA2D4, |
| Blindness | | | GNAT1, CPR179, GRK1, GRM6, |
| | | | LRIT3, NYX, PDE6B, RDH5, RHO, |
| | | | RLBP1, RPE65, SAG, SLC24A1, |
| | | | TRPM1, |
| Congenital Fructose Intolerance | Metabolism | | ALDOB |
| Cori's Disease (Glycogen Storage | Various- | | AGL |
| Disease Type III) | wherever | | |
| | glycogen | | |
| | accumulates, | | |
| | particularly | | |
| | liver, heart, | | |
| | skeletal muscle | | |
| Corneal clouding and dystrophy | eye | | APOA1, TGFBI, CSD2, CDGG1, |
| | | | CSD, BIGH3, CDG2, TACSTD2, |
| | | | TROP2, M1S1, VSX1, RINX, PPCD, |
| | | | PPD, KTCN, COL8A2, FECD, |
| | | | PPCD2, PIP5K3, CFD |
| Cornea plana congenital | | | KERA, CNA2 |
| Cri du chat Syndrome, also | | | Deletions involving only band 5p15.2 |
| known as 5p syndrome and cat | | | to the entire short arm of chromosome |
| cry syndrome | | | 5, e.g. CTNND2, TERT, |
| Cystic Fibrosis (CF) | Lungs and | Pancreas, liver, | CTFR, ABCC7, CF, MRP7, SCNN1A, |
| | respiratory | digestive | those described in WO2015157070 |
| | system | system, | |
| | | reproductive | |
| | | system, | |
| | | exocrine, glands, | |
| Diabetic nephropathy | kidney | | Gremlin, 12/15- lipoxygenase, TIM44, |
| Dent Disease (Types 1 and 2) | Kidney | | Type 1: CLCN5, Type 2: ORCL |
| Dentatorubro-Pallidoluysian | CNS, brain, | | Atrophin-1 and Atn1 |
| Atrophy (DRPLA) (aka Haw | muscle | | |
| River and Naito-Oyanagi | | | |
| Disease) | | | |
| Down Syndrome | various | | Chromosome 21 trisomy |
| Drug Addiction | Brain | | Prkce; Drd2; Drd4; ABAT; |
| | | | GRIA2;Grm5; Grin1; Htr1b; Grin2a; |
| | | | Drd3; Pdyn; Gria1 |
| Duane syndrome (Types 1, 2, and | eye | | CHN1, indels on chromosomes 4 and 8 |
| 3, including subgroups A, B and | | | |
| C). Other names for this | | | |
| condition include: Duane's | | | |
| Retraction Syndrome (or DR | | | |
| syndrome), Eye Retraction | | | |
| Syndrome, Retraction Syndrome, | | | |
| Congenital retraction syndrome | | | |
| and Stilling-Turk-Duane | | | |
| Syndrome | | | |
| Duchenne muscular dystrophy | muscle | Cardiovascular, | DMD, BMD, dystrophin gene, intron |
| (DMD) | | respiratory | flanking exon 51 of DMD gene, exon |
| | | | 51 mutations in DMD gene, see also |
| | | | WO2013163628 and US Pat. Pub. |
| | | | 20130145487 |
| Edward's Syndrome | | | Complete or partial trisomy of |
| (Trisomy 18) | | | chromosome 18 |
| Ehlers-Danlos Syndrome (Types | Various | | COL5A1, COL5A2, COL1A1, |
| I-VI) | depending on | | COL3A1, TNXB, PLOD1, COL1A2, |
| | type: including | | FKBP14 and ADAMTS2 |
| | musculoskeletal, | | |
| | eye, vasculature, | | |
| | immune, and | | |
| | skin | | |
| Emery-Dreifuss muscular | muscle | | LMNA, LMN1, EMD2, FPLD, |
| dystrophy | | | CMD1A, HGPS, LGMD1B, LMNA, |
| | | | LMN1, EMD2, FPLD, CMD1A |
| Enhanced S-Cone Syndrome | eye | | NR2E3, NRL |
| Fabry's Disease | Various - | | GLA |
| | including skin, | | |
| | eyes, and | | |
| | gastrointestinal | | |
| | system, kidney, | | |
| | heart, brain, | | |
| | nervous system | | |
| Facioscapulohumeral muscular | muscles | | FSHMD1A, FSHD1A, FRG1, |
| dystrophy | | | |
| Factor H and Factor H-like 1 | blood | | HF1, CFH, HUS |
| Factor V Leiden thrombophilia | blood | | Factor V (F5) |
| and Factor V deficiency | | | |
| Factor V and Factor VII | blood | | MCFD2 |
| deficiency | | | |
| Factor VII deficiency | blood | | F7 |
| Factor X deficiency | blood | | F10 |
| Factor XI deficiency | blood | | F11 |
| Factor XII deficiency | blood | | F12, HAF |
| Factor XIIIA deficiency | blood | | F13A1, F13A |
| Factor XIIIB deficiency | blood | | F13B |
| Familial Hypercholestereolemia | Cardiovascular | | APOB, LDLR, PCSK9 |
| | system | | |
| Familial Mediterranean Fever | Various- | Heart, kidney, | MEFV |
| (FMF) also called recurrent | organs/tissues | brain/CNS, | |
| polyserositis or familial | with serous or | reproductive | |
| paroxysmal polyserositis | synovial | organs | |
| | membranes, | | |
| | skin, joints | | |
| Fanconi Anemia | Various - blood | | FANCA, FACA, FA1, FA, FAA, |
| | (anemia), | | FAAP95, FAAP90, FLJ34064, |
| | immune system, | | FANCC, FANCG, RAD51, BRCA1, |
| | cognitive, | | BRCA2, BRIP1, BACH1, FANCJ, |
| | kidneys, eyes, | | FANCB, FANCD1, FANCD2, |
| | musculoskeletal | | FANCD, FAD, FANCE, FACE, |
| | | | FANCF, FANCI, ERCC4, FANCL, |
| | | | FANCM, PALB2, RAD51C, SLX4, |
| | | | UBE2T, FANCB, XRCC9, PHF9, |
| | | | KIAA1596 |
| Fanconi Syndrome Types I | kidneys | | FRTS1, GATM |
| (Childhood onset) and II (Adult | | | |
| Onset) | | | |
| Fragile X syndrome and related | brain | | FMR1, FMR2; FXR1; FXR2; |
| disorders | | | mGLUR5 |
| Fragile XE Mental Retardation | Brain, nervous | | FMR1 |
| (aka Martin Bell syndrome) | system | | |
| Friedreich Ataxia (FRDA) | Brain, nervous | heart | FXN/X25 |
| | system | | |
| Fuchs endothelial corneal | Eye | | TCF4; COL8A2 |
| dystrophy | | | |
| Galactosemia | Carbohydrate | Various-where | GALT, GALK1, and GALE |
| | metabolism | galactose | |
| | disorder | accumulates - | |
| | | liver, brain, eyes | |
| Gastrointestinal Epithelial | | | CISH |
| Cancer, GI cancer | | | |
| Gaucher Disease (Types 1, 2, and | Fat metabolism | Various-liver, | GBA |
| 3, as well as other unusual forms | disorder | spleen, blood, | |
| that may not fit into these types) | | CNS, skeletal | |
| | | system | |
| Griscelli syndrome | | | |
| Glaucoma | eye | | MYOC, TIGR, GLC1A, JOAG, |
| | | | GPOA, OPTN, GLC1E, FIP2, HYPL, |
| | | | NRP, CYP1B1, GLC3A, OPA1, NTG, |
| | | | NPG, CYP1B1, GLC3A, those |
| | | | described in WO2015153780 |
| Glomerulo sclerosis | kidney | | CC chemokine ligand 2 |
| Glycogen Storage Diseases | Metabolism | | SLC2A2, GLUT2, G6PC, G6PT, |
| Types I-VI -See also Cori's | Diseases | | G6PT1, GAA, LAMP2, LAMPB, |
| Disease, Pompe's Disease, | | | AGL, GDE, GBE1, GYS2, PYGL, |
| McArdle's disease, Hers Disease, | | | PFKM, see also Cori's Disease, |
| and Von Gierke's disease | | | Pompe's Disease, McArdle's disease, |
| | | | Hers Disease, and Von Gierke's |
| | | | disease |
| RBC Glycolytic enzyme | blood | | any mutations in a gene for an enzyme |
| deficiency | | | in the glycolysis pathway including |
| | | | mutations in genes for hexokinases I |
| | | | and II, glucokinase, phosphoglucose |
| | | | isomerase, phosphofructokinase, |
| | | | aldolase Bm triosephosphate |
| | | | isomerease, glyceraldehydee-3- |
| | | | phosphate dehydrogenase, |
| | | | phosphoglycerokinase, |
| | | | phosphoglycerate mutase, enolase I, |
| | | | pyruvate kinase |
| Hartnup's disease | Malabsorption | Various- brain, | SLC6A19 |
| | disease | gastrointestinal, | |
| | | skin, | |
| Hearing Loss | ear | | NOX3, Hes5, BDNF, |
| Hemochromatosis (HH) | Iron absorption | Various- | HFE and H63D |
| | regulation | wherever iron | |
| | disease | accumulates, | |
| | | liver, heart, | |
| | | pancreas, joints, | |
| | | pituitary gland | |
| Hemophagocytic | blood | | PRF1, HPLH2, UNC13D, MUNC13- |
| lymphohistiocytosis disorders | | | 4, HPLH3, HLH3, FHL3 |
| Hemorrhagic disorders | blood | | PI, ATT, F5 |
| Hers disease (Glycogen storage | liver | muscle | PYGL |
| disease Type VI) | | | |
| Hereditary angioedema (HAE) | | | kalikrein B1 |
| Hereditary Hemorrhagic | Skin and | | ACVRL1, ENG and SMAD4 |
| Telangiectasia (Osler-Weber- | mucous | | |
| Rendu Syndrome) | membranes | | |
| Hereditary Spherocytosis | blood | | NK1, EPB42, SLC4A1, SPTA1, and |
| | | | SPTB |
| Hereditary Persistence of Fetal | blood | | HBG1, HBG2, BCL11A, promoter |
| Hemoglobin | | | region of HBG 1 and/or 2 (in the |
| | | | CCAAT box) |
| Hemophilia (hemophilia A | blood | | A: FVIII, F8C, HEMA |
| (Classic) a B (aka Christmas | | | B: FVIX, HEMB |
| disease) and C) | | | C: F9, F11 |
| Hepatic adenoma | liver | | TCF1, HNF1A, MODY3 |
| Hepatic failure, early onset, and | liver | | SCOD1, SCO1 |
| neurologic disorder | | | |
| Hepatic lipase deficiency | liver | | LIPC |
| Hepatoblastoma, cancer and | liver | | CTNNB1, PDGFRL, PDGRL, PRLTS, |
| carcinomas | | | AXIN1, AXIN, CTNNB1, TP53, P53, |
| | | | LFS1, IGF2R, MPRI, MET, CASP8, |
| | | | MCH5 |
| Hermansky-Pudlak syndrome | Skin, eyes, | | HPS1, HPS3, HPS4, HPS5, HPS6, |
| | blood, lung, | | HPS7, DTNBP1, BLOC1, BLOC1S2, |
| | kidneys, | | BLOC3 |
| | intestine | | |
| HIV susceptibility or infection | Immune system | | IL10, CSIF, CMKBR2, CCR2, |
| | | | CMKBR5, CCCKR5 (CCR5), those in |
| | | | WO2015148670A1 |
| Holoprosencephaly (HPE) | brain | | ACVRL1, ENG, SMAD4 |
| (Alobar, Semilobar, and Lobar) | | | |
| Homocystinuria | Metabolic | Various- | CBS, MTHFR, MTR, MTRR, and |
| | disease | connective | MMADHC |
| | | tissue, muscles, | |
| | | CNS, | |
| | | cardiovascular | |
| | | system | |
| HPV | | | HPV16 and HPV18 E6/E7 |
| HSV1, HSV2, and related | eye | | HSV1 genes (immediate early and late |
| keratitis | | | HSV-1 genes (UL1, 1.5, 5, 6, 8, 9, 12, |
| | | | 15, 16, 18, 19, 22, 23, 26, 26.5, 27, 28, |
| | | | 29, 30, 31, 32, 33, 34, 35, 36, 37, 38, |
| | | | 42, 48, 49.5, 50, 52, 54, S6, RL2, RS1, |
| | | | those described in WO2015153789, |
| | | | WO2015153791 |
| Hunter's Syndrome (aka | Lysosomal | Various- liver, | IDS |
| Mucopolysaccharidosis type II) | storage disease | spleen, eye, | |
| | | joint, heart, | |
| | | brain, skeletal | |
| Huntington's disease (HD) and | Brain, nervous | | HD, HTT, IT15, PRNP, PRIP, JPH3, |
| HD-like disorders | system | | JP3, HDL2, TBP, SCA17, PRKCE; |
| | | | IGF1; EP300; RCOR1; PRKCZ; |
| | | | HDAC4; and TGM2, and those |
| | | | described in WO2013130824, |
| | | | WO2015089354 |
| Hurler's Syndrome (aka | Lysosomal | Various- liver, | IDUA, α-L-iduronidase |
| mucopolysaccharidosis type I H, | storage disease | spleen, eye, | |
| MPS IH) | | joint, heart, | |
| | | brain, skeletal | |
| Hurler-Scheie syndrome (aka | Lysosomal | Various- liver, | IDUA, α-L-iduronidase |
| mucopolysaccharidosis type I H-S, | storage disease | spleen, eye, | |
| MPS I H-S) | | joint, heart, | |
| | | brain, skeletal | |
| hyaluronidase deficiency (aka | Soft and | | HYAL1 |
| MPS IX) | connective | | |
| | tissues | | |
| Hyper IgM syndrome | Immune system | | CD40L |
| Hyper- tension caused renal | kidney | | Mineral corticoid receptor |
| damage | | | |
| Immunodeficiencies | Immune System | | CD3E, CD3G, AICDA, AID, HIGM2, |
| | | | TNFRSF5, CD40, UNG, DGU, |
| | | | HIGM4, TNFSF5, CD40LG, HIGM1, |
| | | | IGM, FOXP3, IPEX, AIID, XPID, |
| | | | PIDX, TNFRSF14B, TACI |
| Inborn errors of metabolism: | Metabolism | Various organs | See also: Carbohydrate metabolism |
| including urea cycle disorders, | diseases, liver | and cells | disorders (e.g. galactosemia), Amino |
| organic acidemias), fatty acid | | | acid Metabolism disorders (e.g. |
| oxidation defects, amino | | | phenylketonuria), Fatty acid |
| acidopathies, carbohydrate | | | metabolism (e.g. MCAD deficiency), |
| disorders, mitochondrial | | | Urea Cycle disorders (e.g. |
| disorders | | | Citrullinemia), Organic acidemias (e.g. |
| | | | Maple Syrup Urine disease), |
| | | | Mitochondrial disorders (e.g. |
| | | | MELAS), peroxisomal disorders (e.g. |
| | | | Zellweger syndrome) |
| Inflammation | Various | | IL-10; IL-1 (IL-1a; IL-1b); IL-13; IL- |
| | | | 17 (IL-17a (CTLA8); IL- |
| | | | 17b; IL-17c; IL-17d; IL-17f); II-23; |
| | | | Cx3cr1; ptpn22; TNFa; |
| | | | NOD2/CARD15 for IBD; IL-6; IL-12 |
| | | | (IL-12a; IL-12b); |
| | | | CTLA4; Cx3cl1 |
| Inflammatory Bowel Diseases | Gastrointestinal | Joints, skin | NOD2, IRGM, LRRK2, ATG5, |
| (e.g. Ulcerative Colitis and | | | ATG16L1, IRGM, GATM, ECM1, |
| Chron's Disease) | | | CDH1, LAMB1, HNF4A, GNA12, |
| | | | IL10, CARD9/15. CCR6, IL2RA, |
| | | | MST1, TNFSF15, REL, STAT3, |
| | | | IL23R, IL12B, FUT2 |
| Interstitial renal fibrosis | kidney | | TGF-β type II receptor |
| Job's Syndrome (aka Hyper IgE | Immune System | | STAT3, DOCK8 |
| Syndrome) | | | |
| Juvenile Retinoschisis | eye | | RS1, XLRS1 |
| Kabuki Syndrome 1 | | | MLL4, KMT2D |
| Kennedy Disease (aka | Muscles, brain, | | SBMA/SMAX1/AR |
| Spinobulbar Muscular Atrophy) | nervous system | | |
| Klinefelter syndrome | Various- | | Extra X chromosome in males |
| | particularly | | |
| | those involved | | |
| | in development | | |
| | of male | | |
| | characteristics | | |
| Lafora Disease | Brain, CNS | | EMP2A and EMP2B |
| Leber Congenital Amaurosis | eye | | CRB1, RP12, CORD2, CRD, CRX, |
| | | | IMPDH1, OTX2, AIPL1, CABP4, |
| | | | CCT2, CEP290, CLUAP1, CRB1, |
| | | | CRX, DTHD1, GDF6, GUCY2D, |
| | | | IFT140, IQCB1, KCNJ13, LCA5, |
| | | | LRAT, NMNAT1, PRPH2, RD3, |
| | | | RDH12, RPE65, RP20, RPGRIP1, |
| | | | SPATA7, TULP1, LCA1, LCA4, |
| | | | GUC2D, CORD6, LCA3, |
| Lesch-Nyhan Syndrome | Metabolism | Various - joints, | HPRT1 |
| | disease | cognitive, brain, | |
| | | nervous system | |
| Leukocyte deficiencies and | blood | | ITGB2, CD18, LCAMB, LAD, |
| disorders | | | EIF2B1, EIF2BA, EIF2B2, EIF2B3, |
| | | | EIF2B5, LVWM, CACH, CLE, |
| | | | EIF2B4 |
| Leukemia | Blood | | TAL1, TCL5, SCL, TAL2, FLT3, |
| | | | NBS1, NBS, ZNFN1A1, IK1, LYF1, |
| | | | HOXD4, HOX4B, BCR, CML, PHL, |
| | | | ALL, ARNT, KRAS2, RASK2, |
| | | | GMPS, AF10, ARHGEF12, LARG, |
| | | | KIAA0382, CALM, CLTH, CEBPA, |
| | | | CEBP, CHIC2, BTL, FLT3, KIT, |
| | | | PBT, LPP, NPM1, NUP214, D9S46E, |
| | | | CAN, CAIN, RUNX1, CBFA2, |
| | | | AML1, WHSC1L1, NSD3, FLT3, |
| | | | AF1Q, NPM1, NUMA1, ZNF145, |
| | | | PLZF, PML, MYL, STAT5B, AF10, |
| | | | CALM, CLTH, ARL11, ARLTS1, |
| | | | P2RX7, P2X7, BCR, CML, PHL, |
| | | | ALL, GRAF, NF1, VRNF, WSS, |
| | | | NFNS, PTPN11, PTP2C, SHP2, NS1, |
| | | | BCL2, CCND1, PRAD1, BCL1, |
| | | | TCRA, GATA1, GF1, ERYF1, NFE1, |
| | | | ABL1, NQO1, DIA4, NMOR1, |
| | | | NUP214, D9S46E, CAN, CAIN |
| Limb-girdle muscular dystrophy | muscle | | LGMD |
| diseases | | | |
| Lowe syndrome | brain, eyes, | | OCRL |
| | kidneys | | |
| Lupus glomerulo- nephritis | kidney | | MAPK1 |
| Machado- | Brain, CNS, | | ATX3 |
| Joseph's Disease (also known as | muscle | | |
| Spinocerebellar ataxia Type 3) | | | |
| Macular degeneration | eye | | ABC4, CBC1, CHM1, APOE, |
| | | | C1QTNF5, C2, C3, CCL2, CCR2, |
| | | | CD36, CFB, CFH, CFHR1, CFHR3, |
| | | | CNGB3, CP, CRP, CST3, CTSD, |
| | | | CX3CR1, ELOVL4, ERCC6, FBLN5, |
| | | | FBLN6, FSCN2, HMCN1, HTRA1, |
| | | | IL6, IL8, PLEKHA1, PROM1, |
| | | | PRPH2, RPGR, SERPING1, TCOF1, |
| | | | TIMP3, TLR3 |
| Macular Dystrophy | eye | | BEST1, C1QTNF5, CTNNA1, |
| | | | EFEMP1, ELOVL4, FSCN2, |
| | | | GUCA1B, HMCN1, IMPG1, OTX2, |
| | | | PRDM13, PROM1, PRPH2, RP1L1, |
| | | | TIMP3, ABCA4, CFH, DRAM2, |
| | | | IMG1, MFSD8, ADMD, STGD2, |
| | | | STGD3, RDS, RP7, PRPH, AVMD, |
| | | | AOFMD, VMD2 |
| Malattia Leventinesse | eye | | EFEMP1, FBLN3 |
| Maple Syrup Urine Disease | Metabolism | | BCKDHA, BCKDHB, and DBT |
| | disease | | |
| Marfan syndrome | Connective | Musculoskeletal | FBN1 |
| | tissue | | |
| Maroteaux-Lamy Syndrome (aka | Musculoskeletal | Liver, spleen | ARSB |
| MPS VI) | system, nervous | | |
| | system | | |
| McArdle's Disease (Glycogen | Glycogen | muscle | PYGM |
| Storage Disease Type V) | storage disease | | |
| Medullary cystic kidney disease | kidney | | UMOD, HNFJ, FJHN, MCKD2, |
| | | | ADMCKD2 |
| Metachromatic leukodystrophy | Lysosomal | Nervous system | ARSA |
| | storage disease | | |
| Methylmalonic acidemia (MMA) | Metabolism | | MMAA, MMAB, MUT, MMACHC, |
| | disease | | MMADHC, LMBRD1 |
| Morquio Syndrome (aka MPS IV | Connective | heart | GALNS |
| A and B) | tissue, skin, | | |
| | bone, eyes | | |
| Mucopolysaccharidosis diseases | Lysosomal | | See also Hurler/Scheie syndrome, |
| (Types I H/S, I H, II, III A B and | storage disease | | Hurler disease, Sanfillipo syndrome, |
| C, I S, IVA and B, IX, VII, and | - affects various | | Scheie syndrome, Morquio syndrome, |
| VI) | organs/tissues | | hyaluronidase deficiency, Sly |
| | | | syndrome, and Maroteaux-Lamy |
| | | | syndrome |
| Muscular Atrophy | muscle | | VAPB, VAPC, ALS8, SMN1, SMA1, |
| | | | SMA2, SMA3, SMA4, BSCL2, |
| | | | SPG17, GARS, SMAD1, CMT2D, |
| | | | HEXB, IGHMBP2, SMUBP2, |
| | | | CATF1, SMARD1 |
| Muscular dystrophy | muscle | | FKRP, MDC1C, LGMD2I, LAMA2, |
| | | | LAMM, LARGE, KIAA0609, |
| | | | MDC1D, FCMD, TTID, MYOT, |
| | | | CAPN3, CANP3, DYSF, LGMD2B, |
| | | | SGCG, LGMD2C, DMDA1, SCG3, |
| | | | SGCA, ADL, DAG2, LGMD2D, |
| | | | DMDA2, SGCB, LGMD2E, SGCD, |
| | | | SGD, LGMD2F, CMD1L, TCAP, |
| | | | LGMD2G, CMD1N, TRIM32, HT2A, |
| | | | LGMD2H, FKRP, MDC1C, LGMD2I, |
| | | | TTN, CMD1G, TMD, LGMD2J, |
| | | | POMT1, CAV3, LGMD1C, SEPN1, |
| | | | SELN, RSMD1, PLEC1, PLTN, EBS1 |
| Myotonic dystrophy (Type 1 and | Muscles | Eyes, heart, | CNBP (Type 2) and DMPK (Type 1) |
| Type 2) | | endocrine | |
| Neoplasia | | | PTEN; ATM; ATR; EGFR; ERBB2; |
| | | | ERBB3; ERBB4; |
| | | | Notch1; Notch2; Notch3; Notch4; |
| | | | AKT; AKT2; AKT3; HIF; |
| | | | HIF1a; HIF3a; Met; HRG; Bcl2; |
| | | | PPAR alpha; PPAR |
| | | | gamma; WT1 (Wilms Tumor); FGF |
| | | | Receptor Family |
| | | | members (5 members: 1, 2, 3, 4, 5); |
| | | | CDKN2a; APC; RB |
| | | | (retinoblastoma); MEN1; VHL; |
| | | | BRCA1; BRCA2; AR |
| | | | (Androgen Receptor); TSG101; IGF; |
| | | | IGF Receptor; Igf1 (4 |
| | | | variants); Igf2 (3 variants); Igf 1 |
| | | | Receptor, Igf 2 Receptor; |
| | | | Bax; Bc12; caspases family (9 |
| | | | members: |
| | | | 1, 2, 3, 4, 6, 7, 8, 9, 12); Kras; Apc |
| Neurofibromatosis (NF) (NF1, | brain, spinal | | NF1, NF2 |
| formerly Recklinghausen's NF, | cord, nerves, | | |
| and NF2) | and skin | | |
| Niemann-Pick Lipidosis (Types | Lysosomal | Various- where | Types A and B: SMPD1; Type C: |
| A, B, and C) | Storage Disease | sphingomyelin | NPC1 or NPC2 |
| | | accumulates, | |
| | | particularly | |
| | | spleen, liver, | |
| | | blood, CNS | |
| Noonan Syndrome | Various - | | PTPN11, SOS1, RAF1 and KRAS |
| | musculoskeletal, | | |
| | heart, eyes, | | |
| | reproductive | | |
| | organs, blood | | |
| Norrie Disease or X-linked | eye | | NDP |
| Familial Exudative | | | |
| Vitreoretinopathy | | | |
| North Carolina Macular | eye | | MCDR1 |
| Dystrophy | | | |
| Osteogenesis imperfecta (OI) | bones, | | COL1A1, COL1A2, CRTAP, P3H |
| (Types I, II, III, IV, V, VI, VII) | musculoskeletal | | |
| Osteopetrosis | bones | | LRP5, BMND1, LRP7, LR3, OPPG, |
| | | | VBCH2, CLCN7, CLC7, OPTA2, |
| | | | OSTM1, GL, TCIRG1, TIRC7, |
| | | | OC116, OPTB1 |
| Patau's Syndrome | Brain, heart, | | Additional copy of chromosome 13 |
| (Trisomy 13) | skeletal system | | |
| Parkinson's disease (PD) | Brain, nervous | | SNCA (PARK1), UCHL1 (PARK 5), |
| | system | | and LRRK2 (PARK8), (PARK3), |
| | | | PARK2, PARK4, PARK7 (PARK7), |
| | | | PINK1 (PARK6); x-Synuclein, DJ-1, |
| | | | Parkin, NR4A2, NURR1, NOT, |
| | | | TINUR, SNCAIP, TBP, SCA17, |
| | | | NCAP, PRKN, PDJ, DBH, NDUFV2 |
| Pattern Dystrophy of the RPE | eye | | RDS/peripherin |
| Phenylketonuria (PKU) | Metabolism | Various due to | PAH, PKU1, QDPR, DHPR, PTS |
| | disorder | build-up of | |
| | | phenylalanine, | |
| | | phenyl ketones | |
| | | in tissues and | |
| | | CNS | |
| Polycystic kidney and hepatic | Kidney, liver | | FCYT, PKHD1, ARPKD, PKD1, |
| disease | | | PKD2, PKD4, PKDTS, PRKCSH, |
| | | | G19P1, PCLD, SEC63 |
| Pompe's Disease | Glycogen | Various - heart, | GAA |
| | storage disease | liver, spleen | |
| Porphyria (actually refers to a | Various- | | ALAD, ALAS2, CPOX, FECH, |
| group of different diseases all | wherever heme | | HMBS, PPOX, UROD, or UROS |
| having a specific heme | precursors | | |
| production process abnormality) | accumulate | | |
| posterior polymorphous corneal | eyes | | TCF4; COL8A2 |
| dystrophy | | | |
| Primary Hyperoxaluria (e.g. type | Various - eyes, | | LDHA (lactate dehydrogenase A) and |
| 1) | heart, kidneys, | | hydroxyacid oxidase 1 (HAO1) |
| | skeletal system | | |
| Primary Open Angle Glaucoma | eyes | | MYOC |
| (POAG) | | | |
| Primary sclerosing cholangitis | Liver, | | TCF4; COL8A2 |
| | gallbladder | | |
| Progeria (also called Hutchinson- | All | | LMNA |
| Gilford progeria syndrome) | | | |
| Prader-Willi Syndrome | Musculoskeletal | | Deletion of region of short arm of |
| | system, brain, | | chromosome 15, including UBE3A |
| | reproductive | | |
| | and endocrine | | |
| | system | | |
| Prostate Cancer | prostate | | HOXB13, MSMB, GPRC6A, TP53 |
| Pyruvate Dehydrogenase | Brain, nervous | | PDHA1 |
| Deficiency | system | | |
| Kidney/Renal carcinoma | kidney | | RLIP76, VEGF |
| Rett Syndrome | Brain | | MECP2, RTT, PPMX, MRX16, |
| | | | MRX79, CDKL5, STK9, MECP2, |
| | | | RTT, PPMX, MRX16, MRX79, x- |
| | | | Synuclein, DJ-1 |
| Retinitis pigmentosa (RP) | eye | | ADIPOR1, ABCA4, AGBL5, |
| | | | ARHGEF18, ARL2BP, ARL3, ARL6, |
| | | | BEST1, BBS1, BBS2, C2ORF71, |
| | | | C8ORF37, CA4, CERKL, CLRN1, |
| | | | CNGA1, CMGB1, CRB1, CRX, |
| | | | CYP4V2, DHDDS, DHX38, EMC1, |
| | | | EYS, FAM161A, FSCN2, GPR125, |
| | | | GUCA1B, HK1, HPRPF3, HGSNAT, |
| | | | IDH3B, IMPDH1, IMPG2, IFT140, |
| | | | IFT172, KLHL7, KIAA1549, KIZ, |
| | | | LRAT, MAK, MERTK, MVK, NEK2, |
| | | | NUROD1, NR2E3, NRL, OFD1, |
| | | | PDE6A, PDE6B, PDE6G, POMGNT1, |
| | | | PRCD, PROM1, PRPF3, PRPF4, |
| | | | PRPF6, PRPF8, PRPF31, PRPH2, |
| | | | RPB3, RDH12, REEP6, RP39, RGR, |
| | | | RHO, RLBP1, ROM1, RP1, RP1L1, |
| | | | RPY, RP2, RP9, RPE65, RPGR, |
| | | | SAMD11, SAG, SEMA4A, SLC7A14, |
| | | | SNRNP200, SPP2, SPATA7, TRNT1, |
| | | | TOPORS, TTC8, TULP1, USH2A, |
| | | | ZFN408, ZNF513, see also |
| | | | 20120204282 |
| Scheie syndrome (also known as | Various- liver, | | IDUA, α-L-iduronidase |
| mucopolysaccharidosis type I | spleen, eye, | | |
| S(MPS I-S)) | joint, heart, | | |
| | brain, skeletal | | |
| Schizophrenia | Brain | | Neuregulin1 (Nrg1); Erb4 (receptor for |
| | | | Neuregulin); |
| | | | Complexin1 (Cplx1); Tph1 |
| | | | Tryptophan hydroxylase; Tph2 |
| | | | Tryptophan hydroxylase 2; Neurexin |
| | | | 1; GSK3; GSK3a; |
| | | | GSK3b; 5-HTT (Slc6a4); COMT; |
| | | | DRD (Drd1a); SLC6A3; DAOA; |
| | | | DTNBP1; Dao (Dao1); TCF4; |
| | | | COL8A2 |
| Secretase Related Disorders | Various | | APH-1 (alpha and beta); PSEN1; |
| | | | NCSTN; PEN-2; Nos1, Parp1, Nat1, |
| | | | Nat2, CTSB, APP, APH1B, PSEN2, |
| | | | PSENEN, BACE1, ITM2B, CTSD, |
| | | | NOTCH1, TNF, INS, DYT10, |
| | | | ADAM17, APOE, ACE, STN, TP53, |
| | | | IL6, NGFR, IL1B, ACHE, CTNNB1, |
| | | | IGF1, IFNG, NRG1, CASP3, MAPK1, |
| | | | CDH1, APBB1, HMGCR, CREB1, |
| | | | PTGS2, HES1, CAT, TGFB1, ENO2, |
| | | | ERBB4, TRAPPC10, MAOB, NGF, |
| | | | MMP12, JAG1, CD40LG, PPARG, |
| | | | FGF2, LRP1, NOTCH4, MAPK8, |
| | | | PREP, NOTCH3, PRNP, CTSG, EGF, |
| | | | REN, CD44, SELP, GHR, ADCYAP1, |
| | | | INSR, GFAP, MMP3, MAPK10, SP1, |
| | | | MYC, CTSE, PPARA, JUN, TIMP1, |
| | | | IL5, IL1A, MMP9, HTR4, HSPG2, |
| | | | KRAS, CYCS, SMG1, IL1R1, |
| | | | PROK1, MAPK3, NTRK1, IL13, |
| | | | MME, TKT, CXCR2, CHRM1, |
| | | | ATXN1, PAWR, NOTCJ2, M6PR, |
| | | | CYP46A1, CSNK1D, MAPK14, |
| | | | PRG2, PRKCA, L1 CAM, CD40, |
| | | | NR1I2, JAG2, CTNND1, CMA1, |
| | | | SORT1, DLK1, THEM4, JUP, CD46, |
| | | | CCL11, CAV3, RNASE3, HSPA8, |
| | | | CASP9, CYP3A4, CCR3, TFAP2A, |
| | | | SCP2, CDK4, JOF1A, TCF7L2, |
| | | | B3GALTL, MDM2, RELA, CASP7, |
| | | | IDE, FANP4, CASK, ADCYAP1R1, |
| | | | ATF4, PDGFA, C21ORF33, SCG5, |
| | | | RMF123, NKFB1, ERBB2, CAV1, |
| | | | MMP7, TGFA, RXRA, STX1A, |
| | | | PSMC4, P2RY2, TNFRSF21, DLG1, |
| | | | NUMBL, SPN, PLSCR1, UBQLN2, |
| | | | UBQLN1, PCSK7, SPON1, SILV, |
| | | | QPCT, HESS, GCC1 |
| Selective IgA Deficiency | Immune system | | Type 1: MSH5; Type 2: TNFRSF13B |
| Severe Combined | Immune system | | JAK3, JAKL, DCLRE1C, ARTEMIS, |
| Immunodeficiency (SCID) and | | | SCIDA, RAG1, RAG2, ADA, PTPRC, |
| SCID-X1, and ADA-SCID | | | CD45, LCA, IL7R, CD3D, T3D, |
| | | | IL2RG, SCIDX1, SCIDX, IMD4, |
| | | | those identified in US Pat. App. Pub. |
| | | | 20110225664, 20110091441, |
| | | | 20100229252, 20090271881 and |
| | | | 20090222937; |
| Sickle cell disease | blood | | HBB, BCL11A, BCL11Ae, cis- |
| | | | regulatory elements of the B-globin |
| | | | locus, HBG 1/2 promoter, HBG distal |
| | | | CCAAT box region between −92 and |
| | | | −130 of the HBG Transcription Start |
| | | | Site, those described in |
| | | | WO2015148863, WO 2013/126794, |
| | | | US Pat. Pub. 20110182867 |
| Sly Syndrome (aka MPS VII) | | | GUSB |
| Spinocerebellar Ataxias (SCA | | | ATXN1, ATXN2, ATX3 |
| types 1, 2, 3, 6, 7, 8, 12 and 17) | | | |
| Sorsby Fundus Dystrophy | eye | | TIMP3 |
| Stargardt disease | eye | | ABCR, ELOVL4, ABCA4, PROM1 |
| Tay-Sachs Disease | Lysosomal | Various - CNS, | HEX-A |
| | Storage disease | brain, eye | |
| Thalassemia (Alpha, Beta, Delta) | blood | | HBA1, HBA2 (Alpha), HBB (Beta), |
| | | | HBB and HBD (delta), LCRB, |
| | | | BCL11A, BCL11Ae, cis-regulatory |
| | | | elements of the B-globin locus, HBG |
| | | | 1/2 promoter, those described in |
| | | | WO2015148860, US Pat. Pub. |
| | | | 20110182867, 2015/148860 |
| Thymic Aplasia (DiGeorge | Immune system, | | deletion of 30 to 40 genes in the |
| Syndrome;22q11.2 deletion | thymus | | middle of chromosome 22 at |
| syndrome) | | | a location known as 22q11.2, including |
| | | | TBX1, DGCR8 |
| Transthyretin amyloidosis | liver | | TTR (transthyretin) |
| (ATTR) | | | |
| trimethylaminuria | Metabolism | | FMO3 |
| | disease | | |
| Trinucleotide Repeat Disorders | Various | | HTT; SBMA/SMAX1/AR; |
| (generally) | | | FXN/X25 ATX3; |
| | | | ATXN1; ATXN2; |
| | | | DMPK; Atrophin-1 and Atn1 |
| | | | (DRPLA Dx); CBP (Creb-BP - global |
| | | | instability); VLDLR; Atxn7; Atxn10; |
| | | | FEN1, TNRC6A, PABPN1, JPH3, |
| | | | MED15, ATXN1, ATXN3, TBP, |
| | | | CACNA1A, ATXN80S, PPP2R2B, |
| | | | ATXN7, TNRC6B, TNRC6C, CELF3, |
| | | | MAB21L1, MSH2, TMEM185A, |
| | | | SIX5, CNPY3, RAXE, GNB2, RPL14, |
| | | | ATXN8, ISR, TTR, EP400, GIGYF2, |
| | | | OGG1, STC1, CNDP1, C10ORF2, |
| | | | MAML3, DKC1, PAXIP1, CASK, |
| | | | MAPT, SP1, POLG, AFF2, THBS1, |
| | | | TP53, ESR1, CGGBP1, ABT1, KLK3, |
| | | | PRNP, JUN, KCNN3, BAX, FRAXA, |
| | | | KBTBD10, MBNL1, RAD51, |
| | | | NCOA3, ERDA1, TSC1, COMP, |
| | | | GGLC, RRAD, MSH3, DRD2, CD44, |
| | | | CTCF, CCND1, CLSPN, MEF2A, |
| | | | PTPRU, GAPDH, TRIM22, WT1, |
| | | | AHR, GPX1, TPMT, NDP, ARX, |
| | | | TYR, EGR1, UNG, NUMBL, FABP2, |
| | | | EN2, CRYGC, SRP14, CRYGB, |
| | | | PDCD1, HOXA1, ATXN2L, PMS2, |
| | | | GLA, CBL, FTH1, IL12RB2, OTX2, |
| | | | HOXA5, POLG2, DLX2, AHRR, |
| | | | MANF, RMEM158, see also |
| | | | 20110016540 |
| Turner's Syndrome (XO) | Various - | | Monosomy X |
| | reproductive | | |
| | organs, and sex | | |
| | characteristics, | | |
| | vasculature | | |
| Tuberous Sclerosis | CNS, heart, | | TSC1, TSC2 |
| | kidneys | | |
| Usher syndrome (Types I, II, and | Ears, eyes | | ABHD12, CDH23, CIB2, CLRN1, |
| III) | | | DFNB31, GPR98, HARS, MYO7A, |
| | | | PCDH15, USH1C, USH1G, USH2A, |
| | | | USH11A, those described in |
| | | | WO2015134812A1 |
| Velocardiofacial syndrome (aka | Various - | | Many genes are deleted, COM, TBX1, |
| 22q11.2 deletion syndrome, | skeletal, heart, | | and other are associated with |
| DiGeorge syndrome, conotruncal | kidney, immune | | symptoms |
| anomaly face syndrome (CTAF), | system, brain | | |
| autosomal dominant Opitz G/BB | | | |
| syndrome or Cayler cardiofacial | | | |
| syndrome) | | | |
| Von Gierke's Disease (Glycogen | Glycogen | Various - liver, | G6PC and SLC37A4 |
| Storage Disease type I) | Storage disease | kidney | |
| Von Hippel-Lindau Syndrome | Various - cell | CNS, Kidney, | VHL |
| | growth | Eye, visceral | |
| | regulation | organs | |
| | disorder | | |
| Von Willebrand Disease (Types | blood | | VWF |
| I, II and III) | | | |
| Wilson Disease | Various - | Liver, brains, | ATP7B |
| | Copper Storage | eyes, other | |
| | Disease | tissues where | |
| | | copper builds up | |
| Wiskott-Aldrich Syndrome | Immune System | | WAS |
| Xeroderma Pigmentosum | Skin | Nervous system | POLH |
| XXX Syndrome | Endocrine, brain | | X chromosome trisomy |

[0843] In one embodiment, the compositions, systems, or components thereof can be used treat or prevent a disease in a subject by modifying one or more genes associated with one or more cellular functions, such as any one or more of those in Table 4B. In one embodiment, the disease is a genetic disease or disorder. In some of embodiments, the composition, system, or component thereof can modify one or more genes or polynucleotides associated with one or more genetic diseases such as any set forth in Table 4B.

TABLE 4B
Exemplary Genes controlling Cellular Functions

| CELLULAR FUNCTION | GENES |
|---|---|
| PI3K/AKT | PRKCE; ITGAM; ITGA5; IRAK1; PRKAA2; EIF2AK2; PTEN; EIF4E; |
| Signaling | PRKCZ; GRK6; MAPK1; TSC1; PLK1; AKT2; IKBKB; PIK3CA; CDK8; |
| | CDKN1B; NFKB2; BCL2; PIK3CB; PPP2R1A; MAPK8; BCL2L1; MAPK3; |
| | TSC2; |
| | ITGA1; KRAS; EIF4EBP1; RELA; PRKCD; NOS3; |
| | PRKAA1; MAPK9; CDK2; PPP2CA; PIM1; ITGB7; |
| | YWHAZ; ILK; TP53; RAF1; IKBKG; RELB; DYRK1A; |
| | CDKN1A; ITGB1; MAP2K2; JAK1; AKT1; JAK2; PIK3R1; |
| | CHUK; PDPK1; PPP2R5C; CTNNB1; MAP2K1; NFKB1; |
| | PAK3; ITGB3; CCND1; GSK3A; FRAP1; SFN; ITGA2; |
| | TTK; CSNK1A1; BRAF; GSK3B; AKT3; FOXO1; SGK; |
| | HSP90AA1; RPS6KB1 |
| ERK/MAPK | PRKCE; ITGAM; ITGA5; HSPB1; IRAK1; PRKAA2; |
| Signaling | EIF2AK2; RAC1; RAP1A; TLN1; EIF4E; ELK1; GRK6; |
| | MAPK1; RAC2; PLK1; AKT2; PIK3CA; CDK8; CREB1; |
| | PRKCI; PTK2; FOS; RPS6KA4; PIK3CB; PPP2R1A; |
| | PIK3C3; MAPK8; MAPK3; ITGA1; ETS1; KRAS; MYCN; |
| | EIF4EBP1; PPARG; PRKCD; PRKAA1; MAPK9; SRC; |
| | CDK2; PPP2CA; PIM1; PIK3C2A; ITGB7; YWHAZ; |
| | PPP1CC; KSR1; PXN; RAF1; FYN; DYRK1A; ITGB1; |
| | MAP2K2; PAK4; PIK3R1; STAT3; PPP2R5C; MAP2K1; |
| | PAK3; ITGB3; ESR1; ITGA2; MYC; TTK; CSNK1A1; |
| | CRKL; BRAF; ATF4; PRKCA; SRF; STAT1; SGK |
| Glucocorticoid | RAC1; TAF4B; EP300; SMAD2; TRAF6; PCAF; ELK1; |
| Receptor | MAPK1; SMAD3; AKT2; IKBKB; NCOR2; UBE2I; |
| Signaling | PIK3CA; CREB1; FOS; HSPA5; NFKB2; BCL2; |
| | MAP3K14; STAT5B; PIK3CB; PIK3C3; MAPK8; BCL2L1; |
| | MAPK3; TSC22D3; MAPK10; NRIP1; KRAS; MAPK13; |
| | RELA; STAT5A; MAPK9; NOS2A; PBX1; NR3C1; |
| | PIK3C2A; CDKN1C; TRAF2; SERPINE1; NCOA3; |
| | MAPK14; TNF; RAF1; IKBKG; MAP3K7; CREBBP; |
| | CDKN1A; MAP2K2; JAK1; IL8; NCOA2; AKT1; JAK2; |
| | PIK3R1; CHUK; STAT3; MAP2K1; NFKB1; TGFBR1; |
| | ESR1; SMAD4; CEBPB; JUN; AR; AKT3; CCL2; MMP1; |
| | STAT1; IL6; HSP90AA1 |
| Axonal Guidance | PRKCE; ITGAM; ROCK1; ITGA5; CXCR4; ADAM12; |
| Signaling | IGF1; RAC1; RAP1A; EIF4E; PRKCZ; NRP1; NTRK2; |
| | ARHGEF7; SMO; ROCK2; MAPK1; PGF; RAC2; |
| | PTPN11; GNAS; AKT2; PIK3CA; ERBB2; PRKCI; PTK2; |
| | CFL1; GNAQ; PIK3CB; CXCL12; PIK3C3; WNT11; |
| | PRKD1; GNB2L1; ABL1; MAPK3; ITGA1; KRAS; RHOA; |
| | PRKCD; PIK3C2A; ITGB7; GLI2; PXN; VASP; RAF1; |
| | FYN; ITGB1; MAP2K2; PAK4; ADAM17; AKT1; PIK3R1; |
| | GLI1; WNT5A; ADAM10; MAP2K1; PAK3; ITGB3; |
| | CDC42; VEGFA; ITGA2; EPHA8; CRKL; RND1; GSK3B; |
| | AKT3; PRKCA |
| Ephrin Receptor | PRKCE; ITGAM; ROCK1; ITGA5; CXCR4; IRAK1; |
| Signaling Actin | PRKAA2; EIF2AK2; RAC1; RAP1A; GRK6; ROCK2; |
| Cytoskeleton | MAPK1; PGF; RAC2; PTPN11; GNAS; PLK1; AKT2; |
| Signaling | DOK1; CDK8; CREB1; PTK2; CFL1; GNAQ; MAP3K14; |
| | CXCL12; MAPK8; GNB2L1; ABL1; MAPK3; ITGA1; |
| | KRAS; RHOA; PRKCD; PRKAA1; MAPK9; SRC; CDK2; |
| | PIM1; ITGB7; PXN; RAF1; FYN; DYRK1A; ITGB1; |
| | MAP2K2; PAK4; AKT1; JAK2; STAT3; ADAM10; |
| | MAP2K1; PAK3; ITGB3; CDC42; VEGFA; ITGA2; |
| | EPHA8; TTK; CSNK1A1; CRKL; BRAF; PTPN13; ATF4; |
| | AKT3; SGK |
| | ACTN4; PRKCE; ITGAM; ROCK1; ITGA5; IRAK1; |
| | PRKAA2; EIF2AK2; RAC1; INS; ARHGEF7; GRK6; |
| | ROCK2; MAPK1; RAC2; PLK1; AKT2; PIK3CA; CDK8; |
| | PTK2; CFL1; PIK3CB; MYH9; DIAPH1; PIK3C3; MAPK8; |
| | F2R; MAPK3; SLC9A1; ITGA1; KRAS; RHOA; PRKCD; |
| | PRKAA1; MAPK9; CDK2; PIM1; PIK3C2A; ITGB7; |
| | PPP1CC; PXN; VIL2; RAF1; GSN; DYRK1A; ITGB1; |
| | MAP2K2; PAK4; PIP5K1A; PIK3R1; MAP2K1; PAK3; |
| | ITGB3; CDC42; APC; ITGA2; TTK; CSNK1A1; CRKL; |
| | BRAF; VAV3; SGK |
| Huntington's | PRKCE; IGF1; EP300; RCOR1; PRKCZ; HDAC4; TGM2; |
| Disease | MAPK1; CAPNS1; AKT2; EGFR; NCOR2; SP1; CAPN2; |
| Signaling | PIK3CA; HDAC5; CREB1; PRKCI; HSPA5; REST; |
| | GNAQ; PIK3CB; PIK3C3; MAPK8; IGF1R; PRKD1; |
| | GNB2L1; BCL2L1; CAPN1; MAPK3; CASP8; HDAC2; |
| | HDAC7A; PRKCD; HDAC11; MAPK9; HDAC9; PIK3C2A; |
| | HDAC3; TP53; CASP9; CREBBP; AKT1; PIK3R1; |
| | PDPK1; CASP1; APAF1; FRAP1; CASP2; JUN; BAX; |
| | ATF4; AKT3; PRKCA; CLTC; SGK; HDAC6; CASP3 |
| Apoptosis | PRKCE; ROCK1; BID; IRAK1; PRKAA2; EIF2AK2; BAK1; |
| Signaling | BIRC4; GRK6; MAPK1; CAPNS1; PLK1; AKT2; IKBKB; |
| | CAPN2; CDK8; FAS; NFKB2; BCL2; MAP3K14; MAPK8; |
| | BCL2L1; CAPN1; MAPK3; CASP8; KRAS; RELA; |
| | PRKCD; PRKAA1; MAPK9; CDK2; PIM1; TP53; TNF; |
| | RAF1; IKBKG; RELB; CASP9; DYRK1A; MAP2K2; |
| | CHUK; APAF1; MAP2K1; NFKB1; PAK3; LMNA; CASP2; |
| | BIRC2; TTK; CSNK1A1; BRAF; BAX; PRKCA; SGK; |
| | CASP3; BIRC3; PARP1 |
| B Cell Receptor | RAC1; PTEN; LYN; ELK1; MAPK1; RAC2; PTPN11; |
| Signaling | AKT2; IKBKB; PIK3CA; CREB1; SYK; NFKB2; CAMK2A; |
| | MAP3K14; PIK3CB; PIK3C3; MAPK8; BCL2L1; ABL1; |
| | MAPK3; ETS1; KRAS; MAPK13; RELA; PTPN6; MAPK9; |
| | EGR1; PIK3C2A; BTK; MAPK14; RAF1; IKBKG; RELB; |
| | MAP3K7; MAP2K2; AKT1; PIK3R1; CHUK; MAP2K1; |
| | NFKB1; CDC42; GSK3A; FRAP1; BCL6; BCL10; JUN; |
| | GSK3B; ATF4; AKT3; VAV3; RPS6KB1 |
| Leukocyte | ACTN4; CD44; PRKCE; ITGAM; ROCK1; CXCR4; CYBA; |
| Extravasation | RAC1; RAP1A; PRKCZ; ROCK2; RAC2; PTPN11; |
| Signaling | MMP14; PIK3CA; PRKCI; PTK2; PIK3CB; CXCL12; |
| | PIK3C3; MAPK8; PRKD1; ABL1; MAPK10; CYBB; |
| | MAPK13; RHOA; PRKCD; MAPK9; SRC; PIK3C2A; BTK; |
| | MAPK14; NOX1; PXN; VIL2; VASP; ITGB1; MAP2K2; |
| | CTNND1; PIK3R1; CTNNB1; CLDN1; CDC42; F11R; ITK; |
| | CRKL; VAV3; CTTN; PRKCA; MMP1; MMP9 |
| Integrin | ACTN4; ITGAM; ROCK1; ITGA5; RAC1; PTEN; RAP1A; |
| Signaling | TLN1; ARHGEF7; MAPK1; RAC2; CAPNS1; AKT2; |
| | CAPN2; PIK3CA; PTK2; PIK3CB; PIK3C3; MAPK8; |
| | CAV1; CAPN1; ABL1; MAPK3; ITGA1; KRAS; RHOA; |
| | SRC; PIK3C2A; ITGB7; PPP1CC; ILK; PXN; VASP; |
| | RAF1; FYN; ITGB1; MAP2K2; PAK4; AKT1; PIK3R1; |
| | TNK2; MAP2K1; PAK3; ITGB3; CDC42; RND3; ITGA2; |
| | CRKL; BRAF; GSK3B; AKT3 |
| Acute Phase | IRAK1; SOD2; MYD88; TRAF6; ELK1; MAPK1; PTPN11; |
| Response | AKT2; IKBKB; PIK3CA; FOS; NFKB2; MAP3K14; |
| Signaling | PIK3CB; MAPK8; RIPK1; MAPK3; IL6ST; KRAS; |
| | MAPK13; IL6R; RELA; SOCS1; MAPK9; FTL; NR3C1; |
| | TRAF2; SERPINE1; MAPK14; TNF; RAF1; PDK1; |
| | IKBKG; RELB; MAP3K7; MAP2K2; AKT1; JAK2; PIK3R1; |
| | CHUK; STAT3; MAP2K1; NFKB1; FRAP1; CEBPB; JUN; |
| | AKT3; IL1R1; IL6 |
| PTEN Signaling | ITGAM; ITGA5; RAC1; PTEN; PRKCZ; BCL2L11; |
| | MAPK1; RAC2; AKT2; EGFR; IKBKB; CBL; PIK3CA; |
| | CDKN1B; PTK2; NFKB2; BCL2; PIK3CB; BCL2L1; |
| | MAPK3; ITGA1; KRAS; ITGB7; ILK; PDGFRB; INSR; |
| | RAF1; IKBKG; CASP9; CDKN1A; ITGB1; MAP2K2; |
| | AKT1; PIK3R1; CHUK; PDGFRA; PDPK1; MAP2K1; |
| | NFKB1; ITGB3; CDC42; CCND1; GSK3A; ITGA2; |
| | GSK3B; AKT3; FOXO1; CASP3; RPS6KB1 |
| p53 Signaling | PTEN; EP300; BBC3; PCAF; FASN; BRCA1; GADD45A; |
| Aryl Hydrocarbon | BIRC5; AKT2; PIK3CA; CHEK1; TP53INP1; BCL2; |
| Receptor | PIK3CB; PIK3C3; MAPK8; THBS1; ATR; BCL2L1; E2F1; |
| Signaling | PMAIP1; CHEK2; TNFRSF10B; TP73; RB1; HDAC9; |
| | CDK2; PIK3C2A; MAPK14; TP53; LRDD; CDKN1A; |
| | HIPK2; AKT1; PIK3R1; RRM2B; APAF1; CTNNB1; |
| | SIRT1; CCND1; PRKDC; ATM; SFN; CDKN2A; JUN; |
| | SNAI2; GSK3B; BAX; AKT3 |
| | HSPB1; EP300; FASN; TGM2; RXRA; MAPK1; NQO1; |
| | NCOR2; SP1; ARNT; CDKN1B; FOS; CHEK1; |
| | SMARCA4; NFKB2; MAPK8; ALDH1A1; ATR; E2F1; |
| | MAPK3; NRIP1; CHEK2; RELA; TP73; GSTP1; RB1; |
| | SRC; CDK2; AHR; NFE2L2; NCOA3; TP53; TNF; |
| | CDKN1A; NCOA2; APAF1; NFKB1; CCND1; ATM; ESR1; |
| | CDKN2A; MYC; JUN; ESR2; BAX; IL6; CYP1B1; |
| | HSP90AA1 |
| Xenobiotic | PRKCE; EP300; PRKCZ; RXRA; MAPK1; NQO1; |
| Metabolism | NCOR2; PIK3CA; ARNT; PRKCI; NFKB2; CAMK2A; |
| Signaling | PIK3CB; PPP2R1A; PIK3C3; MAPK8; PRKD1; |
| | ALDH1A1; MAPK3; NRIP1; KRAS; MAPK13; PRKCD; |
| | GSTP1; MAPK9; NOS2A; ABCB1; AHR; PPP2CA; FTL; |
| | NFE2L2; PIK3C2A; PPARGC1A; MAPK14; TNF; RAF1; |
| | CREBBP; MAP2K2; PIK3R1; PPP2R5C; MAP2K1; |
| | NFKB1; KEAP1; PRKCA; EIF2AK3; IL6; CYP1B1; |
| | HSP90AA1 |
| SAPK/JNK | PRKCE; IRAK1; PRKAA2; EIF2AK2; RAC1; ELK1; |
| Signaling | GRK6; MAPK1; GADD45A; RAC2; PLK1; AKT2; PIK3CA; |
| | FADD; CDK8; PIK3CB; PIK3C3; MAPK8; RIPK1; |
| | GNB2L1; IRS1; MAPK3; MAPK10; DAXX; KRAS; |
| | PRKCD; PRKAA1; MAPK9; CDK2; PIM1; PIK3C2A; |
| | TRAF2; TP53; LCK; MAP3K7; DYRK1A; MAP2K2; |
| | PIK3R1; MAP2K1; PAK3; CDC42; JUN; TTK; CSNK1A1; |
| | CRKL; BRAF; SGK |
| PPAr/RXR | PRKAA2; EP300; INS; SMAD2; TRAF6; PPARA; FASN; |
| Signaling | RXRA; MAPK1; SMAD3; GNAS; IKBKB; NCOR2; |
| | ABCA1; GNAQ; NFKB2; MAP3K14; STAT5B; MAPK8; |
| | IRS1; MAPK3; KRAS; RELA; PRKAA1; PPARGC1A; |
| | NCOA3; MAPK14; INSR; RAF1; IKBKG; RELB; MAP3K7; |
| | CREBBP; MAP2K2; JAK2; CHUK; MAP2K1; NFKB1; |
| | TGFBR1; SMAD4; JUN; IL1R1; PRKCA; IL6; HSP90AA1; |
| | ADIPOQ |
| NF-KB Signaling | IRAK1; EIF2AK2; EP300; INS; MYD88; PRKCZ; TRAF6; |
| | TBK1; AKT2; EGFR; IKBKB; PIK3CA; BTRC; NFKB2; |
| | MAP3K14; PIK3CB; PIK3C3; MAPK8; RIPK1; HDAC2; |
| | KRAS; RELA; PIK3C2A; TRAF2; TLR4; PDGFRB; TNF; |
| | INSR; LCK; IKBKG; RELB; MAP3K7; CREBBP; AKT1; |
| | PIK3R1; CHUK; PDGFRA; NFKB1; TLR2; BCL10; |
| | GSK3B; AKT3; TNFAIP3; IL1R1 |
| Neuregulin | ERBB4; PRKCE; ITGAM; ITGA5; PTEN; PRKCZ; ELK1; |
| Signaling | MAPK1; PTPN11; AKT2; EGFR; ERBB2; PRKCI; |
| Wnt & Beta | CDKN1B; STAT5B; PRKD1; MAPK3; ITGA1; KRAS; |
| catenin | PRKCD; STAT5A; SRC; ITGB7; RAF1; ITGB1; MAP2K2; |
| Signaling | ADAM17; AKT1; PIK3R1; PDPK1; MAP2K1; ITGB3; |
| | EREG; FRAP1; PSEN1; ITGA2; MYC; NRG1; CRKL; |
| | AKT3; PRKCA; HSP90AA1; RPS6KB1 |
| | CD44; EP300; LRP6; DVL3; CSNK1E; GJA1; SMO; |
| | AKT2; PIN1; CDH1; BTRC; GNAQ; MARK2; PPP2R1A; |
| | WNT11; SRC; DKK1; PPP2CA; SOX6; SFRP2; ILK; |
| | LEF1; SOX9; TP53; MAP3K7; CREBBP; TCF7L2; AKT1; |
| | PPP2R5C; WNT5A; LRP5; CTNNB1; TGFBR1; CCND1; |
| | GSK3A; DVL1; APC; CDKN2A; MYC; CSNK1A1; GSK3B; |
| | AKT3; SOX2 |
| Insulin Receptor | PTEN; INS; EIF4E; PTPN1; PRKCZ; MAPK1; TSC1; |
| Signaling | PTPN11; AKT2; CBL; PIK3CA; PRKCI; PIK3CB; PIK3C3; |
| | MAPK8; IRS1; MAPK3; TSC2; KRAS; EIF4EBP1; |
| | SLC2A4; PIK3C2A; PPP1CC; INSR; RAF1; FYN; |
| | MAP2K2; JAK1; AKT1; JAK2; PIK3R1; PDPK1; MAP2K1; |
| | GSK3A; FRAP1; CRKL; GSK3B; AKT3; FOXO1; SGK; |
| | RPS6KB1 |
| IL-6 Signaling | HSPB1; TRAF6; MAPKAPK2; ELK1; MAPK1; PTPN11; |
| | IKBKB; FOS; NFKB2; MAP3K14; MAPK8; MAPK3; |
| | MAPK10; IL6ST; KRAS; MAPK13; IL6R; RELA; SOCS1; |
| | MAPK9; ABCB1; TRAF2; MAPK14; TNF; RAF1; IKBKG; |
| | RELB; MAP3K7; MAP2K2; IL8; JAK2; CHUK; STAT3; |
| | MAP2K1; NFKB1; CEBPB; JUN; IL1R1; SRF; IL6 |
| Hepatic | PRKCE; IRAK1; INS; MYD88; PRKCZ; TRAF6; PPARA; |
| Cholestasis | RXRA; IKBKB; PRKCI; NFKB2; MAP3K14; MAPK8; |
| | PRKD1; MAPK10; RELA; PRKCD; MAPK9; ABCB1; |
| | TRAF2; TLR4; TNF; INSR; IKBKG; RELB; MAP3K7; IL8; |
| | CHUK; NR1H2; TJP2; NFKB1; ESR1; SREBF1; FGFR4; |
| | JUN; IL1R1; PRKCA; IL6 |
| IGF-1 Signaling | IGF1; PRKCZ; ELK1; MAPK1; PTPN11; NEDD4; AKT2; |
| | PIK3CA; PRKCI; PTK2; FOS; PIK3CB; PIK3C3; MAPK8; |
| | IGF1R; IRS1; MAPK3; IGFBP7; KRAS; PIK3C2A; |
| | YWHAZ; PXN; RAF1; CASP9; MAP2K2; AKT1; PIK3R1; |
| | PDPK1; MAP2K1; IGFBP2; SFN; JUN; CYR61; AKT3; |
| | FOXO1; SRF; CTGF; RPS6KB1 |
| NRF2-mediated | PRKCE; EP300; SOD2; PRKCZ; MAPK1; SQSTM1; |
| Oxidative | NQO1; PIK3CA; PRKCI; FOS; PIK3CB; PIK3C3; MAPK8; |
| Stress Response | PRKD1; MAPK3; KRAS; PRKCD; GSTP1; MAPK9; FTL; |
| | NFE2L2; PIK3C2A; MAPK14; RAF1; MAP3K7; CREBBP; |
| | MAP2K2; AKT1; PIK3R1; MAP2K1; PPIB; JUN; KEAP1; |
| | GSK3B; ATF4; PRKCA; EIF2AK3; HSP90AA1 |
| Hepatic Fibrosis/ | EDN1; IGF1; KDR; FLT1; SMAD2; FGFR1; MET; PGF; |
| Hepatic Stellate | SMAD3; EGFR; FAS; CSF1; NFKB2; BCL2; MYH9; |
| Cell Activation | IGF1R; IL6R; RELA; TLR4; PDGFRB; TNF; RELB; IL8; |
| | PDGFRA; NFKB1; TGFBR1; SMAD4; VEGFA; BAX; |
| | IL1R1; CCL2; HGF; MMP1; STAT1; IL6; CTGF; MMP9 |
| PPAR Signaling | EP300; INS; TRAF6; PPARA; RXRA; MAPK1; IKBKB; |
| | NCOR2; FOS; NFKB2; MAP3K14; STAT5B; MAPK3; |
| | NRIP1; KRAS; PPARG; RELA; STAT5A; TRAF2; |
| | PPARGC1A; PDGFRB; TNF; INSR; RAF1; IKBKG; |
| | RELB; MAP3K7; CREBBP; MAP2K2; CHUK; PDGFRA; |
| | MAP2K1; NFKB1; JUN; IL1R1; HSP90AA1 |
| Fc Epsilon RI | PRKCE; RAC1; PRKCZ; LYN; MAPK1; RAC2; PTPN11; |
| Signaling | AKT2; PIK3CA; SYK; PRKCI; PIK3CB; PIK3C3; MAPK8; |
| | PRKD1; MAPK3; MAPK10; KRAS; MAPK13; PRKCD; |
| | MAPK9; PIK3C2A; BTK; MAPK14; TNF; RAF1; FYN; |
| | MAP2K2; AKT1; PIK3R1; PDPK1; MAP2K1; AKT3; |
| | VAV3; PRKCA |
| G-Protein Coupled | PRKCE; RAP1A; RGS16; MAPK1; GNAS; AKT2; IKBKB; |
| Receptor Signaling | PIK3CA; CREB1; GNAQ; NFKB2; CAMK2A; PIK3CB; |
| | PIK3C3; MAPK3; KRAS; RELA; SRC; PIK3C2A; RAF1; |
| | IKBKG; RELB; FYN; MAP2K2; AKT1; PIK3R1; CHUK; |
| | PDPK1; STAT3; MAP2K1; NFKB1; BRAF; ATF4; AKT3; |
| | PRKCA |
| Inositol Phosphate | PRKCE; IRAK1; PRKAA2; EIF2AK2; PTEN; GRK6; |
| Metabolism | MAPK1; PLK1; AKT2; PIK3CA; CDK8; PIK3CB; PIK3C3; |
| | MAPK8; MAPK3; PRKCD; PRKAA1; MAPK9; CDK2; |
| | PIM1; PIK3C2A; DYRK1A; MAP2K2; PIP5K1A; PIK3R1; |
| | MAP2K1; PAK3; ATM; TTK; CSNK1A1; BRAF; SGK |
| PDGF Signaling | EIF2AK2; ELK1; ABL2; MAPK1; PIK3CA; FOS; PIK3CB; |
| | PIK3C3; MAPK8; CAV1; ABL1; MAPK3; KRAS; SRC; |
| | PIK3C2A; PDGFRB; RAF1; MAP2K2; JAK1; JAK2; |
| | PIK3R1; PDGFRA; STAT3; SPHK1; MAP2K1; MYC; |
| | JUN; CRKL; PRKCA; SRF; STAT1; SPHK2 |
| VEGF Signaling | ACTN4; ROCK1; KDR; FLT1; ROCK2; MAPK1; PGF; |
| | AKT2; PIK3CA; ARNT; PTK2; BCL2; PIK3CB; PIK3C3; |
| | BCL2L1; MAPK3; KRAS; HIF1A; NOS3; PIK3C2A; PXN; |
| | RAF1; MAP2K2; ELAVL1; AKT1; PIK3R1; MAP2K1; SFN; |
| | VEGFA; AKT3; FOXO1; PRKCA |
| Natural Killer | PRKCE; RAC1; PRKCZ; MAPK1; RAC2; PTPN11; |
| Cell Signaling | KIR2DL3; AKT2; PIK3CA; SYK; PRKCI; PIK3CB; |
| | PIK3C3; PRKD1; MAPK3; KRAS; PRKCD; PTPN6; |
| | PIK3C2A; LCK; RAF1; FYN; MAP2K2; PAK4; AKT1; |
| | PIK3R1; MAP2K1; PAK3; AKT3; VAV3; PRKCA |
| Cell Cycle: G1/S | HDAC4; SMAD3; SUV39H1; HDAC5; CDKN1B; BTRC; |
| Checkpoint Regulation | ATR; ABL1; E2F1; HDAC2; HDAC7A; RB1; HDAC11; |
| | HDAC9; CDK2; E2F2; HDAC3; TP53; CDKN1A; CCND1; |
| | E2F4; ATM; RBL2; SMAD4; CDKN2A; MYC; NRG1; |
| | GSK3B; RBL1; HDAC6 |
| T Cell Receptor | RAC1; ELK1; MAPK1; IKBKB; CBL; PIK3CA; FOS; |
| Signaling | NFKB2; PIK3CB; PIK3C3; MAPK8; MAPK3; KRAS; |
| | RELA; PIK3C2A; BTK; LCK; RAF1; IKBKG; RELB; FYN; |
| | MAP2K2; PIK3R1; CHUK; MAP2K1; NFKB1; ITK; BCL10; |
| | JUN; VAV3 |
| Death Receptor | CRADD; HSPB1; BID; BIRC4; TBK1; IKBKB; FADD; |
| Signaling | FAS; NFKB2; BCL2; MAP3K14; MAPK8; RIPK1; CASP8; |
| | DAXX; TNFRSF10B; RELA; TRAF2; TNF; IKBKG; RELB; |
| | CASP9; CHUK; APAF1; NFKB1; CASP2; BIRC2; CASP3; |
| | BIRC3 |
| FGF Signaling | RAC1; FGFR1; MET; MAPKAPK2; MAPK1; PTPN11; |
| | AKT2; PIK3CA; CREB1; PIK3CB; PIK3C3; MAPK8; |
| | MAPK3; MAPK13; PTPN6; PIK3C2A; MAPK14; RAF1; |
| | AKT1; PIK3R1; STAT3; MAP2K1; FGFR4; CRKL; ATF4; |
| | AKT3; PRKCA; HGF |
| GM-CSF Signaling | LYN; ELK1; MAPK1; PTPN11; AKT2; PIK3CA; CAMK2A; |
| | STAT5B; PIK3CB; PIK3C3; GNB2L1; BCL2L1; MAPK3; |
| | ETS1; KRAS; RUNX1; PIM1; PIK3C2A; RAF1; MAP2K2; |
| | AKT1; JAK2; PIK3R1; STAT3; MAP2K1; CCND1; AKT3; |
| | STAT1 |
| Amyotrophic Lateral | BID; IGF1; RAC1; BIRC4; PGF; CAPNS1; CAPN2; |
| Sclerosis Signaling | PIK3CA; BCL2; PIK3CB; PIK3C3; BCL2L1; CAPN1; |
| | PIK3C2A; TP53; CASP9; PIK3R1; RAB5A; CASP1; |
| | APAF1; VEGFA; BIRC2; BAX; AKT3; CASP3; BIRC3 |
| JAK/Stat Signaling | PTPN1; MAPK1; PTPN11; AKT2; PIK3CA; STAT5B; |
| | PIK3CB; PIK3C3; MAPK3; KRAS; SOCS1; STAT5A; |
| | PTPN6; PIK3C2A; RAF1; CDKN1A; MAP2K2; JAK1; |
| | AKT1; JAK2; PIK3R1; STAT3; MAP2K1; FRAP1; AKT3; |
| | STAT1 |
| Nicotinate and | PRKCE; IRAK1; PRKAA2; EIF2AK2; GRK6; MAPK1; |
| Nicotinamide | PLK1; AKT2; CDK8; MAPK8; MAPK3; PRKCD; PRKAA1; |
| Metabolism | PBEF1; MAPK9; CDK2; PIM1; DYRK1A; MAP2K2; |
| | MAP2K1; PAK3; NT5E; TTK; CSNK1A1; BRAF; SGK |
| Chemokine | CXCR4; ROCK2; MAPK1; PTK2; FOS; CFL1; GNAQ; |
| Signaling | CAMK2A; CXCL12; MAPK8; MAPK3; KRAS; MAPK13; |
| | RHOA; CCR3; SRC; PPP1CC; MAPK14; NOX1; RAF1; |
| | MAP2K2; MAP2K1; JUN; CCL2; PRKCA |
| IL-2 Signaling | ELK1; MAPK1; PTPN11; AKT2; PIK3CA; SYK; FOS; |
| | STAT5B; PIK3CB; PIK3C3; MAPK8; MAPK3; KRAS; |
| | SOCS1; STAT5A; PIK3C2A; LCK; RAF1; MAP2K2; |
| | JAK1; AKT1; PIK3R1; MAP2K1; JUN; AKT3 |
| Synaptic Long Term | PRKCE; IGF1; PRKCZ; PRDX6; LYN; MAPK1; GNAS; |
| Depression | PRKCI; GNAQ; PPP2R1A; IGF1R; PRKD1; MAPK3; |
| | KRAS; GRN; PRKCD; NOS3; NOS2A; PPP2CA; |
| | YWHAZ; RAF1; MAP2K2; PPP2R5C; MAP2K1; PRKCA |
| Estrogen Receptor | TAF4B; EP300; CARM1; PCAF; MAPK1; NCOR2; |
| Signaling | SMARCA4; MAPK3; NRIP1; KRAS; SRC; NR3C1; |
| | HDAC3; PPARGC1A; RBM9; NCOA3; RAF1; CREBBP; |
| | MAP2K2; NCOA2; MAP2K1; PRKDC; ESR1; ESR2 |
| Protein | TRAF6; SMURF1; BIRC4; BRCA1; UCHL1; NEDD4; |
| Ubiquitination | CBL; UBE2I; BTRC; HSPA5; USP7; USP10; FBXW7; |
| Pathway | USP9X; STUB1; USP22; B2M; BIRC2; PARK2; USP8; |
| | USP1; VHL; HSP90AA1; BIRC3 |
| IL-10 Signaling | TRAF6; CCR1; ELK1; IKBKB; SP1; FOS; NFKB2; |
| | MAP3K14; MAPK8; MAPK13; RELA; MAPK14; TNF; |
| | IKBKG; RELB; MAP3K7; JAK1; CHUK; STAT3; NFKB1; |
| | JUN; IL1R1; IL6 |
| VDR/RXR Activation | PRKCE; EP300; PRKCZ; RXRA; GADD45A; HES1; |
| | NCOR2; SP1; PRKCI; CDKN1B; PRKD1; PRKCD; |
| | RUNX2; KLF4; YY1; NCOA3; CDKN1A; NCOA2; SPP1; |
| | LRP5; CEBPB; FOXO1; PRKCA |
| TGF-beta Signaling | EP300; SMAD2; SMURF1; MAPK1; SMAD3; SMAD1; |
| | FOS; MAPK8; MAPK3; KRAS; MAPK9; RUNX2; |
| | SERPINE1; RAF1; MAP3K7; CREBBP; MAP2K2; |
| | MAP2K1; TGFBR1; SMAD4; JUN; SMAD5 |
| Toll-like Receptor | IRAK1; EIF2AK2; MYD88; TRAF6; PPARA; ELK1; |
| Signaling | IKBKB; FOS; NFKB2; MAP3K14; MAPK8; MAPK13; |
| | RELA; TLR4; MAPK14; IKBKG; RELB; MAP3K7; CHUK; |
| | NFKB1; TLR2; JUN |
| p38 MAPK Signaling | HSPB1; IRAK1; TRAF6; MAPKAPK2; ELK1; FADD; FAS; |
| | CREB1; DDIT3; RPS6KA4; DAXX; MAPK13; TRAF2; |
| | MAPK14; TNF; MAP3K7; TGFBR1; MYC; ATF4; IL1R1; |
| | SRF; STAT1 |
| Neurotrophin/TRK | NTRK2; MAPK1; PTPN11; PIK3CA; CREB1; FOS; |
| Signaling | PIK3CB; PIK3C3; MAPK8; MAPK3; KRAS; PIK3C2A; |
| | RAF1; MAP2K2; AKT1; PIK3R1; PDPK1; MAP2K1; |
| | CDC42; JUN; ATF4 |
| FXR/RXR Activation | INS; PPARA; FASN; RXRA; AKT2; SDC1; MAPK8; |
| | APOB; MAPK10; PPARG; MTTP; MAPK9; PPARGC1A; |
| | TNF; CREBBP; AKT1; SREBF1; FGFR4; AKT3; FOXO1 |
| Synaptic Long Term | PRKCE; RAP1A; EP300; PRKCZ; MAPK1; CREB1; |
| Potentiation | PRKCI; GNAQ; CAMK2A; PRKD1; MAPK3; KRAS; |
| | PRKCD; PPP1CC; RAF1; CREBBP; MAP2K2; MAP2K1; |
| | ATF4; PRKCA |
| Calcium Signaling | RAP1A; EP300; HDAC4; MAPK1; HDAC5; CREB1; |
| | CAMK2A; MYH9; MAPK3; HDAC2; HDAC7A; HDAC11; |
| | HDAC9; HDAC3; CREBBP; CALR; CAMKK2; ATF4; |
| | HDAC6 |
| EGF Signaling | ELK1; MAPK1; EGFR; PIK3CA; FOS; PIK3CB; PIK3C3; |
| | MAPK8; MAPK3; PIK3C2A; RAF1; JAK1; PIK3R1; |
| | STAT3; MAP2K1; JUN; PRKCA; SRF; STAT1 |
| Hypoxia Signaling in the | EDN1; PTEN; EP300; NQO1; UBE2I; CREB1; ARNT; |
| Cardiovascular System | HIF1A; SLC2A4; NOS3; TP53; LDHA; AKT1; ATM; |
| | VEGFA; JUN; ATF4; VHL; HSP90AA1 |
| LPS/IL-1 Mediated | IRAK1; MYD88; TRAF6; PPARA; RXRA; ABCA1; |
| Inhibition | MAPK8; ALDH1A1; GSTP1; MAPK9; ABCB1; TRAF2; |
| of RXR Function | TLR4; TNF; MAP3K7; NR1H2; SREBF1; JUN; IL1R1 |
| LXR/RXR Activation | FASN; RXRA; NCOR2; ABCA1; NFKB2; IRF3; RELA; |
| | NOS2A; TLR4; TNF; RELB; LDLR; NR1H2; NFKB1; |
| | SREBF1; IL1R1; CCL2; IL6; MMP9 |
| Amyloid Processing | PRKCE; CSNK1E; MAPK1; CAPNS1; AKT2; CAPN2; |
| | CAPN1; MAPK3; MAPK13; MAPT; MAPK14; AKT1; |
| | PSEN1; CSNK1A1; GSK3B; AKT3; APP |
| IL-4 Signaling | AKT2; PIK3CA; PIK3CB; PIK3C3; IRS1; KRAS; SOCS1; |
| | PTPN6; NR3C1; PIK3C2A; JAK1; AKT1; JAK2; PIK3R1; |
| | FRAP1; AKT3; RPS6KB1 |
| Cell Cycle: G2/M DNA | EP300; PCAF; BRCA1; GADD45A; PLK1; BTRC; |
| Damage Checkpoint | CHEK1; ATR; CHEK2; YWHAZ; TP53; CDKN1A; |
| Regulation | PRKDC; ATM; SFN; CDKN2A |
| Nitric Oxide Signaling | KDR; FLT1; PGF; AKT2; PIK3CA; PIK3CB; PIK3C3; |
| in the Cardiovascular | CAV1; PRKCD; NOS3; PIK3C2A; AKT1; PIK3R1; |
| System | VEGFA; AKT3; HSP90AA1 |
| Purine Metabolism | NME2; SMARCA4; MYH9; RRM2; ADAR; EIF2AK4; |
| | PKM2; ENTPD1; RAD51; RRM2B; TJP2; RAD51C; |
| | NT5E; POLD1; NME1 |
| cAMP-mediated Signaling | RAP1A; MAPK1; GNAS; CREB1; CAMK2A; MAPK3; |
| | SRC; RAF1; MAP2K2; STAT3; MAP2K1; BRAF; ATF4 |
| Mitochondrial Dysfunction | SOD2; MAPK8; CASP8; MAPK10; MAPK9; CASP9; |
| Notch Signaling | PARK7; PSEN1; PARK2; APP; CASP3 |
| | HES1; JAG1; NUMB; NOTCH4; ADAM17; NOTCH2; |
| | PSEN1; NOTCH3; NOTCH1; DLL4 |
| Endoplasmic Reticulum | HSPA5; MAPK8; XBP1; TRAF2; ATF6; CASP9; ATF4; |
| Stress Pathway | EIF2AK3; CASP3 |
| Pyrimidine Metabolism | NME2; AICDA; RRM2; EIF2AK4; ENTPD1; RRM2B; |
| | NT5E; POLD1; NME1 |
| Parkinson's Signaling | UCHL1; MAPK8; MAPK13; MAPK14; CASP9; PARK7; |
| | PARK2; CASP3 |
| Cardiac & Beta Adrenergic | GNAS; GNAQ; PPP2R1A; GNB2L1; PPP2CA; PPP1CC; |
| Signaling | PPP2R5C |
| Glycolysis/Gluconeogenesis | HK2; GCK; GPI; ALDH1A1; PKM2; LDHA; HK1 |
| Interferon Signaling | IRF1; SOCS1; JAK1; JAK2; IFITM1; STAT1; IFIT3 |
| Sonic Hedgehog Signaling | ARRB2; SMO; GLI2; DYRK1A; GLI1; GSK3B; DYRK1B |
| Glycerophospholipid | PLD1; GRN; GPAM; YWHAZ; SPHK1; SPHK2 |
| Metabolism | |
| Phospholipid Degradation | PRDX6; PLD1; GRN; YWHAZ; SPHK1; SPHK2 |
| Tryptophan Metabolism | SIAH2; PRMT5; NEDD4; ALDH1A1; CYP1B1; SIAH1 |
| Lysine Degradation | SUV39H1; EHMT2; NSD1; SETD7; PPP2R5C |
| Nucleotide Excision Repair | ERCC5; ERCC4; XPA; XPC; ERCC1 |
| Pathway | |
| Starch and Sucrose | UCHL1; HK2; GCK; GPI; HK1 |
| Metabolism | |
| Aminosugars Metabolism | NQO1; HK2; GCK; HK1 |
| Arachidonic Acid | PRDX6; GRN; YWHAZ; CYP1B1 |
| Metabolism | |
| Circadian Rhythm Signaling | CSNK1E; CREB1; ATF4; NR1D1 |
| Coagulation System | BDKRB1; F2R; SERPINE1; F3 |
| Dopamine Receptor | PPP2R1A; PPP2CA; PPP1CC; PPP2R5C |
| Signaling | |
| Glutathione Metabolism | IDH2; GSTP1; ANPEP; IDH1 |
| Glycerolipid Metabolism | ALDH1A1; GPAM; SPHK1; SPHK2 |
| Linoleic Acid Metabolism | PRDX6; GRN; YWHAZ; CYP1B1 |
| Methionine Metabolism | DNMT1; DNMT3B; AHCY; DNMT3A |
| Pyruvate Metabolism | GLO1; ALDH1A1; PKM2; LDHA |
| Arginine and Proline | ALDH1A1; NOS3; NOS2A |
| Metabolism | |
| Eicosanoid Signaling | PRDX6; GRN; YWHAZ |
| Fructose and Mannose | HK2; GCK; HK1 |
| Metabolism | |
| Galactose Metabolism | HK2; GCK; HK1 |
| Stilbene, Coumarine and | PRDX6; PRDX1; TYR |
| Lignin Biosynthesis | |
| Antigen Presentation | CALR; B2M |
| Pathway | |
| Biosynthesis of Steroids | NQO1; DHCR7 |
| Butanoate Metabolism | ALDH1A1; NLGN1 |
| Citrate Cycle | IDH2; IDH1 |
| Fatty Acid Metabolism | ALDH1A1; CYP1B1 |
| Glycerophospholipid | PRDX6; CHKA |
| Metabolism | |
| Histidine Metabolism | PRMT5; ALDH1A1 |
| Inositol Metabolism | ERO1L; APEX1 |
| Metabolism of Xenobiotics | GSTP1; CYP1B1 |
| by Cytochrome p450 | |
| Methane Metabolism | PRDX6; PRDX1 |
| Phenylalanine Metabolism | PRDX6; PRDX1 |
| Propanoate Metabolism | ALDH1A1; LDHA |
| Selenoamino Acid | PRMT5; AHCY |
| Metabolism | |
| Sphingolipid Metabolism | SPHK1; SPHK2 |
| Aminophosphonate | PRMT5 |
| Metabolism | |
| Androgen and Estrogen | PRMT5 |
| Metabolism | |
| Ascorbate and Aldarate | ALDH1A1 |
| Metabolism | |
| Bile Acid Biosynthesis | ALDH1A1 |
| Cysteine Metabolism | LDHA |
| Fatty Acid Biosynthesis | FASN |
| Glutamate Receptor | GNB2L1 |
| Signaling | |
| NRF2-mediated Oxidative | PRDX1 |
| Stress Response | |
| Pentose Phosphate | GPI |
| Pathway | |
| Pentose and Glucuronate | UCHL1 |
| Interconversions | |
| Retinol Metabolism | ALDH1A1 |
| Riboflavin Metabolism | TYR |
| Tyrosine Metabolism | PRMT5, TYR |
| Ubiquinone Biosynthesis | PRMT5 |
| Valine, Leucine and | ALDH1A1 |
| Isoleucine Degradation | |
| Glycine, Serine and | CHKA |
| Threonine Metabolism | |
| Lysine Degradation | ALDH1A1 |
| Pain/Taste | TRPM5; TRPA1 |
| Pain | TRPM7; TRPC5; TRPC6; TRPC1; Cnr1; cnr2; Grk2; |
| | Trpa1; Pomc; Cgrp; Crf; Pka; Era; Nr2b; TRPM5; Prkaca; |
| | Prkacb; Prkar1a; Prkar2a |
| Mitochondrial Function | AIF; CytC; SMAC (Diablo); Aifm-1; Aifm-2 |
| Developmental Neurology | BMP-4; Chordin (Chrd); Noggin (Nog); WNT (Wnt2; |
| | Wnt2b; Wnt3a; Wnt4; Wnt5a; Wnt6; Wnt7b; Wnt8b; |
| | Wnt9a; Wnt9b; Wnt10a; Wnt10b; Wnt16); beta-catenin; |
| | Dkk-1; Frizzled related proteins; Otx-2; Gbx2; FGF-8; |
| | Reelin; Dab1; unc-86 (Pou4f1 or Brn3a); Numb; Reln |

[0844] In an aspect, the invention provides a method of individualized or personalized treatment of a genetic disease in a subject in need of such treatment comprising: (a) introducing one or more mutations ex vivo in a tissue, organ or a cell line, or in vivo in a transgenic non-human mammal, comprising delivering to cell(s) of the tissue, organ, cell or mammal a composition comprising the particle delivery system or the delivery system or the virus particle of any one of the above embodiment or the cell of any one of the above embodiment, wherein the specific mutations or precise sequence substitutions are or have been correlated to the genetic disease; (b) testing treatment(s) for the genetic disease on the cells to which the vector has been delivered that have the specific mutations or precise sequence substitutions correlated to the genetic disease; and (c) treating the subject based on results from the testing of treatment(s) of step (b).

### Infectious Diseases

[0845] In one embodiment, the composition, system(s) or component(s) thereof can be used to diagnose, prognose, treat, and/or prevent an infectious disease caused by a microorganism, such as bacteria, virus, fungi, parasites, or combinations thereof.

[0846] In one embodiment, the system(s) or component(s) thereof can be capable of targeting specific microorganism within a mixed population. Exemplary methods of such techniques are described in e.g., Gomaa A A, Klumpe H E, Luo M L, Selle K, Barrangou R, Beisel CL. 2014. Programmable removal of bacterial strains by use of genome-targeting composition, systems, mBio 5: e⁰⁰⁹²⁸-13; Citorik R J, Mimee M, Lu T K. 2014. Sequence-specific antimicrobials using efficiently delivered RNA-guided nucleases. Nat Biotechnol 32:1141-1145, the teachings of which can be adapted for use with the compositions, systems, and components thereof described herein.

[0847] In one embodiment, the composition, system(s) and/or components thereof can be capable of targeting pathogenic and/or drug-resistant microorganisms, such as bacteria, virus, parasites, and fungi. In one embodiment, the composition, system(s) and/or components thereof can be capable of targeting and modifying one or more polynucleotides in a pathogenic microorganism such that the microorganism is less virulent, killed, inhibited, or is otherwise rendered incapable of causing disease and/or infecting and/or replicating in a host cell.

[0848] In one embodiment, the pathogenic bacteria that can be targeted and/or modified by the composition, system, (s) and/or component(s) thereof described herein include, but are not limited to, those of the genus Actinomyces (e.g. A. israelii), Bacillus (e.g. B. anthracis, B. cereus), Bactereoides (e.g. B. fragilis), Bartonella (B. henselae, B. quintana), Bordetella (B. pertussis), Borrelia (e.g. B, burgdorferi, B. garinii, B. afzelii, and B. recurreentis), Brucella (e.g. B. abortus, B. canis, B. melitensis, and B. suis), Campylobacter (e.g. C. jejuni), Chlamydia (e.g. C. pneumoniae and C. trachomatis), Chlamydophila (e.g. C. psittaci), Clostridium (e.g. C, botulinum, C. difficile, C. perfringens. C. tetani), Corynebacterium (e.g. C. diptheriae), Enterococcus (e.g. E. Faecalis, E. faecium), Ehrlichia (E. canis and E. chaffensis) Escherichia (e.g. E. coli), Francisella (e.g. F. tularensis), Haemophilus (e.g. H. influenzae), Helicobacter (H. pylori), Klebsiella (E.g. K. pneumoniae), Legionella (e.g. L. pneumophila), Leptospira (e.g. L. interrogans, L. santarosai, L. weilii, L. noguchii), Listereia (e.g. L. monocytogeenes), Mycobacterium (e.g. M. leprae, M. tuberculosis, M. ulcerans), Mycoplasma (M. pneumoniae), Neisseria (N. gonorrhoeae and N. menigitidis), Nocardia (e.g. N. asteeroides), Pseudomonas (P. aeruginosa), Rickettsia (R. rickettsia), Salmonella (S. typhi and S. typhimurium), Shigella (S. sonnei and S. dysenteriae), Staphylococcus (S. aureus, S. epidermidis, and S. saprophyticus), Streeptococcus (S. agalactiaee, S. pneumoniae, S. pyogenes), Treponema (T. pallidum), Ureeaplasma (e.g. U. urealyticum), Vibrio (e.g. V. cholerae), Yersinia (e.g. Y. pestis, Y. enterocolitica, and Y. pseudotuberculosis).

[0849] In one embodiment, the pathogenic virus that can be targeted and/or modified by the composition, system(s) and/or component(s) thereof described herein include, but are not limited to, a double-stranded DNA virus, a partly double-stranded DNA virus, a single-stranded DNA virus, a positive single-stranded RNA virus, a negative single-stranded RNA virus, or a double stranded RNA virus. In one embodiment, the pathogenic virus can be from the family Adenoviridae (e.g. Adenovirus), Herpeesviridae (e.g. Herpes simplex, type 1, Herpes simplex, type 2, Varicella-zoster virus, Epstein-Barr virus, Human cytomegalovirus,

[0850] Human herpesvirus, type 8), Papillomaviridae (e.g. Human papillomavirus), Polyomaviridae (e.g. BK virus, JC virus), Poxviridae (e.g. smallpox), Hepadnaviridae (e.g. Hepatitis B), Parvoviridae (e.g. Parvovirus β19), Astroviridae (e.g. Human astrovirus), Caliciviridae (e.g. Norwalk virus), Picornaviridae (e.g. coxsackievirus, hepatitis A virus, poliovirus, rhinovirus), Coronaviridae (e.g. Severe acute respiratory syndrome-related coronavirus, strains: Severe acute respiratory syndrome virus, Severe acute respiratory syndrome coronavirus 2 (COVID-19 and variants)), Flaviviridae (e.g. Hepatitis C virus, yellow fever virus, dengue virus, West Nile virus, TBE virus), Togaviridae (e.g. Rubella virus), Hepeviridae (e.g. Hepatitis E virus), Retroviridae (Human immunodeficiency virus (HIV)), Orthomyxoviridae (e.g. Influenza virus), Arenaviridae (e.g. Lassa virus), Bunyaviridae (e.g. Crimean-Congo hemorrhagic fever virus, Hantaan virus), Filoviridae (e.g. Ebola virus and Marburg virus), Paramyxoviridae (e.g. Measles virus, Mumps virus, Parainfluenza virus, Respiratory syncytial virus), Rhabdoviridae (Rabies virus), Hepatits D virus, Reoviridae (e.g. Rotavirus, Orbivirus, Coltivirus, Banna virus).

[0851] In one embodiment, the pathogenic fungi that can be targeted and/or modified by the composition, system, (s) and/or component(s) thereof described herein include, but are not limited to, those of the genus Candida (e.g. C. albicans), Aspergillus (e.g. A. fumigatus, A. flavus, A. clavatus), Cryptococcus (e.g. C. neoformans, C. gattii), Histoplasma (H. capsulatum), Pneumocystis (e.g. P. jiroveecii), Stachybotrys (e.g. S. chartarum).

[0852] In one embodiment, the pathogenic parasites that can be targeted and/or modified by the composition, system(s) and/or component(s) thereof described herein include, but are not limited to, protozoa, helminths, and ectoparasites. In one embodiment, the pathogenic protozoa that can be targeted and/or modified by the composition, system(s) and/or component(s) thereof described herein include, but are not limited to, those from the groups Sarcodina (e.g. ameba such as Entamoeba), Mastigophora (e.g. flagellates such as Giardia and Leishmania), Cilophora (e.g. ciliates such as Balantidum), and sporozoa (e.g. plasmodium and cryptosporidium). In one embodiment, the pathogenic helminths that can be targeted and/or modified by the composition, system(s) and/or component(s) thereof described herein include, but are not limited to, flatworms (platyhelminths), thorny-headed worms (acanthoceephalins), and roundworms (nematodes). In one embodiment, the pathogenic ectoparasites that can be targeted and/or modified by the composition, system(s) and/or component(s) thereof described herein include, but are not limited to, ticks, fleas, lice, and mites.

[0853] In one embodiment, the pathogenic parasite that can be targeted and/or modified by the composition, system, (s) and/or component(s) thereof described herein include, but are not limited to, Acanthamoeba spp., Balamuthia mandrillaris, Babesiosis spp. (e.g. Babesia B. divergens, B, bigemina, B. equi, B. microfti, B. duncani), Balantidiasis spp. (e.g. Balantidium coli), Blastocystis spp., Cryptosporidium spp., Cyclosporiasis spp. (e.g. Cyclospora cayetanensis), Dientamoebiasis spp. (e.g. Dientamoeba fragilis), Amoebiasis spp. (e.g. Entamoeba histolytica), Giardiasis spp. (e.g. Giardia lamblia), Isosporiasis spp. (e.g. Isospora belli), Leishmania spp., Naegleria spp. (e.g. Naegleria fowleri), Plasmodium spp. (e.g. Plasmodium falciparum, Plasmodium vivax, Plasmodium ovale curtisi, Plasmodium ovale wallikeri, Plasmodium malariae, Plasmodium knowlesi), Rhinosporidiosis spp. (e.g. Rhinosporidium seeberi), Sarcocystosis spp. (e.g. Sarcocystis bovihominis, Sarcocystis suihominis), Toxoplasma spp. (e.g. Toxoplasma gondii), Trichomonas spp. (e.g. Trichomonas vaginalis), Trypanosoma spp. (e.g. Trypanosoma brucei), Trypanosoma spp. (e.g. Trypanosoma cruzi), Tapeworm (e.g. Cestoda, Taenia multiceps, Taenia saginata, Taenia solium), Diphyllobothrium latum spp., Echinococcus spp. (e.g. Echinococcus granulosus, Echinococcus multilocularis, E. vogeli, E. oligarthrus), Hymenolepis spp. (e.g. Hymenolepis nana, Hymenolepis diminuta), Bertiella spp. (e.g. Bertiella mucronata, Bertiella studeri), Spirometra (e.g. Spirometra erinaceieuropaei), Clonorchis spp. (e.g. Clonorchis sinensis; Clonorchis viverrini), Dicrocoelium spp. (e.g. Dicrocoelium dendriticum), Fasciola spp. (e.g. Fasciola hepatica, Fasciola gigantica), Fasciolopsis spp. (e.g. Fasciolopsis buski), Metagonimus spp. (e.g. Metagonimus yokogawai), Metorchis spp. (e.g. Metorchis conjunctus), Opisthorchis spp. (e.g. Opisthorchis viverrini, Opisthorchis felineus), Clonorchis spp. (e.g. Clonorchis sinensis), Paragonimus spp. (e.g. Paragonimus westermani; Paragonimus africanus; Paragonimus caliensis; Paragonimus kellicotti; Paragonimus skrjabini; Paragonimus uterobilateralis), Schistosoma sp., Schistosoma spp. (e.g. Schistosoma mansoni, Schistosoma haematobium, Schistosoma japonicum, Schistosoma mekongi, and Schistosoma intercalatum), Echinostoma spp. (e.g. E. echinatum), Trichobilharzia spp. (e.g. Trichobilharzia regent), Ancylostoma spp. (e.g. Ancylostoma duodenale), Necator spp. (e.g. Necator americanus), Angiostrongylus spp., Anisakis spp., Ascaris spp. (e.g. Ascaris lumbricoides), Baylisascaris spp. (e.g. Baylisascaris procyonis), Brugia spp. (e.g. Brugia malayi, Brugia timori), Dioctophyme spp. (e.g. Dioctophyme renale), Dracunculus spp. (e.g. Dracunculus medinensis), Enterobius spp. (e.g. Enterobius vermicularis, Enterobius gregorii), Gnathostoma spp. (e.g. Gnathostoma spinigerum, Gnathostoma hispidum), Halicephalobus spp. (e.g. Halicephalobus gingivalis), Loa loa spp. (e.g. Loa loa filaria), Mansonella spp. (e.g. Mansonella streptocerca), Onchocerca spp. (e.g. Onchocerca volvulus), Strongyloides spp. (e.g. Strongyloides stercoralis), Thelazia spp. (e.g. Thelazia californiensis, Thelazia callipaeda), Toxocara spp. (e.g. Toxocara canis, Toxocara cati, Toxascaris leonine), Trichinella spp. (e.g. Trichinella spiralis, Trichinella britovi, Trichinella nelsoni, Trichinella nativa), Trichuris spp. (e.g. Trichuris trichiura, Trichuris vulpis), Wuchereria spp. (e.g. Wuchereria bancrofti), Dermatobia spp. (e.g. Dermatobia hominis), Tunga spp. (e.g. Tunga penetrans), Cochliomyia spp. (e.g. Cochliomyia hominivorax), Linguatula spp. (e.g. Linguatula serrata), Archiacanthocephala sp., Moniliformis sp. (e.g. Moniliformis moniliformis), Pediculus spp. (e.g. Pediculus humanus capitis, Pediculus humanus humanus), Pthirus spp. (e.g. Pthirus pubis), Arachnida spp. (e.g. Trombiculidae, Ixodidae, Argaside), Siphonaptera spp (e.g. Siphonaptera: Pulicinae), Cimicidae spp. (e.g. Cimex lectularius and Cimex hemipterus), Diptera spp., Demodex spp. (e.g. Demodex folliculorum/brevis/canis), Sarcoptes spp. (e.g. Sarcoptes scabiei), Dermanyssus spp. (e.g. Dermanyssus gallinae), Ornithonyssus spp. (e.g. Ornithonyssus sylviarum, Ornithonyssus bursa, Ornithonyssus bacoti), Laelaps spp. (e.g. Laelaps echidnina), Liponyssoides spp. (e.g. Liponyssoides sanguineus).

[0854] In one embodiment the gene targets can be any of those as set forth in Table 1 of Strich and Chertow, 2019. J. Clin. Microbio. 57:4 e⁰¹³⁰⁷-18, which is incorporated herein as if expressed in its entirety herein.

[0855] In one embodiment, the method can include delivering a composition, system, and/or component thereof to a pathogenic organism described herein, allowing the composition, system, and/or component thereof to specifically bind and modify one or more targets in the pathogenic organism, whereby the modification kills, inhibits, reduces the pathogenicity of the pathogenic organism, or otherwise renders the pathogenic organism non-pathogenic. In one embodiment, delivery of the composition, system, occurs in vivo (i.e., in the subject being treated). In one embodiment occurs by an intermediary, such as microorganism or phage that is non-pathogenic to the subject but is capable of transferring polynucleotides and/or infecting the pathogenic microorganism. In one embodiment, the intermediary microorganism can be an engineered bacteria, virus, or phage that contains the composition, system(s) and/or component(s) thereof and/or vectors and/or vector systems. The method can include administering an intermediary microorganism containing the composition, system(s) and/or component(s) thereof and/or vectors and/or vector systems to the subject to be treated. The intermediary microorganism can then produce the compositions and/or component thereof or transfer a composition, system, polynucleotide to the pathogenic organism. In embodiments, where the compositions and/or component thereof, vector, or vector system is transferred to the pathogenic microorganism, the composition, system, or component thereof is then produced in the pathogenic microorganism and modifies the pathogenic microorganism such that it is less virulent, killed, inhibited, or is otherwise rendered incapable of causing disease and/or infecting and/or replicating in a host or cell thereof.

[0856] In one embodiment, where the pathogenic microorganism inserts its genetic material into the host cell's genome (e.g., a virus), the composition, system, can be designed such that it modifies the host cell's genome such that the viral DNA or cDNA cannot be replicated by the host cell's machinery into a functional virus. In one embodiment, where the pathogenic microorganism inserts its genetic material into the host cell's genome (e.g., a virus), the composition, system, can be designed such that it modifies the host cell's genome such that the viral DNA or cDNA is deleted from the host cell's genome.

[0857] It will be appreciated that inhibiting or killing the pathogenic microorganism, the disease and/or condition that its infection causes in the subject can be treated or prevented. Thus, also provided herein are methods of treating and/or preventing one or more diseases or symptoms thereof caused by any one or more pathogenic microorganisms, such as any of those described herein.

### Mitochondrial Diseases

[0858] Some of the most challenging mitochondrial disorders arise from mutations in mitochondrial DNA (mtDNA), a high copy number genome that is maternally inherited. In one embodiment, mtDNA mutations can be modified using a composition, system, described herein. In one embodiment, the mitochondrial disease that can be diagnosed, prognosed, treated, and/or prevented can be MELAS (mitochondrial myopathy encephalopathy, and lactic acidosis and stroke-like episodes), CPEO/PEO (chronic progressive external ophthalmoplegia syndrome/progressive external ophthalmoplegia), KSS (Kearns-Sayre syndrome), MIDD (maternally inherited diabetes and deafness), MERRF (myoclonic epilepsy associated with ragged red fibers), NIDDM (noninsulin-dependent diabetes mellitus), LHON (Leber hereditary optic neuropathy), LS (Leigh Syndrome) an aminoglycoside induced hearing disorder, NARP (neuropathy, ataxia, and pigmentary retinopathy), Extrapyramidal disorder with akinesia-rigidity, psychosis and SNHL, Nonsyndromic hearing loss a cardiomyopathy, an encephalomyopathy, Pearson's syndrome, or a combination thereof.

[0859] In one embodiment, the mtDNA of a subject can be modified in vivo or ex vivo. In one embodiment, where the mtDNA is modified ex vivo, after modification the cells containing the modified mitochondria can be administered back to the subject. In one embodiment, the composition, system, or component thereof can be capable of correcting an mtDNA mutation, or a combination thereof.

[0860] In one embodiment, at least one of the one or more mtDNA mutations is selected from the group consisting of: A3243G, C3256T, T3271C, G1019A, Al304T, A15533G, C1494T, C4467A, T1658C, G12315A, A3421G, A8344G, T8356C, G8363A, Al3042T, T3200C, G3242A, A3252G, T3264C, G3316A, T3394C, T14577C, A4833G, G3460A, G9804A, G11778A, G14459A, A14484G, G15257A, T8993C, T8993G, G10197A, G13513A, T1095C, C1494T, A1555G, G1541A, C1634T, A3260G, A4269G, T7587C, A8296G, A8348G, G8363A, T9957C, T9997C, G12192A, C12297T, A14484G, G15059A, duplication of CCCCCTCCCC-tandem repeats at positions 305-314 and/or 956-965, deletion at positions from 8,469-13,447, 4,308-14,874, and/or 4,398-14,822, 96lins/delC, the mitochondrial common deletion (e.g. mtDNA 4,977 bp deletion), and combinations thereof.

[0861] In one embodiment, the mitochondrial mutation can be any mutation as set forth in or as identified by use of one or more bioinformatic tools available at Mitomap available at mitomap.org. Such tools include, but are not limited to, “Variant Search, aka Market Finder”, Find Sequences for Any Haplogroup, aka “Sequence Finder”, “Variant Info”, “POLG Pathogenicity Prediction Server”, “MITOMASTER”, “Allele Search”, “Sequence and Variant Downloads”, “Data Downloads”. MitoMap contains reports of mutations in mtDNA that can be associated with disease and maintains a database of reported mitochondrial DNA Base Substitution Diseases: rRNA/tRNA mutations.

[0862] In one embodiment, the method includes delivering a composition, system, and/or a component thereof to a cell, and more specifically one or more mitochondria in a cell, allowing the composition, system, and/or component thereof to modify one or more target polynucleotides in the cell, and more specifically one or more mitochondria in the cell. The target polynucleotides can correspond to a mutation in the mtDNA, such as any one or more of those described herein. In one embodiment, the modification can alter a function of the mitochondria such that the mitochondria functions normally or at least is/are less dysfunctional as compared to an unmodified mitochondria. Modification can occur in vivo or ex vivo. Where modification is performed ex vivo, cells containing modified mitochondria can be administered to a subject in need thereof in an autologous or allogenic manner.

### Microbiome Modification

[0863] Microbiomes play important roles in health and disease. For example, the gut microbiome can play a role in health by controlling digestion, preventing growth of pathogenic microorganisms and have been suggested to influence mood and emotion. Imbalanced microbiomes can promote disease and are suggested to contribute to weight gain, unregulated blood sugar, high cholesterol, cancer, and other disorders. A healthy microbiome has a series of joint characteristics that can be distinguished from non-healthy individuals, thus detection and identification of the disease-associated microbiome can be used to diagnose and detect disease in an individual. The compositions, systems, and components thereof can be used to screen the microbiome cell population and be used to identify a disease associated microbiome. Cell screening methods utilizing compositions, systems, and components thereof are described elsewhere herein and can be applied to screening a microbiome, such as a gut, skin, vagina, and/or oral microbiome, of a subject.

[0864] In one embodiment, the microbe population of a microbiome in a subject can be modified using a composition, system, and/or component thereof described herein. In one embodiment, the composition, system, and/or component thereof can be used to identify and select one or more cell types in the microbiome and remove them from the microbiome population. Exemplary methods of selecting cells using a composition, system, and/or component thereof are described elsewhere herein. In this way the make-up or microorganism profile of the microbiome can be altered. In one embodiment, the alteration causes a change from a diseased microbiome composition to a healthy microbiome composition. In this way the ratio of one type or species of microorganism to another can be modified, such as going from a diseased ratio to a healthy ratio. In one embodiment, the cells selected are pathogenic microorganisms.

[0865] In one embodiment, the compositions and systems described herein can be used to modify a polynucleotide in a microorganism of a microbiome in a subject. In one embodiment, the microorganism is a pathogenic microorganism. In one embodiment, the microorganism is a commensal and non-pathogenic microorganism. Methods of modifying polynucleotides in a cell in the subject are described elsewhere herein and can be applied to these embodiments. Gene Drives

[0866] The present invention also contemplates use of the systems, compositions, system components, vectors, engineered cells, described herein to generate a gene drive via delivery of one or more system polypeptides and/or polynucleotides capable of producing a gene drive. In some embodiments, the gene drive can be a Cas-mediated RNA-guided gene drive e.g., Cas-to provide RNA-guided gene drives, for example in systems analogous to gene drives described in PCT Patent Publication WO 2015/105928. Systems of this kind may for example provide methods for altering eukaryotic germline cells, by introducing into the germline cell a nucleic acid sequence encoding an RNA-guided DNA nuclease and one or more guide RNAs. The guide RNAs may be designed to be complementary to one or more target locations on genomic DNA of the germline cell. The nucleic acid sequence encoding the RNA guided DNA nuclease and the nucleic acid sequence encoding the guide RNAs may be provided on constructs between flanking sequences, with promoters arranged such that the germline cell may express the RNA guided DNA nuclease and the guide RNAs, together with any desired cargo-encoding sequences that are also situated between the flanking sequences. The flanking sequences will typically include a sequence which is identical to a corresponding sequence on a selected target chromosome, so that the flanking sequences work with the components encoded by the construct to facilitate insertion of the foreign nucleic acid construct sequences into genomic DNA at a target cut site by mechanisms such as homologous recombination, to render the germline cell homozygous for the foreign nucleic acid sequence. In this way, gene-drive systems are capable of introgressing desired cargo genes throughout a breeding population (Gantz et al., 2015, Highly efficient Cas9-mediated gene drive for population modification of the malaria vector mosquito Anopheles stephensi, PNAS 2015, published ahead of print Nov. 23, 2015, doi: 10.1073/pnas. 1521077112; Esvelt et al., 2014, Concerning RNA-guided gene drives for the alteration of wild populations eLife 2014; 3: e⁰³⁴⁰¹). In select embodiments, target sequences may be selected which have few potential off-target sites in a genome. Targeting multiple sites within a target locus, using multiple guide RNAs, may increase the cutting frequency and hinder the evolution of drive resistant alleles. Truncated guide RNAs may reduce off-target cutting. Paired nickases may be used instead of a single nuclease, to further increase specificity. Gene drive constructs (such as gene drive engineered delivery system constructrs) may include cargo sequences encoding transcriptional regulators, for example to activate homologous recombination genes and/or repress non-homologous end-joining. Target sites may be chosen within an essential gene, so that non-homologous end-joining events may cause lethality rather than creating a drive-resistant allele. The gene drive constructs can be engineered to function in a range of hosts at a range of temperatures (Cho et al. 2013, Rapid and Tunable Control of Protein Stability in Caenorhabditis elegans Using a Small Molecule, PLOS ONE 8 (8): e⁷²³⁹³. doi: 10.1371/journal.pone.0072393).

### Transplantation and Xenotransplantation

[0867] The present invention also contemplates use of the composition described herein, e.g., Fanzor polypeptide protein systems, to provide RNA-guided DNA nucleases adapted to be used to provide modified tissues for transplantation (transplantation between two subjects of the same species) and/or xenotransplantation (transplantation between species). For example, RNA-guided DNA nucleases may be used to knockout, knockdown or disrupt selected genes in an animal, such as a transgenic pig (such as the human heme oxygenase-1 transgenic pig line), for example by disrupting expression of genes that encode epitopes recognized by the human immune system, i.e., xenoantigen genes. Candidate porcine genes for disruption may for example include a (1,3)-galactosyltransferase and cytidine monophosphate-N-acetylneuraminic acid hydroxylase genes (see PCT Patent Publication WO 2014/066505). In addition, genes encoding endogenous retroviruses may be disrupted, for example the genes encoding all porcine endogenous retroviruses (see Yang et al., 2015, Genome-wide inactivation of porcine endogenous retroviruses (PERVs), Science 27 Nov. 2015: Vol. 350 no. 6264 pp. 1101-1104). In addition, RNA-guided DNA nucleases may be used to target a site for integration of additional genes in xenotransplant donor animals, such as a human CD55 gene to improve protection against hyperacute rejection.

[0868] In other examples, such as in the context of transplantation, the systems and compositions described herein can be used to modify the organ or tissue to be transplanted to reduce, for example, immunogenicity, acute rejection, GvD, and other disorders and complications associated with transplantation. Such methods can allow for utilization of tissues that would otherwise not be a good or ideal match to a recipient for transplantation insofar as they can be modified prior to transplantation to improve the match characteristics and/or minimize tissue antigens and/or the like. For example, where it is interspecies transplantation (such as human to human) the systems, compositions, vectors, cells, and/or the like described herein, can be used to deliver cargo polynucleotides and/or otherwise be involved to modify the tissue to be transplanted. In some embodiments, the modification can include modifying one or more HLA antigens or other tissue type determinants, such that the immunogenic profile is more similar or identical to the recipient's immunogenic profile than to the donor's so as to reduce the occurrence of rejection by the recipient. Relevant tissue type determinants are known in the art (such as those used to determine organ matching) and techniques to determine the immunogenic profile (which is made up of the expression signature of the tissue type determinants) are generally known in the art.

[0869] In some embodiments, the donor (such as before harvest) or recipient (after transplantation) can receive one or more of the systems, composition, vectors, cells, and/or the like of the present invention described herein that are capable of modifying the immunogenic profile of the transplanted cells, tissue, and/or organ. In some embodiments, the transplanted cells, tissue, and/or organ can be harvested from the donor and the systems, composition, vectors, cells, and/or the like of the present invention described herein capable of modifying the harvested cells, tissue, and/or organ to be, for example, less immunogenic or be modified to have some specific characteristic when transplanted in the recipient can be delivered to the harvested cells, tissue, and/or organ ex vivo. After delivery the cells, tissue, and/or organs can be transplanted into the donor.

[0870] Embodiments of the invention also relate to methods and compositions related to knocking out genes, amplifying genes and repairing particular mutations associated with DNA repeat instability and neurological disorders (Robert D. Wells, Tetsuo Ashizawa, Genetic Instabilities and Neurological Diseases, Second Edition, Academic Press, Oct. 13, 2011-Medical). Specific aspects of tandem repeat sequences have been found to be responsible for more than twenty human diseases (New insights into repeat instability: role of RNA.DNA hybrids. McIvor E I, Polak U, Napierala M. RNA Biol. 2010 September-Oct;7 (5): 551-8). The present effector protein systems may be harnessed to correct these defects of genomic instability.

[0871] Several further aspects of the invention relate to correcting defects associated with a wide range of genetic diseases which are further described on the website of the National Institutes of Health under the topic subsection Genetic Disorders (website at health.nih.gov/topic/GeneticDisorders). The genetic brain diseases may include but are not limited to Adrenoleukodystrophy, Agenesis of the Corpus Callosum, Aicardi Syndrome, Alpers' Disease, Alzheimer's Disease, Barth Syndrome, Batten Disease, CADASIL, Cerebellar Degeneration, Fabry's Disease, Gerstmann-Straussler-Scheinker Disease, Huntington's Disease and other Triplet Repeat Disorders, Leigh's Disease, Lesch-Nyhan Syndrome, Menkes Disease, Mitochondrial Myopathies and NINDS Colpocephaly. These diseases are further described on the website of the National Institutes of Health under the subsection Genetic Brain Disorders.

### Considerations for Therapeutic Applications

[0872] A consideration in genome editing therapy is the choice of sequence-specific nuclease, such as a variant of a Fanzor polypeptide. Each nuclease variant may possess its own unique set of strengths and weaknesses, many of which must be balanced in the context of treatment to maximize therapeutic benefit. For a specific editing therapy to be efficacious, a sufficiently high level of modification must be achieved in target cell populations to reverse disease symptoms. This therapeutic modification ‘threshold’ is determined by the fitness of edited cells following treatment and the amount of gene product necessary to reverse symptoms. With regard to fitness, editing creates three potential outcomes for treated cells relative to their unedited counterparts: increased, neutral, or decreased fitness. In the case of increased fitness, corrected cells may be able and expand relative to their diseased counterparts to mediate therapy. In this case, where edited cells possess a selective advantage, even low numbers of edited cells can be amplified through expansion, providing a therapeutic benefit to the patient. Where the edited cells possess no change in fitness, an increase the therapeutic modification threshold can be warranted. As such, significantly greater levels of editing may be needed to treat diseases, where editing creates a neutral fitness advantage, relative to diseases where editing creates increased fitness for target cells. If editing imposes a fitness disadvantage, as would be the case for restoring function to a tumor suppressor gene in cancer cells, modified cells would be outcompeted by their diseased counterparts, causing the benefit of treatment to be low relative to editing rates. This may be overcome with supplemental therapies to increase the potency and/or fitness of the edited cells relative to the diseased counterparts.

[0873] In addition to cell fitness, the amount of gene product necessary to treat disease can also influence the minimal level of therapeutic genome editing that can treat or prevent a disease or a symptom thereof. In cases where a small change in the gene product levels can result in significant changes in clinical outcome, the minimal level of therapeutic genome editing is less relative to cases where a larger change in the gene product levels is needed to gain a clinically relevant response. In one embodiment, the minimal level of therapeutic genome editing can range from 0.1 to 1%, 1-5%, 5-10%, 10-15%, 15-20%, 20-25%, 25-30%, 30-35%, 35-40%, 40-45%. 45-50%, or 50-55%. Thus, where a small change in gene product levels can influence clinical outcomes and diseases where there is a fitness advantage for edited cells, are ideal targets for genome editing therapy, as the therapeutic modification threshold is low enough to permit a high chance of success.

[0874] The activity of NHEJ and HDR DSB repair can vary by cell type and cell state. NHEJ is not highly regulated by the cell cycle and is efficient across cell types, allowing for high levels of gene disruption in accessible target cell populations. In contrast, HDR acts primarily during S/G2 phase, and is therefore restricted to cells that are actively dividing, limiting treatments that require precise genome modifications to mitotic cells [Ciccia, A. & Elledge, S. J. Molecular cell 40, 179-204 (2010); Chapman, J. R., et al. Molecular cell 47, 497-510 (2012)].

[0875] The efficiency of correction via HDR may be controlled by the epigenetic state or sequence of the targeted locus, or the specific repair template configuration (single vs. double stranded, long vs. short homology arms) used [Hacein-Bey-Abina, S., et al. The New England journal of medicine 346, 1185-1193 (2002); Gaspar, H. B., et al. Lancet 364, 2181-2187 (2004); Beumer, K. J., et al. G3 (2013)]. The relative activity of NHEJ and HDR machineries in target cells may also affect gene correction efficiency, as these pathways may compete to resolve DSBs [Beumer, K. J., et al. Proceedings of the National Academy of Sciences of the United States of America 105, 19821-19826 (2008)]. HDR also imposes a delivery challenge not seen with NHEJ strategies, as it uses the concurrent delivery of nucleases and repair templates. Thus, these differences can be kept in mind when designing, optimizing, and/or selecting a Fanzor polypeptide based therapeutic as described in greater detail elsewhere herein.

[0876] Fanzor polypeptide-based polynucleotide modification application can include combinations of proteins, small RNA molecules, and/or repair templates, and can make, In one embodiment, delivery of these multiple parts substantially more challenging than, for example, traditional small molecule therapeutics. Two main strategies for delivery of compositions, systems, and components thereof have been developed: ex vivo and in vivo. In one embodiment of ex vivo treatments, diseased cells are removed from a subject, edited and then transplanted back into the patient. In other embodiments, cells from a healthy allogeneic donor are collected, modified using a composition or component thereof, to impart various functionalities and/or reduce immunogenicity, and administered to an allogeneic recipient in need of treatment. Ex vivo editing has the advantage of allowing the target cell population to be well defined and the specific dosage of therapeutic molecules delivered to cells to be specified. The latter consideration may be particularly important when off-target modifications are a concern, as titrating the amount of nuclease may decrease such mutations (Hsu et al., 2013). Another advantage of ex vivo approaches is the typically high editing rates that can be achieved, due to the development of efficient delivery systems for proteins and nucleic acids into cells in culture for research and gene therapy applications.

[0877] In vivo polynucleotide modification via compositions, systems, and/or components thereof involves direct delivery of the compositions, systems, and/or components thereof to cell types in their native tissues. In vivo polynucleotide modification via compositions, systems, and/or components thereof allows diseases in which the affected cell population is not amenable to ex vivo manipulation to be treated. Furthermore, delivering compositions, systems, and/or components thereof to cells in situ allows for the treatment of multiple tissue and cell types.

[0878] In one embodiment, such as those where viral vector systems are used to generate viral particles to deliver the composition and/or component thereof to a cell, the total cargo size of the composition and/or component thereof should be considered as vector systems can have limits on the size of a polynucleotide that can be expressed therefrom and/or packaged into cargo inside of a viral particle. In one embodiment, the tropism of a vector system, such as a viral vector system, should be considered as it can impact the cell type to which the composition or component thereof can be efficiently and/or effectively delivered.

[0879] When delivering a system or component thereof via a viral-based system, it can be important to consider the amount of viral particles that will be needed to achieve a therapeutic effect so as to account for the potential immune response that can be elicited by the viral particles when delivered to a subject or cell(s). When delivering a system or component thereof via a viral based system, it can be important to consider mechanisms of controlling the distribution and/or dosage of the system in vivo. Generally, to reduce the potential for off-target effects, it is optimal but not necessarily required, that the amount of the system be as close to the minimum or least effective dose. In practice this can be challenging to do.

[0880] In one embodiment, it can be important to consider the immunogenicity of the system or component thereof. In embodiments, where the immunogenicity of the system or component thereof is of concern, the immunogenicity system or component thereof can be reduced. By way of example only, the immunogenicity of the system or component thereof can be reduced using the approach set out in Tangri et al. Accordingly, directed evolution or rational design may be used to reduce the immunogenicity of the Fanzor polypeptide in the host species (human or other species).

### Therapeutic Agent Development

[0881] The compositions, systems, and components thereof described herein can be used to develop Fanzor polypeptide-based biologically active agents, such as small molecule therapeutics. Thus, described herein are methods for developing a biologically active agent that modulates a cell function and/or signaling event associated with a disease and/or disease gene. In one embodiment, the method comprises (a) contacting a test compound with a diseased cell and/or a cell containing a disease gene cell; and (b) detecting a change in a readout that is indicative of a reduction or an augmentation of a cell signaling event or other cell functionality associated with said disease or disease gene, thereby developing said biologically active agent that modulates said cell signaling event or other functionality associated with said disease gene. In one embodiment, the diseased cell is a model cell described elsewhere herein. In one embodiment, the diseased cell is a diseased cell isolated from a subject in need of treatment. In one embodiment, the test compound is a small molecule agent. In one embodiment, test compound is a small molecule agent. In one embodiment, the test compound is a biologic molecule agent.

[0882] In one embodiment, the method involves developing a therapeutic based on the composition, system, described herein. In particular embodiments, the therapeutic comprises a Fanzor polypeptide and/or a nucleic acid component with a reprogrammable spacer capable of hybridizing to a target sequence of interest. In particular embodiments, the therapeutic is a vector or vector system that can contain a) a first regulatory element operably linked to a nucleotide sequence encoding the Fanzor polypeptide; and b) a second regulatory element operably linked to one or more nucleotide sequences encoding one or more nucleic acid molecules comprising a nucleic acid component comprising a reprogrammable spacer sequence, a conserved RNA sequence; wherein components (a) and (b) are located on same or different vectors. In particular embodiments, the biologically active agent is a composition comprising a delivery system operably configured to deliver composition, system, or components thereof, and/or or one or more polynucleotide sequences, vectors, or vector systems containing or encoding said components into a cell and capable of forming a complex with the components of the composition and system herein, and wherein said complex is operable in the cell. In one embodiment, the complex can include the Fanzor polypeptide as described herein, nucleic acid component scaffold comprising the guide sequence (reprogrammable spacer sequence), and a conserved nucleotide sequence. In any such compositions, the delivery system can be a yeast system, a lipofection system, a microinjection system, a biolistic system, virosomes, liposomes, immunoliposomes, polycations, lipid: nucleic acid conjugates or artificial virions, or any other system as described herein. In particular embodiments, the delivery is via a particle, a nanoparticle, a lipid or a cell penetrating peptide (CPP).

[0883] Also described herein are methods for developing or designing a composition, system,, optionally a composition, system, based therapy or therapeutic, comprising (a) selecting for a (therapeutic) locus of interest nucleic acid component target sites, wherein said target sites have minimal sequence variation across a population, and from said selected target sites subselecting target sites, wherein a nucleic acid component directed against said target sites recognizes a minimal number of off-target sites across said population, or (b) selecting for a (therapeutic) locus of interest nucleic acid component target sites, wherein said target sites have minimal sequence variation across a population, or selecting for a (therapeutic) locus of interest nucleic acid component target sites, wherein a nucleic acid component directed against said target sites recognizes a minimal number of off-target sites across said population, and optionally estimating the number of (sub) selected target sites needed to treat or otherwise modulate or manipulate a population, and optionally validating one or more of the (sub) selected target sites for an individual subject, optionally designing one or more nucleic acid component recognizing one or more of said (sub) selected target sites.

[0884] In one embodiment, the method for developing or designing a nucleic acid component for use in a composition, system,, optionally a composition, system, based therapy or therapeutic, can include (a) selecting for a (therapeutic) locus of interest nucleic acid component target sites, wherein said target sites have minimal sequence variation across a population, and from said selected target sites subselecting target sites, wherein a nucleic acid component molecule directed against said target sites recognizes a minimal number of off-target sites across said population, or (b) selecting for a (therapeutic) locus of interest nucleic acid component molecule target sites, wherein said target sites have minimal sequence variation across a population, or selecting for a (therapeutic) locus of interest nucleic acid component molecule target sites, wherein a nucleic acid component molecule directed against said target sites recognizes a minimal number of off-target sites across said population, and optionally estimating the number of (sub) selected target sites needed to treat or otherwise modulate or manipulate a population, optionally validating one or more of the (sub) selected target sites for an individual subject, optionally designing one or more nucleic acid component molecule recognizing one or more of said (sub) selected target sites.

[0885] In one embodiment, thee method for developing or designing a composition, system, optionally a composition, system, based therapy or therapeutic in a population, can include (a) selecting for a (therapeutic) locus of interest reprogrammable spacer target sites, wherein said target sites have minimal sequence variation across a population, and from said selected target sites subselecting target sites, wherein a nucleic acid component directed against said target sites recognizes a minimal number of off-target sites across said population, or (b) selecting for a (therapeutic) locus of interest nucleic acid component reprogrammable spacer target sites, wherein said target sites have minimal sequence variation across a population, or selecting for a (therapeutic) locus of interest nucleic acid component reprogrammable spacer target sites, wherein a nucleic acid component directed against said target sites recognizes a minimal number of off-target sites across said population, and optionally estimating the number of (sub) selected target sites needed to treat or otherwise modulate or manipulate a population, optionally validating one or more of the (sub) selected target sites for an individual subject, optionally designing one or more nucleic acid component recognizing one or more of said (sub) selected target sites.

[0886] In one embodiment the method for developing or designing a nucleic acid component molecule for use in a composition, system,, optionally a composition, system, based therapy or therapeutic in a population, can include (a) selecting for a (therapeutic) locus of interest nucleic acid component molecule target sites, wherein said target sites have minimal sequence variation across a population, and from said selected target sites subselecting target sites, wherein a nucleic acid component molecule directed against said target sites recognizes a minimal number of off-target sites across said population, or (b) selecting for a (therapeutic) locus of interest nucleic acid component molecule target sites, wherein said target sites have minimal sequence variation across a population, or selecting for a (therapeutic) locus of interest nucleic acid component molecule target sites, wherein a nucleic acid component molecule directed against said target sites recognizes a minimal number of off-target sites across said population, and optionally estimating the number of (sub) selected target sites needed to treat or otherwise modulate or manipulate a population, optionally validating one or more of the (sub) selected target sites for an individual subject, optionally designing one or more nucleic acid component reprogrammable spacer recognizing one or more of said (sub) selected target sites.

[0887] In one embodiment, the method for developing or designing a composition, system, such as a composition, system, based therapy or therapeutic, optionally in a population; or for developing or designing a nucleic acid component reprogrammable spacer for use in a composition, system, optionally a composition, system, based therapy or therapeutic, optionally in a population, can include selecting a set of target sequences for one or more loci in a target population, wherein the target sequences do not contain variants occurring above a threshold allele frequency in the target population (i.e. platinum target sequences); removing from said selected (platinum) target sequences any target sequences having high frequency off-target candidates (relative to other (platinum) targets in the set) to define a final target sequence set; preparing one or more, such as a set of compositions, systems, based on the final target sequence set, optionally wherein a number of composition prepared is based (at least in part) on the size of a target population.

[0888] In one embodiment, off-target candidates/off-targets, TAMrestrictiveness, target cleavage efficiency, or effector protein specificity is identified or determined using a sequencing-based double-strand break (DSB) detection assay, such as described herein elsewhere. In one embodiment, off-target candidates/off-targets are identified or determined using a sequencing-based double-strand break (DSB) detection assay, such as described herein elsewhere. In one embodiment, off-targets, or off target candidates have at least 1, preferably 1-3, mismatches or (distal) TAMmismatches, such as 1 or more, such as 1, 2, 3, or more (distal) TAMmismatches. In one embodiment, sequencing-based DSB detection assay comprises labeling a site of a DSB with an adapter comprising a primer binding site, labeling a site of a DSB with a barcode or unique molecular identifier, or combination thereof, as described herein elsewhere.

[0889] It will be understood that the reprogrammable spacer sequence of the nucleic acid component is 100% complementary to the target site, i.e., does not comprise any mismatch with the target site. It will be further understood that “recognition” of an (off-) target site by a reprogrammable spacer presupposes composition, system, functionality, i.e., an (off-) target site is only recognized by a reprogrammable spacer RNA if binding of the reprogrammable spacer RNA to the (off-) target site leads to composition, system, activity (such as induction of single or double strand DNA cleavage, transcriptional modulation, etc.).

[0890] In one embodiment, the target sites having minimal sequence variation across a population are characterized by absence of sequence variation in at least 99%, preferably at least 99.9%, more preferably at least 99.99% of the population. In one embodiment, optimizing target location comprises selecting target sequences or loci having an absence of sequence variation in at least 99%, preferably at least 99.9%, more preferably at least 99.99% of a population. These targets are referred to herein elsewhere also as “platinum targets”. In one embodiment, said population comprises at least 1000 individuals, such as at least 5000 individuals, such as at least 10000 individuals, such as at least 50000 individuals.

[0891] In one embodiment, the off-target sites are characterized by at least one mismatch between the off-target site and the nucleic acid component. In one embodiment, the off-target sites are characterized by at most five, preferably at most four, more preferably at most three mismatches between the off-target site and the nucleic acid component. In one embodiment, the off-target sites are characterized by at least one mismatch between the off-target site and the nucleic acid component and by at most five, preferably at most four, more preferably at most three mismatches between the off-target site and the nucleic acid component.

[0892] In one embodiment, said minimal number of off-target sites across said population is determined for high-frequency haplotypes in said population. In one embodiment, said minimal number of off-target sites across said population is determined for high-frequency haplotypes of the off-target site locus in said population. In one embodiment, said minimal number of off-target sites across said population is determined for high-frequency haplotypes of the target site locus in said population. In one embodiment, the high-frequency haplotypes are characterized by occurrence in at least 0.1% of the population.

[0893] In one embodiment, the number of (sub) selected target sites needed to treat a population is estimated based on based low frequency sequence variation, such as low frequency sequence variation captured in large scale sequencing datasets. In one embodiment, the number of (sub) selected target sites needed to treat a population of a given size is estimated.

[0894] In one embodiment, the method further comprises obtaining genome sequencing data of a subject to be treated; and treating the subject with a composition, system, selected from the set of compositions, systems, wherein the composition, system, selected is based (at least in part) on the genome sequencing data of the individual. In one embodiment, the ((sub) selected) target is validated by genome sequencing, preferably whole genome sequencing.

[0895] In one embodiment, target sequences or loci as described herein are (further) selected based on optimization of one or more parameters, such as TAMtype (natural or modified), TAMnucleotide content, TAMlength, target sequence length, TAMrestrictiveness, target cleavage efficiency, and target sequence position within a gene, a locus or other genomic region. Methods of optimization are discussed in greater detail elsewhere herein.

[0896] In one embodiment, target sequences or loci as described herein are (further) selected based on optimization of one or more of target loci location, target length, target specificity, and TAMcharacteristics. As used herein, TAMcharacteristics may comprise for instance TAMsequence, TAMlength, and/or TAM GC contents. In one embodiment, optimizing TAMcharacteristics comprises optimizing nucleotide content of aTAM. In one embodiment, optimizing nucleotide content of TAMis selecting a TAMwith a motif that maximizes abundance in the one or more target loci, minimizes mutation frequency, or both. Minimizing mutation frequency can for instance be achieved by selecting TAMsequences devoid of or having low or minimal CpG.

[0897] In one embodiment, the effector protein for each composition and system, in the set of compositions, systems, is selected based on optimization of one or more parameters selected from the group consisting of; effector protein size, ability of effector protein to access regions of high chromatin accessibility, degree of uniform enzyme activity across genomic targets, epigenetic tolerance, mismatch/budge tolerance, effector protein specificity, effector protein stability or half-life, effector protein immunogenicity or toxicity. Methods of optimization are discussed in greater detail elsewhere herein.

### Exemplary Applications in Plants and Fungi

[0898] The compositions, systems, and methods described herein can be used to perform gene or genome interrogation or editing or manipulation in plants and fungi. For example, the applications include investigation and/or selection and/or interrogations and/or comparison and/or manipulations and/or transformation of plant genes or genomes; e.g., to create, identify, develop, optimize, or confer trait(s) or characteristic(s) to plant(s) or to transform a plant or fugus genome. There can accordingly be improved production of plants, new plants with new combinations of traits or characteristics or new plants with enhanced traits. The compositions, systems, and methods can be used with regard to plants in Site-Directed Integration (SDI) or Gene Editing (GE) or any Near Reverse Breeding (NRB) or Reverse Breeding (RB) techniques.

[0899] The compositions, systems, and methods herein may be used to confer desired traits (e.g., enhanced nutritional quality, increased resistance to diseases and resistance to biotic and abiotic stress, and increased production of commercially valuable plant products or heterologous compounds) on essentially any plants and fungi, and their cells and tissues. The compositions, systems, and methods may be used to modify endogenous genes or to modify their expression without the permanent introduction into the genome of any foreign gene.

[0900] In one embodiment, compositions, systems, and methods may be used in genome editing in plants or where RNAi or similar genome editing techniques have been used previously; see, e.g., Nekrasov, “Plant genome editing made easy: targeted mutagenesis in model and crop plants using the CRISPR-Cas system,” Plant Methods 2013, 9:39 (doi: 10.1186/1746-4811-9-39); Brooks, “Efficient gene editing in tomato in the first generation using the CRISPR-Cas9 system,” Plant Physiology September 2014 pp 114247577; Shan, “Targeted genome modification of crop plants using a CRISPR-Cas system,” Nature Biotechnology 31, 686-688 (2013); Feng, “Efficient genome editing in plants using a CRISPR/Cas system,” Cell Research (2013) 23:1229-1232. doi: 10.1038/cr.2013.114; published online 20 Aug. 2013; Xie, “RNA-guided genome editing in plants using a CRISPR-Cas system,” Mol Plant. 2013 November;6 (6): 1975-83. doi: 10.1093/mp/sst119. Epub 2013 Aug. 17; Xu, “Gene targeting using the Agrobacterium tumefaciens-mediated CRISPR-Cas system in rice,” Rice 2014, 7:5 (2014), Zhou et al., “Exploiting SNPs for biallelic CRISPR mutations in the outcrossing woody perennial Populus reveals 4-coumarate: CoA ligase specificity and Redundancy,” New Phytologist (2015) (Forum) 1-4 (available online only at www.newphytologist.com); Caliando et al, “Targeted DNA degradation using a CRISPR device stably carried in the host genome, NATURE COMMUNICATIONS 6:6989, DOI: 10.1038/ncomms7989, www.nature.com/naturecommunications DOI: 10.1038/ncomms7989; U.S. Pat. No. 6,603,061-Agrobacterium-Mediated Plant Transformation Method; U.S. Pat. No. 7,868,149-Plant Genome Sequences and Uses Thereof and US 2009/0100536-Transgenic Plants with Enhanced Agronomic Traits, Morrell et al “Crop genomics: advances and applications,” Nat Rev Genet. 2011 Dec. 29;13 (2): 85-96, all the contents and disclosure of each of which are herein incorporated by reference in their entirety. Aspects of utilizing the compositions, systems, and methods may be analogous to the use of the composition in plants, and mention is made of the University of Arizona website “CRISPR-PLANT” (genome.arizona.edu/crispr/) (supported by Penn State and AGI) for directions to nucleic acid modification in plant systems.

[0901] The compositions, systems, and methods may also be used on protoplasts. A “protoplast” refers to a plant cell that has had its protective cell wall completely or partially removed using, for example, mechanical or enzymatic means resulting in an intact biochemical competent unit of living plant that can reform their cell wall, proliferate and regenerate grow into a whole plant under proper growing conditions.

[0902] The compositions, systems, and methods may be used for screening genes (e.g., endogenous, mutations) of interest. In some examples, genes of interest include those encoding enzymes involved in the production of a component of added nutritional value or generally genes affecting agronomic traits of interest, across species, phyla, and plant kingdom. By selectively targeting e.g., genes encoding enzymes of metabolic pathways, the genes responsible for certain nutritional aspects of a plant can be identified. Similarly, by selectively targeting genes which may affect a desirable agronomic trait, the relevant genes can be identified. Accordingly, the present invention encompasses screening methods for genes encoding enzymes involved in the production of compounds with a particular nutritional value and/or agronomic traits.

[0903] It is also understood that reference herein to animal cells may also apply, mutatis mutandis, to plant or fungal cells unless otherwise apparent; and the enzymes herein having reduced off-target effects and systems employing such enzymes can be used in plant applications, including those mentioned herein.

[0904] In some cases, nucleic acids introduced to plants and fungi may be codon optimized for expression in the plants and fungi. Methods of codon optimization include those described in Kwon K C, et al., Codon Optimization to Enhance Expression Yields Insights into Chloroplast Translation, Plant Physiol. 2016 September; 172 (1): 62-77.

[0905] The components (e.g., Fanzor polypeptide) in the compositions and systems may further comprise one or more functional domains described herein. In some examples, the functional domains may be an exonuclease. Such exonuclease may increase the efficiency of the Fanzor polypeptide′ function, e.g., mutagenesis efficiency. An example of the functional domain is T Trex2, as described in Weiss et al., www.biorxiv.org/content/10.1101/2020.04.11.037572v1, doi.org/10.1101/2020.04.11.037572. doi:

### Examples of Plants

[0906] The compositions, systems, and methods herein can be used to confer desired traits on essentially any plant. A wide variety of plants and plant cell systems may be engineered for the desired physiological and agronomic characteristics. In general, the term “plant” relates to any various photosynthetic, eukaryotic, unicellular or multicellular organism of the kingdom Plantae characteristically growing by cell division, containing chloroplasts, and having cell walls comprised of cellulose. The term plant encompasses monocotyledonous and dicotyledonous plants.

[0907] The compositions, systems, and methods may be used over a broad range of plants, such as for example with dicotyledonous plants belonging to the orders Magniolales, Illiciales, Laurales, Piperales, Aristochiales, Nymphaeales, Ranunculales, Papeverales, Sarraceniaceae, Trochodendrales, Hamamelidales, Eucomiales, Leitneriales, Myricales, Fagales, Casuarinales, Caryophyllales, Batales, Polygonales, Plumbaginales, Dilleniales, Theales, Malvales, Urticales, Lecythidales, Violales, Salicales, Capparales, Ericales, Diapensales, Ebenales, Primulales, Rosales, Fabales, Podostemales, Haloragales, Myrtales, Cornales, Proteales, San tales, Rafflesiales, Celastrales, Euphorbiales, Rhamnales, Sapindales, Juglandales, Geraniales, Polygalales, Umbellales, Gentianales, Polemoniales, Lamiales, Plantaginales, Scrophulariales, Campanulales, Rubiales, Dipsacales, and Asterales; monocotyledonous plants such as those belonging to the orders Alismatales, Hydrocharitales, Najadales, Triuridales, Commelinales, Eriocaulales, Restionales, Poales, Juncales, Cyperales, Typhales, Bromeliales, Zingiberales, Arecales, Cyclanthales, Pandanales, Arales, Lilliales, and Orchid ales, or with plants belonging to Gymnospermae, e.g., those belonging to the orders Pinales, Ginkgoales, Cycadales, Araucariales, Cupressales and Gnetales.

[0908] The compositions, systems, and methods herein can be used over a broad range of plant species, included in the non-limitative list of dicot, monocot or gymnosperm genera hereunder: Atropa, Alseodaphne, Anacardium, Arachis, Beilschmiedia, Brassica, Carthamus, Cocculus, Croton, Cucumis, Citrus, Citrullus, Capsicum, Catharanthus, Cocos, Coffea, Cucurbita, Daucus, Duguetia, Eschscholzia, Ficus, Fragaria, Glaucium, Glycine, Gossypium, Helianthus, Hevea, Hyoscyamus, Lactuca, Landolphia, Linum, Litsea, Lycopersicon, Lupinus, Manihot, Majorana, Malus, Medicago, Nicotiana, Olea, Parthenium, Papaver, Persea, Phaseolus, Pistacia, Pisum, Pyrus, Prunus, Raphanus, Ricinus, Senecio, Sinomenium, Stephania, Sinapis, Solanum, Theobroma, Trifolium, Trigonella, Vicia, Vinca, Vilis, and Vigna, and the genera Allium, Andropogon, Aragrostis, Asparagus, Avena, Cynodon, Elaeis, Festuca, Festulolium, Heterocallis, Hordeum, Lemna, Lolium, Musa, Oryza, Panicum, Pannesetum, Phleum, Poa, Secale, Sorghum, Triticum, Zea, Abies, Cunninghamia, Ephedra, Picea, Pinus, and Pseudotsuga.

[0909] In one embodiment, target plants and plant cells for engineering include those monocotyledonous and dicotyledonous plants, such as crops including grain crops (e.g., wheat, maize, rice, millet, barley), fruit crops (e.g., tomato, apple, pear, strawberry, orange), forage crops (e.g., alfalfa), root vegetable crops (e.g., carrot, potato, sugar beets, yam), leafy vegetable crops (e.g., lettuce, spinach); flowering plants (e.g., petunia, rose, chrysanthemum), conifers and pine trees (e.g., pine fir, spruce); plants used in phytoremediation (e.g., heavy metal accumulating plants); oil crops (e.g., sunflower, rape seed) and plants used for experimental purposes (e.g., Arabidopsis). Specifically, the plants are intended to comprise without limitation angiosperm and gymnosperm plants such as acacia, alfalfa, amaranth, apple, apricot, artichoke, ash tree, asparagus, avocado, banana, barley, beans, beet, birch, beech, blackberry, blueberry, broccoli, Brussel's sprouts, cabbage, canola, cantaloupe, carrot, cassava, cauliflower, cedar, a cereal, celery, chestnut, cherry, Chinese cabbage, citrus, clementine, clover, coffee, corn, cotton, cowpea, cucumber, cypress, eggplant, elm, endive, eucalyptus, fennel, figs, fir, geranium, grape, grapefruit, groundnuts, ground cherry, gum hemlock, hickory, kale, kiwifruit, kohlrabi, larch, lettuce, leek, lemon, lime, locust, pine, maidenhair, maize, mango, maple, melon, millet, mushroom, mustard, nuts, oak, oats, oil palm, okra, onion, orange, an ornamental plant or flower or tree, papaya, palm, parsley, parsnip, pea, peach, peanut, pear, peat, pepper, persimmon, pigeon pea, pine, pineapple, plantain, plum, pomegranate, potato, pumpkin, radicchio, radish, rapeseed, raspberry, rice, rye, sorghum, safflower, sallow, soybean, spinach, spruce, squash, strawberry, sugar beet, sugarcane, sunflower, sweet potato, sweet corn, tangerine, tea, tobacco, tomato, trees, triticale, turf grasses, turnips, vine, walnut, watercress, watermelon, wheat, yams, yew, and zucchini.

[0910] The term plant also encompasses Algae, which are mainly photoautotrophs unified primarily by their lack of roots, leaves and other organs that characterize higher plants. The compositions, systems, and methods can be used over a broad range of “algae” or “algae cells.”

[0911] Examples of algae include eukaryotic phyla, including the Rhodophyta (red algae), Chlorophyta (green algae), Phaeophyta (brown algae), Bacillariophyta (diatoms), Eustigmatophyta and dinoflagellates as well as the prokaryotic phylum Cyanobacteria (blue-green algae). Examples of algae species include those of Amphora , Anabaena, Anikstrodesmis, Botryococcus, Chaetoceros, Chlamydomonas, Chlorella, Chlorococcum, Cyclotella, Cylindrotheca, Dunaliella, Emiliana, Euglena, Hematococcus, Isochrysis, Monochrysis, Monoraphidium, Nannochloris, Nannnochloropsis, Navicula, Nephrochloris, Nephroselmis, Nitzschia, Nodularia, Nostoc, Oochromonas, Oocystis, Oscillartoria, Pavlova, Phaeodactylum, Playtmonas, Pleurochrysis, Porhyra, Pseudoanabaena, Pyramimonas, Stichococcus, Synechococcus, Synechocystis, Tetraselmis, Thalassiosira, and Trichodesmium. Plant promoters

[0912] In order to ensure appropriate expression in a plant cell, the components of the components and systems herein may be placed under control of a plant promoter. A plant promoter is a promoter operable in plant cells. A plant promoter is capable of initiating transcription in plant cells, whether or not its origin is a plant cell. The use of different types of promoters is envisaged.

[0913] In some examples, the plant promoter is a constitutive plant promoter, which is a promoter that is able to express the open reading frame (ORF) that it controls in all or nearly all of the plant tissues during all or nearly all developmental stages of the plant (referred to as “constitutive expression”). One example of a constitutive promoter is the cauliflower mosaic virus 35S promoter. In some examples, the plant promoter is a regulated promoter, which directs gene expression not constitutively, but in a temporally- and/or spatially-regulated manner, and includes tissue-specific, tissue-preferred and inducible promoters. Different promoters may direct the expression of a gene in different tissues or cell types, or at different stages of development, or in response to different environmental conditions. In some examples, the plant promoter is a tissue-preferred promoters, which can be utilized to target enhanced expression in certain cell types within a particular plant tissue, for instance vascular cells in leaves or roots or in specific cells of the seed.

[0914] Exemplary plant promoters include those obtained from plants, plant viruses, and bacteria such as Agrobacterium or Rhizobium which comprise genes expressed in plant cells. Additional examples of promoters include those described in Kawamata et al., (1997) Plant Cell Physiol 38:792-803; Yamamoto et al., (1997) Plant J 12:255-65; Hire et al, (1992) Plant Mol Biol 20:207-18, Kuster et al, (1995) Plant Mol Biol 29:759-72, and Capana et al., (1994) Plant Mol Biol 25:681-91.

[0915] In some examples, a plant promoter may be an inducible promoter, which is inducible and allows for spatiotemporal control of gene editing or gene expression may use a form of energy. The form of energy may include sound energy, electromagnetic radiation, chemical energy and/or thermal energy. Examples of inducible systems include tetracycline inducible promoters (Tet-On or Tet-Off), small molecule two-hybrid transcription activations systems (FKBP, ABA, etc.), or light inducible systems (Phytochrome, LOV domains, or cryptochrome), such as a Light Inducible Transcriptional Effector (LITE) that direct changes in transcriptional activity in a sequence-specific manner. In a particular example, of the components of a light inducible system include a Fanzor polypeptide, a light-responsive cytochrome heterodimer (e.g., from Arabidopsis thaliana), and a transcriptional activation/repression domain.

[0916] In some examples, the promoter may be a chemical-regulated promotor (where the application of an exogenous chemical induces gene expression) or a chemical-repressible promoter (where application of the chemical represses gene expression). Examples of chemical-inducible promoters include maize In2-2 promoter (activated by benzene sulfonamide herbicide safeners), the maize GST promoter (activated by hydrophobic electrophilic compounds used as pre-emergent herbicides), the tobacco PR-1 a promoter (activated by salicylic acid), promoters regulated by antibiotics (such as tetracycline-inducible and tetracycline-repressible promoters).

[0917] Vectors and other regulatory polynucleotides, tags, reporters, and/or the like are described elsewhere herein and, in some embodiments, can be utilized in and/or to produce a modified plant described herein.

### Stable Integration in the Genome of Plants

[0918] In one embodiment, polynucleotides encoding the components of the compositions and systems may be introduced for stable integration into the genome of a plant cell. In some cases, vectors or expression systems may be used for such integration. The design of the vector or the expression system can be adjusted depending on for when, where and under what conditions the nucleic acid component molecule and/or the Fanzor polypeptide gene are expressed. In some cases, the polynucleotides may be integrated into an organelle of a plant, such as a plastid, mitochondrion or a chloroplast. The elements of the expression system may be on one or more expression constructs which are either circular such as a plasmid or transformation vector, or non-circular such as linear double stranded DNA.

[0919] In one embodiment, the method of integration generally comprises the steps of selecting a suitable host cell or host tissue, introducing the construct(s) into the host cell or host tissue, and regenerating plant cells or plants therefrom. In some examples, the expression system for stable integration into the genome of a plant cell may contain one or more of the following elements: a promoter element that can be used to express the RNA and/or Fanzor polypeptide in a plant cell; a 5′ untranslated region to enhance expression; an intron element to further enhance expression in certain cells, such as monocot cells; a multiple-cloning site to provide convenient restriction sites for inserting the nucleic acid component molecule and/or the Fanzor polypeptide gene sequences and other desired elements; and a 3′ untranslated region to provide for efficient termination of the expressed transcript.

### Transient Expression in Plants

[0920] In one embodiment, the components of the compositions and systems may be transiently expressed in the plant cell. In some examples, the compositions and systems may modify a target nucleic acid only when both the nucleic acid component molecule and the Fanzor polypeptide are present in a cell, such that genomic modification can further be controlled. As the expression of the Fanzor polypeptide is transient, plants regenerated from such plant cells typically contain no foreign DNA. In certain examples, the Fanzor polypeptide is stably expressed and the nucleic acid component molecule sequence is transiently expressed.

[0921] DNA and/or RNA (e.g., mRNA) may be introduced to plant cells for transient expression. In such cases, the introduced nucleic acid may be provided in sufficient quantity to modify the cell but do not persist after a contemplated period of time has passed or after one or more cell divisions.

[0922] The transient expression may be achieved using suitable vectors. Exemplary vectors that may be used for transient expression include a pEAQ vector (may be tailored for Agrobacterium-mediated transient expression) and Cabbage Leaf Curl virus (CaLCuV), and vectors described in Sainsbury F. et al., Plant Biotechnol J. 2009 September;7 (7): 682-93; and Yin K et al., Scientific Reports volume 5, Article number: 14926 (2015).

[0923] Combinations of the different methods described above are also envisaged.

Translocation to and/or Expression in Specific Plant Organelles

[0924] The compositions and systems herein may comprise elements for translocation to and/or expression in a specific plant organelle.

### Chloroplast Targeting

[0925] In one embodiment, it is envisaged that the compositions and systems are used to specifically modify chloroplast genes or to ensure expression in the chloroplast. The compositions and systems (e.g., Fanzor polypeptide, nucleic acid components, or their encoding polynucleotides) may be transformed, compartmentalized, and/or targeted to the chloroplast. In an example, the introduction of genetic modifications in the plastid genome can reduce biosafety issues such as gene flow through pollen.

[0926] Examples of methods of chloroplast transformation include Particle bombardment, PEG treatment, and microinjection, and the translocation of transformation cassettes from the nuclear genome to the plastid. In some examples, targeting of chloroplasts may be achieved by incorporating in chloroplast localization sequence, and/or the expression construct a sequence encoding a chloroplast transit peptide (CTP) or plastid transit peptide, operably linked to the 5′ region of the sequence encoding the components of the compositions and systems. Additional examples of transforming, targeting and localization of chloroplasts include those described in WO2010061186, Protein Transport into Chloroplasts, 2010, Annual Review of Plant Biology, Vol. 61:157-180, and US20040142476, which are incorporated by reference herein in their entireties.

### Modification of Polyploid Plants

[0927] The compositions, systems, and methods may be used to modify polyploid plants. Polyploid plants carry duplicate copies of their genomes (e.g., as many as six, such as in wheat). In some cases, the compositions, systems, and methods can be multiplexed to affect all copies of a gene, or to target dozens of genes at once. For instance, the compositions, systems, and methods may be used to simultaneously ensure a loss of function mutation in different genes responsible for suppressing defenses against a disease. The modification may be simultaneous suppression the expression of the TaMLO-A1, TaMLO-β1 and TaMLO-DI nucleic acid sequence in a wheat plant cell and regenerating a wheat plant therefrom, in order to ensure that the wheat plant is resistant to powdery mildew (e.g., as described in WO2015109752).

### Plant Cultures and Regeneration

[0928] In one embodiment, the modified plants or plant cells may be cultured to regenerate a whole plant which possesses the transformed or modified genotype and thus the desired phenotype. Examples of regeneration techniques include those relying on manipulation of certain phytohormones in a tissue culture growth medium, relying on a biocide and/or herbicide marker which has been introduced together with the desired nucleotide sequences, obtaining from cultured protoplasts, plant callus, explants, organs, pollens, embryos or parts thereof.

### Exemplary Applications in Plants

[0929] The compositions, systems, and methods may be used to generate genetic variation(s) in a plant (e.g., crop) of interest. One or more, e.g., a library of, nucleic acid components targeting one or more locations in a genome may be provided and introduced into plant cells together with the Fanzor polypeptide. For example, a collection of genome-scale point mutations and gene knock-outs can be generated. In some examples, the compositions, systems, and methods may be used to generate a plant part or plant from the cells so obtained and screening the cells for a trait of interest. The target genes may include both coding and non-coding regions. In some cases, the trait is stress tolerant and the method is a method for the generation of stress-tolerant crop varieties.

[0930] In one embodiment, the compositions, systems, and methods are used to modify endogenous genes or to modify their expression. The expression of the components may induce targeted modification of the genome, either by direct activity of the Fanzor polypeptide and optionally introduction of recombination template DNA, or by modification of genes targeted. The different strategies described herein above allow Fanzor polypeptide-mediated targeted genome editing without requiring the introduction of the components into the plant genome.

[0931] In some cases, the modification may be performed without the permanent introduction into the genome of the plant of any foreign gene, including those encoding components of the composition herein, so as to avoid the presence of foreign DNA in the genome of the plant. This can be of interest as the regulatory requirements for non-transgenic plants are less rigorous. Components which are transiently introduced into the plant cell are typically removed upon crossing.

[0932] For example, the modification may be performed by transient expression of the components of the compositions and systems. The transient expression may be performed by delivering the components of the compositions and systems with viral vectors, delivery into protoplasts, with the aid of particulate molecules such as nanoparticles or CPPs.

[0933] Generation of plants with desired traits

[0934] The compositions, systems, and methods herein may be used to introduce desired traits to plants. The approaches include introduction of one or more foreign genes to confer a trait of interest, editing or modulating endogenous genes to confer a trait of interest.

### Agronomic Traits

[0935] In one embodiment, crop plants can be improved by influencing specific plant traits. Examples of the traits include improved agronomic traits such as herbicide resistance, disease resistance, abiotic stress tolerance, high yield, and superior quality, pesticide-resistance, disease resistance, insect and nematode resistance, resistance against parasitic weeds, drought tolerance, nutritional value, stress tolerance, self-pollination voidance, forage digestibility biomass, and grain yield.

[0936] In one embodiment, genes that confer resistance to pests or diseases may be introduced to plants. In cases there are endogenous genes that confer such resistance in a plants, their expression and function may be enhanced (e.g., by introducing extra copies, modifications that enhance expression and/or activity).

[0937] Examples of genes that confer resistance include plant disease resistance genes (e.g., Cf-9, Pto, RSP2, SIDMR6-1), genes conferring resistance to a pest (e.g., those described in WO96/30517), Bacillus thuringiensis proteins, lectins, Vitamin-binding proteins (e.g., avidin), enzyme inhibitors (e.g., protease or proteinase inhibitors or amylase inhibitors), insect-specific hormones or pheromones (e.g., ecdysteroid or a juvenile hormone, variant thereof, a mimetic based thereon, or an antagonist or agonist thereof) or genes involved in the production and regulation of such hormone and pheromones, insect-specific peptides or neuropeptide, Insect-specific venom (e.g., produced by a snake, a wasp, etc., or analog thereof), Enzymes responsible for a hyperaccumulation of a monoterpene, a sesquiterpene, a steroid, hydroxamic acid, a phenylpropanoid derivative or another nonprotein molecule with insecticidal activity, Enzymes involved in the modification of biologically active molecule (e.g., a glycolytic enzyme, a proteolytic enzyme, a lipolytic enzyme, a nuclease, a cyclase, a transaminase, an esterase, a hydrolase, a phosphatase, a kinase, a phosphorylase, a polymerase, an elastase, a chitinase and a glucanase, whether natural or synthetic), molecules that stimulates signal transduction, Viral-invasive proteins or a complex toxin derived therefrom, Developmental-arrestive proteins produced in nature by a pathogen or a parasite, a developmental-arrestive protein produced in nature by a plant, or any combination thereof.

[0938] The compositions, systems, and methods may be used to identify, screen, introduce or remove mutations or sequences lead to genetic variability that give rise to susceptibility to certain pathogens, e.g., host specific pathogens. Such approach may generate plants that are non-host resistance, e.g., the host and pathogen are incompatible or there can be partial resistance against all races of a pathogen, typically controlled by many genes and/or also complete resistance to some races of a pathogen but not to other races.

[0939] In one embodiment, the compositions, systems, and methods may be used to modify genes involved in plant diseases. Such genes may be removed, inactivated, or otherwise regulated or modified. Examples of plant diseases include those described in [0045]-[0080] of US20140213619A1, which is incorporated by reference herein in its entirety.

[0940] In one embodiment, genes that confer resistance to herbicides may be introduced to plants. Examples of genes that confer resistance to herbicides include genes conferring resistance to herbicides that inhibit the growing point or meristem, such as an imidazolinone or a sulfonylurea, genes conferring glyphosate tolerance (e.g., resistance conferred by, e.g., mutant 5-enolpyruvylshikimate-3-phosphate synthase genes, aroA genes and glyphosate acetyl transferase (GAT) genes, respectively), or resistance to other phosphono compounds such as by glufosinate (phosphinothricin acetyl transferase (PAT) genes from Streptomyces species, including Streptomyces hygroscopicus and Streptomyces viridichromogenes), and to pyridinoxy or phenoxy proprionic acids and cyclohexones by ACCase inhibitor-encoding genes), genes conferring resistance to herbicides that inhibit photosynthesis (such as a triazine (psbA and gs+ genes) or a benzonitrile (nitrilase gene), and glutathione S-transferase), genes encoding enzymes detoxifying the herbicide or a mutant glutamine synthase enzyme that is resistant to inhibition, genes encoding a detoxifying enzyme is an enzyme encoding a phosphinothricin acetyltransferase (such as the bar or pat protein from Streptomyces species), genes encoding hydroxyphenylpyruvatedioxygenases (HPPD) inhibitors, e.g., naturally occurring HPPD resistant enzymes, and genes encoding a mutated or chimeric HPPD enzyme.

[0941] In one embodiment, genes involved in Abiotic stress tolerance may be introduced to plants. Examples of genes include those capable of reducing the expression and/or the activity of poly(ADP-ribose) polymerase (PARP) gene, transgenes capable of reducing the expression and/or the activity of the PARG encoding genes, genes coding for a plant-functional enzyme of the nicotineamide adenine dinucleotide salvage synthesis pathway including nicotinamidase, nicotinate phosphoribosyltransferase, nicotinic acid mononucleotide adenyl transferase, nicotinamide adenine dinucleotide synthetase or nicotine amide phosphorybosyltransferase, enzymes involved in carbohydrate biosynthesis, enzymes involved in the production of polyfructose (e.g., the inulin and levan-type), the production of alpha-1,6 branched alpha-1,4-glucans, the production of alternan, the production of hyaluronan.

[0942] In one embodiment, genes that improve drought resistance may be introduced to plants. Examples of genes Ubiquitin Protein Ligase protein (UPL) protein (UPL3), DR02, DR03, ABC transporter, and DREB1A.

### Nutritionally Improved Plants

[0943] In one embodiment, the compositions, systems, and methods may be used to produce nutritionally improved plants. In some examples, such plants may provide functional foods, e.g., a modified food or food ingredient that may provide a health benefit beyond the traditional nutrients it contains. In certain examples, such plants may provide nutraceuticals foods, e.g., substances that may be considered a food or part of a food and provides health benefits, including the prevention and treatment of disease. The nutraceutical foods may be useful in the prevention and/or treatment of diseases in animals and humans, e.g., cancers, diabetes, cardiovascular disease, and hypertension.

[0944] An improved plant may naturally produce one or more desired compounds and the modification may enhance the level or activity or quality of the compounds. In some cases, the improved plant may not naturally produce the compound(s), while the modification enables the plant to produce such compound(s). In some cases, the compositions, systems, and methods used to modify the endogenous synthesis of these compounds indirectly, e.g. by modifying one or more transcription factors that controls the metabolism of this compound.

[0945] Examples of nutritionally improved plants include plants comprising modified protein quality, content and/or amino acid composition, essential amino acid contents, oils and fatty acids, carbohydrates, vitamins and carotenoids, functional secondary metabolites, and minerals. In some examples, the improved plants may comprise or produce compounds with health benefits. Examples of nutritionally improved plants include those described in Newell-McGloughlin, Plant Physiology, July 2008, Vol. 147, pp. 939-953.

[0946] Examples of compounds that can be produced include carotenoids (e.g., a-Carotene or β-Carotene), lutein, lycopene, Zeaxanthin, Dietary fiber (e.g., insoluble fibers, β-Glucan, soluble fibers, fatty acids (e.g., ω-3 fatty acids, Conjugated linoleic acid, GLA,), Flavonoids (e.g., Hydroxycinnamates, flavonols, catechins and tannins), Glucosinolates, indoles, isothiocyanates (e.g., Sulforaphane), Phenolics (e.g., stilbenes, caffeic acid and ferulic acid, epicatechin), Plant stanols/sterols, Fructans, inulins, fructo-oligosaccharides, Saponins, Soybean proteins, Phytoestrogens (e.g., isoflavones, lignans), Sulfides and thiols such as diallyl sulphide, Allyl methyl trisulfide, dithiolthiones, Tannins, such as proanthocyanidins, or any combination thereof.

[0947] The compositions, systems, and methods may also be used to modify protein/starch functionality, shelf life, taste/aesthetics, fiber quality, and allergen, antinutrient, and toxin reduction traits.

[0948] Examples of genes and nucleic acids that can be modified to introduce the traits include stearyl-ACP desaturase, DNA associated with the single allele which may be responsible for maize mutants characterized by low levels of phytic acid, If RAP2.2 and its interacting partner SINAT2, Tf Dof1, and DOF Tf AtDof1.1 (OBP2).

### Regulation of Fruit-Ripening

[0949] The compositions, systems, and methods may be used to regulate ripening of fruits. Ripening is a normal phase in the maturation process of fruits and vegetables. Only a few days after it starts it may render a fruit or vegetable inedible, which can bring significant losses to both farmers and consumers.

[0950] In one embodiment, the compositions, systems, and methods are used to reduce ethylene production. In some examples, the compositions, systems, and methods may be used to suppress the expression and/or activity of ACC synthase, insert a ACC deaminase gene or a functional fragment thereof, insert a SAM hydrolase gene or functional fragment thereof, suppress ACC oxidase gene expression

[0951] Alternatively or additionally, the compositions, systems, and methods may be used to modify ethylene receptors (e.g., suppressing ETR1) and/or Polygalacturonase (PG). Suppression of a gene may be achieved by introducing a mutation, an antisense sequence, and/or a truncated copy of the gene to the genome.

### Increasing Storage Life of Plants

[0952] In one embodiment, the compositions, systems, and methods are used to modify genes involved in the production of compounds which affect storage life of the plant or plant part. The modification may be in a gene that prevents the accumulation of reducing sugars in potato tubers. Upon high-temperature processing, these reducing sugars react with free amino acids, resulting in brown, bitter-tasting products and elevated levels of acrylamide, which is a potential carcinogen. In particular embodiments, the methods provided herein are used to reduce or inhibit expression of the vacuolar invertase gene (VInv), which encodes a protein that breaks down sucrose to glucose and fructose.

### Reducing Allergens in Plants

[0953] In one embodiment, the compositions, systems, and methods are used to generate plants with a reduced level of allergens, making them safer for consumers. To this end, the compositions, systems, and methods may be used to identify and modify (e.g., suppress) one or more genes responsible for the production of plant allergens. Examples of such genes include Lol p5, as well as those in peanuts, soybeans, lentils, peas, lupin, green beans, mung beans, such as those described in Nicolaou et al., Current Opinion in Allergy and Clinical Immunology 2011; 11 (3): 222), which is incorporated by reference herein in its entirety.

### Generation of Male Sterile Plants

[0954] The compositions, systems, and methods may be used to generate male sterile plants. Hybrid plants typically have advantageous agronomic traits compared to inbred plants. However, for self-pollinating plants, the generation of hybrids can be challenging. In different plant types (e.g., maize and rice), genes have been identified which are important for plant fertility, more particularly male fertility. Plants that are as such genetically altered can be used in hybrid breeding programs.

[0955] The compositions, systems, and methods may be used to modify genes involved male fertility, e.g., inactivating (such as by introducing mutations to) genes required for male fertility. Examples of the genes involved in male fertility include cytochrome P450-like gene (MS26) or the meganuclease gene (MS45), and those described in Wan X et al., Mol Plant. 2019 Mar. 4;12 (3): 321-342; and Kim Y J, et al., Trends Plant Sci. 2018 January;23 (1): 53-65.

### Increasing the Fertility Stage in Plants

[0956] In one embodiment, the compositions, systems, and methods may be used to prolong the fertility stage of a plant such as of a rice. For instance, a rice fertility stage gene such as Ehd3 can be targeted in order to generate a mutation in the gene and plantlets can be selected for a prolonged regeneration plant fertility stage.

### Production of Early Yield of Products

[0957] In one embodiment, the compositions, systems, and methods may be used to produce early yield of the product. For example, flowering process may be modulated, e.g., by mutating flowering repressor gene such as SP5G. Examples of such approaches include those described in Soyk S, et al., Nat Genet. 2017 January;49 (1): 162-168.

### Oil and Biofuel Production

[0958] The compositions, systems, and methods may be used to generate plants for oil and biofuel production. Biofuels include fuels made from plant and plant-derived resources. Biofuels may be extracted from organic matter whose energy has been obtained through a process of carbon fixation or are made through the use or conversion of biomass. This biomass can be used directly for biofuels or can be converted to convenient energy containing substances by thermal conversion, chemical conversion, and biochemical conversion. This biomass conversion can result in fuel in solid, liquid, or gas form. Biofuels include bioethanol and biodiesel. Bioethanol can be produced by the sugar fermentation process of cellulose (starch), which may be derived from maize and sugar cane. Biodiesel can be produced from oil crops such as rapeseed, palm, and soybean. Biofuels can be used for transportation.

### Generation of Plants for Production of Vegetable Oils and Biofuels

[0959] The compositions, systems, and methods may be used to generate algae (e.g., diatom) and other plants (e.g., grapes) that express or overexpress high levels of oil or biofuels.

[0960] In some cases, the compositions, systems, and methods may be used to modify genes involved in the modification of the quantity of lipids and/or the quality of the lipids. Examples of such genes include those involved in the pathways of fatty acid synthesis, e.g., acetyl-CoA carboxylase, fatty acid synthase, 3-ketoacyl_acyl-carrier protein synthase III, glycerol-3-phospate deshydrogenase (G3PDH), Enoyl-acyl carrier protein reductase (Enoyl-ACP-reductase), glycerol-3-phosphate acyltransferase, lysophosphatidic acyl transferase or diacylglycerol acyltransferase, phospholipid: diacylglycerol acyltransferase, phoshatidate phosphatase, fatty acid thioesterase such as palmitoyi protein thioesterase, or malic enzyme activities.

[0961] In further embodiments, it is envisaged to generate diatoms that have increased lipid accumulation. This can be achieved by targeting genes that decrease lipid catabolization. Examples of genes include those involved in the activation of triacylglycerol and free fatty acids, β-oxidation of fatty acids, such as genes of acyl-CoA synthetase, 3-ketoacyl-CoA thiolase, acyl-CoA oxidase activity and phosphoglucomutase.

[0962] In some examples, algae may be modified for production of oil and biofuels, including fatty acids (e.g., fatty esters such as acid methyl esters (FAME) and fatty acid ethyl esters (FAEE)). Examples of methods of modifying microalgae include those described in Stovicek et al. Metab. Eng. Comm., 2015; 2:1; U.S. Pat. No. 8,945,839; and International Patent Publication No. WO 2015/086795.

[0963] In some examples, one or more genes may be introduced (e.g., overexpressed) to the plants (e.g., algae) to produce oils and biofuels (e.g., fatty acids) from a carbon source (e.g., alcohol). Examples of the genes include genes encoding acyl-CoA synthases, ester synthases, thioesterases (e.g., tesA, ′tesA, tesB, fatB, fatB2, fatB3, fatAl, or fatA), acyl-CoA synthases (e.g., fadD, JadK, BH3103, pfl-4354, EAV15023, fadD1, fadD2, RPC_4074,fadDD35, fadDD22, faa39), ester synthases (e.g., synthase/acyl-CoA: diacylglycerl acyltransferase from Simmondsia chinensis, Acinetobacter sp. ADP, Alcanivorax borkumensis, Pseudomonas aeruginosa, Fundibacter jadensis, Arabidopsis thaliana, or Alkaligenes eutrophus, or variants thereof).

[0964] Additionally or alternatively, one or more genes in the plants (e.g., algae) may be inactivated (e.g., expression of the genes is decreased). For examples, one or more mutations may be introduced to the genes. Examples of such genes include genes encoding acyl-CoA dehydrogenases (e.g., fade), outer membrane protein receptors, and transcriptional regulator (e.g., repressor) of fatty acid biosynthesis (e.g., fabR), pyruvate formate lyases (e.g., pflB), lactate dehydrogenases (e.g., IdhA).

### Organic Acid Production

[0965] In one embodiment, plants may be modified to produce organic acids such as lactic acid. The plants may produce organic acids using sugars, pentose or hexose sugars. To this end, one or more genes may be introduced (e.g., and overexpressed) in the plants. An example of such genes includes LDH gene.

[0966] In some examples, one or more genes may be inactivated (e.g., expression of the genes is decreased). For examples, one or more mutations may be introduced to the genes. The genes may include those encoding proteins involved an endogenous metabolic pathway which produces a metabolite other than the organic acid of interest and/or wherein the endogenous metabolic pathway consumes the organic acid.

[0967] Examples of genes that can be modified or introduced include those encoding pyruvate decarboxylases (pdc), fumarate reductases, alcohol dehydrogenases (adh), acetaldehyde dehydrogenases, phosphoenolpyruvate carboxylases (ppc), D-lactate dehydrogenases (d-ldh), L-lactate dehydrogenases (1-1dh), lactate 2-monooxygenases, lactate dehydrogenase, cytochrome-dependent lactate dehydrogenases (e.g., cytochrome β2-dependent L-lactate dehydrogenases).

### Enhancing Plant Properties for Biofuel Production

[0968] In one embodiment, the compositions, systems, and methods are used to alter the properties of the cell wall of plants to facilitate access by key hydrolyzing agents for a more efficient release of sugars for fermentation. By reducing the proportion of lignin in a plant the proportion of cellulose can be increased. In particular embodiments, lignin biosynthesis may be downregulated in the plant so as to increase fermentable carbohydrates.

[0969] In some examples, one or more lignin biosynthesis genes may be down regulated. Examples of such genes include 4-coumarate 3-hydroxylases (C3H), phenylalanine ammonia-lyases (PAL), cinnamate 4-hydroxylases (C4H), hydroxycinnamoyl transferases (HCT), caffeic acid O-methyltransferases (COMT), caffeoyl CoA 3-O-methyltransferases (CCoAOMT), ferulate 5-hydroxylases (F5H), cinnamyl alcohol dehydrogenases (CAD), cinnamoyl CoA-reductases (CCR), 4-coumarate-CoA ligases (4CL), monolignol-lignin-specific glycosyltransferases, and aldehyde dehydrogenases (ALDH), and those described in WO 2008064289.

[0970] In some examples, plant mass that produces lower level of acetic acid during fermentation may be reduced. To this end, genes involved in polysaccharide acetylation (e.g., Cas1L and those described in WO 2010096488) may be inactivated.

### Other Microorganisms for Oils and Biofuel Production

[0971] In one embodiment, microorganisms other than plants may be used for production of oils and biofuels using the compositions, systems, and methods herein. Examples of the microorganisms include those of the genus of Escherichia, Bacillus, Lactobacillus, Rhodococcus, Synechococcus, Synechoystis, Pseudomonas, Aspergillus, Trichoderma, Neurospora, Fusarium, Humicola, Rhizomucor, Kluyveromyces, Pichia, Mucor, Myceliophtora, Penicillium, Phanerochaete, Pleurotus, Trametes, Chrysosporium, Saccharomyces, Stenotrophamonas, Schizosaccharomyces, Yarrowia, or Streptomyces. This is also further discussed elsewhere herein.

### Detecting Modifications in the Plant Genome-Selectable Markers

[0972] When the compositions, systems, and methods are used to modify a plant, suitable methods may be used to confirm and detect the modification made in the plant. In some examples, when a variety of modifications are made, one or more desired modifications or traits resulting from the modifications may be selected and detected. The detection and confirmation may be performed by biochemical and molecular biology techniques such as Southern analysis, PCR, Northern blot, S1 RNase protection, primer-extension or reverse transcriptase-PCR, enzymatic assays, ribozyme activity, gel electrophoresis, Western blot, immunoprecipitation, enzyme-linked immunoassays, in situ hybridization, enzyme staining, and immunostaining.

[0973] In some cases, one or more markers, such as selectable and detectable markers, may be introduced to the plants. Such markers may be used for selecting, monitoring, isolating cells and plants with desired modifications and traits. A selectable marker can confer positive or negative selection and is conditional or non-conditional on the presence of external substrates. Examples of such markers include genes and proteins that confer resistance to antibiotics, such as hygromycin (hpt) and kanamycin (nptII), and genes that confer resistance to herbicides, such as phosphinothricin (bar) and chlorosulfuron (als), enzyme capable of producing or processing a colored substances (e.g., the β-glucuronidase, luciferase, B or C1 genes).

[0974] Other methods and compositions of detection and screening using the systems and compositions of the present invention are described in greater detail elsewhere herein and can be applied to plants and plant tissues and cells.

### Further Exemplary Applications in Plants

[0975] Further applications of the compositions, systems, and methods on plants and fungi include visualization of genetic element dynamics (e.g., as described in Chen B, et al., Cell. 2013 Dec. 19;155 (7): 1479-91), targeted gene disruption positive-selection in vitro and in vivo (as described in Malina A et al., Genes Dev. 2013 Dec. 1;27 (23): 2602-14), epigenetic modification such as using fusion of Fanzor polypeptide and histone-modifying enzymes (e.g., as described in Rusk N, Nat Methods. 2014 January;11 (1): 28), identifying transcription regulators (e.g., as described in Waldrip Z J, Epigenetics. 2014 September;9 (9): 1207-11), anti-virus treatment for both RNA and DNA viruses (e.g., as described in Price A A, et al., Proc Natl Acad Sci USA. 2015 May 12;112 (19): 6164-9; Ramanan V et al., Sci Rep. 2015 Jun. 2; 5:10833), alteration of genome complexity such as chromosome numbers (e.g., as described in Karimi-Ashtiyani R et al., Proc Natl Acad Sci USA. 2015 Sep. 8;112 (36): 11211-6; Anton T, et al., Nucleus. 2014 March-Apr;5 (2): 163-72), self-cleavage of the composition for controlled inactivation/activation (e.g., as described Sugano S S et al., Plant Cell Physiol. 2014 March;55 (3): 475-81), multiplexed gene editing (as described in Kabadi A M et al., Nucleic Acids Res. 2014 Oct. 29;42 (19): e¹⁴⁷), development of kits for multiplex genome editing (as described in Xing H L et al., BMC Plant Biol. 2014 Nov. 29; 14:327), starch production (as described in Hebelstrup K H et al., Front Plant Sci. 2015 Apr. 23; 6:247), targeting multiple genes in a family or pathway (e.g., as described in Ma X et al., Mol Plant. 2015 August;8 (8): 1274-84), regulation of non-coding genes and sequences (e.g., as described in Lowder L G, et al., Plant Physiol. 2015 October; 169 (2): 971-85), editing genes in trees (e.g., as described in Belhaj K et al., Plant Methods. 2013 Oct. 11;9 (1): 39; Harrison M M, et al., Genes Dev. 2014 Sep. 1;28 (17): 1859-72; Zhou X et al., New Phytol. 2015 October;208 (2): 298-301), introduction of mutations for resistance to host-specific pathogens and pests.

[0976] Additional examples of modifications of plants and fungi that may be performed using the compositions, systems, and methods include analogous modifications described in International Patent Publication Nos. WO2016/099887, WO2016/025131, WO2016/073433, WO2017/066175, WO2017/100158, WO 2017/105991, WO2017/106414, WO2016/100272, WO2016/100571, WO 2016/100568, WO 2016/100562, and WO 2017/019867.

### Applications in Fungi

[0977] The compositions, systems, and methods described herein can be used to perform efficient and cost effective gene or genome interrogation or editing or manipulation in fungi or fungal cells, such as yeast. The approaches and applications in plants may be applied to fungi as well.

[0978] A fungal cell may be any type of eukaryotic cell within the kingdom of fungi, such as phyla of Ascomycota, Basidiomycota, Blastocladiomycota, Chytridiomycota, Glomeromycota, Microsporidia, and Neocallimastigomycota. Examples of fungi or fungal cells in include yeasts, molds, and filamentous fungi.

[0979] In one embodiment, the fungal cell is a yeast cell. A yeast cell refers to any fungal cell within the phyla Ascomycota and Basidiomycota. Examples of yeasts include budding yeast, fission yeast, and mold, S. cerervisiae, Kluyveromyces marxianus, Issatchenkia orientalis, Candida spp. (e.g., Candida albicans), Yarrowia spp. (e.g., Yarrowia lipolytica), Pichia spp. (e.g., Pichia pastoris), Kluyveromyces spp. (e.g., Kluyveromyces lactis and Kluyveromyces marxianus), Neurospora spp. (e.g., Neurospora crassa), Fusarium spp. (e.g., Fusarium oxysporum), and Issatchenkia spp. (e.g., Issatchenkia orientalis, Pichia kudriavzevii and Candida acidothermophilum).

[0980] In one embodiment, the fungal cell is a filamentous fungal cell, which grow in filaments, e.g., hyphae or mycelia. Examples of filamentous fungal cells include Aspergillus spp. (e.g., Aspergillus niger), Trichoderma spp. (e.g., Trichoderma reesei), Rhizopus spp. (e.g., Rhizopus oryzae), and Mortierella spp. (e.g., Mortierella isabellina).

[0981] In one embodiment, the fungal cell is of an industrial strain. Industrial strains include any strain of fungal cell used in or isolated from an industrial process, e.g., production of a product on a commercial or industrial scale. Industrial strain may refer to a fungal species that is typically used in an industrial process, or it may refer to an isolate of a fungal species that may be also used for non-industrial purposes (e.g., laboratory research). Examples of industrial processes include fermentation (e.g., in production of food or beverage products), distillation, biofuel production, production of a compound, and production of a polypeptide. Examples of industrial strains include, without limitation, JAY270 and ATCC4124.

[0982] In one embodiment, the fungal cell is a polyploid cell whose genome is present in more than one copy. Polyploid cells include cells naturally found in a polyploid state, and cells that has been induced to exist in a polyploid state (e.g., through specific regulation, alteration, inactivation, activation, or modification of meiosis, cytokinesis, or DNA replication). A polyploid cell may be a cell whose entire genome is polyploid, or a cell that is polyploid in a particular genomic locus of interest. In some examples, the abundance of nucleic acid component molecule may more often be a rate-limiting component in genome engineering of polyploid cells than in haploid cells, and thus the methods using the composition described herein may take advantage of using certain fungal cell types.

[0983] In one embodiment, the fungal cell is a diploid cell, whose genome is present in two copies. Diploid cells include cells naturally found in a diploid state, and cells that have been induced to exist in a diploid state (e.g., through specific regulation, alteration, inactivation, activation, or modification of meiosis, cytokinesis, or DNA replication). A diploid cell may refer to a cell whose entire genome is diploid, or it may refer to a cell that is diploid in a particular genomic locus of interest.

[0984] In one embodiment, the fungal cell is a haploid cell, whose genome is present in one copy. Haploid cells include cells naturally found in a haploid state, or cells that have been induced to exist in a haploid state (e.g., through specific regulation, alteration, inactivation, activation, or modification of meiosis, cytokinesis, or DNA replication). A haploid cell may refer to a cell whose entire genome is haploid, or it may refer to a cell that is haploid in a particular genomic locus of interest.

[0985] The compositions and systems, and nucleic acid encoding thereof may be introduced to fungi cells using the delivery systems and methods herein. Examples of delivery systems include lithium acetate treatment, bombardment, electroporation, and those described in Kawai et al., 2010, Bioeng Bugs. 2010 November-Dec; 1 (6): 395-403.

[0986] In some examples, a yeast expression vector (e.g., those with one or more regulatory elements) may be used. Examples of such vectors include a centromeric (CEN) sequence, an autonomous replication sequence (ARS), a promoter, such as an RNA Polymerase III promoter, operably linked to a sequence or gene of interest, a terminator such as an RNA polymerase III terminator, an origin of replication, and a marker gene (e.g., auxotrophic, antibiotic, or other selectable markers). Examples of expression vectors for use in yeast may include plasmids, yeast artificial chromosomes, 2u plasmids, yeast integrative plasmids, yeast replicative plasmids, shuttle vectors, and episomal plasmids.

### Biofuel and Materials Production by Fungi

[0987] In one embodiment, the compositions, systems, and methods may be used for generating modified fungi for biofuel and material productions. For instance, the modified fungi for production of biofuel or biopolymers from fermentable sugars and optionally to be able to degrade plant-derived lignocellulose derived from agricultural waste as a source of fermentable sugars. Foreign genes required for biofuel production and synthesis may be introduced into fungi. In some examples, the genes may encode enzymes involved in the conversion of pyruvate to ethanol or another product of interest, degrade cellulose (e.g., cellulase), endogenous metabolic pathways which compete with the biofuel production pathway.

[0988] In some examples, the compositions, systems, and methods may be used for generating and/or selecting yeast strains with improved xylose or cellobiose utilization, isoprenoid biosynthesis, and/or lactic acid production. One or more genes involved in the metabolism and synthesis of these compounds may be modified and/or introduced to yeast cells. Examples of the methods and genes include lactate dehydrogenase, PDC1 and PDC5, and those described in Ha, S.J., et al. (2011) Proc. Natl. Acad. Sci. USA 108 (2): 504-9 and Galazka, J. M., et al. (2010) Science 330 (6000): 84-6; Jakočiūnas T et al., Metab Eng. 2015 March;28:213-222; Stovicek V, et al., FEMS Yeast Res. 2017 Aug. 1;17 (5).

### Improved Plants and Yeast Cells

[0989] The present disclosure further provides improved plants and fungi. The improved and fungi may comprise one or more genes introduced, and/or one or more genes modified by the compositions, systems, and methods herein. The improved plants and fungi may have increased food or feed production (e.g., higher protein, carbohydrate, nutrient or vitamin levels), oil and biofuel production (e.g., methanol, ethanol), tolerance to pests, herbicides, drought, low or high temperatures, excessive water, etc.

[0990] The plants or fungi may have one or more parts that are improved, e.g., leaves, stems, roots, tubers, seeds, endosperm, ovule, and pollen. The parts may be viable, nonviable, regeneratable, and/or non-regeneratable.

[0991] The improved plants and fungi may include gametes, seeds, embryos, either zygotic or somatic, progeny and/or hybrids of improved plants and fungi. The progeny may be a clone of the produced plant or fungi, or may result from sexual reproduction by crossing with other individuals of the same species to introgress further desirable traits into their offspring. The cell may be in vivo or ex vivo in the cases of multicellular organisms, particularly plants.

### Exemplary Applications in Non-Human Animals

[0992] The compositions, systems, and methods may be used to study, diagnose, treat, and modify non-human animals, e.g., introducing desirable traits, minimizing or eliminating undesirable traits, and evaluating disease resilience and/or susceptibility, treatin and/or preventing diseases, facilitating breeding, etc. In one embodiment, the compositions, systems, and methods may be used to improve breeding and introducing desired traits, e.g., increasing the frequency of trait-associated alleles, introgression of alleles from other breeds/species without linkage drag, and creation of de novo favorable alleles. Genes and other genetic elements that can be targeted may be screened and identified. Examples of application and approaches include those described in Tait-Burkard C, et al., Livestock 2.0-genome editing for fitter, healthier, and more productive farmed animals. Genome Biol. 2018 Nov. 26;19 (1): 204; Lillico S, Agricultural applications of genome editing in farmed animals. Transgenic Res. 2019 August;28 (Suppl 2): 57-60; Houston R D, et al., Harnessing genomics to fast-track genetic improvement in aquaculture. Nat Rev Genet. 2020 Apr. 16. doi: 10.1038/s41576-020-0227-y, which are incorporated herein by reference in their entireties. Applications described in other sections such as therapeutic, diagnostic, etc. can also be used on the animals herein.

[0993] The compositions, systems, and methods may be used on animals such as fish, amphibians, reptiles, mammals, and birds. The animals may be farm and agriculture animals, or pets. Examples of farm and agriculture animals include horses, goats, sheep, swine, cattle, llamas, alpacas, and birds, e.g., chickens, turkeys, ducks, and geese. The animals may be a non-human primate, e.g., baboons, capuchin monkeys, chimpanzees, lemurs, macaques, marmosets, tamarins, spider monkeys, squirrel monkeys, and vervet monkeys. Examples of pets include dogs, cats, horses, wolfs, rabbits, ferrets, gerbils, hamsters, chinchillas, fancy rats, guinea pigs, canaries, parakeets, and parrots.

[0994] In one embodiment, one or more genes may be introduced (e.g., overexpressed) in the animals to obtain or enhance one or more desired traits. Growth hormones, insulin-like growth factors (IGF-1) may be introduced to increase the growth of the animals, e.g., pigs or salmon (such as described in Pursel V G et al., J Reprod Fertil Suppl. 1990; 40:235-45; Waltz E, Nature. 2017; 548:148). Fat-1 gene (e.g., from C elegans) may be introduced for production of larger ratio of n-3 to n-6 fatty acids may be induced, e.g., in pigs (such as described in Li M, et al., Genetics. 2018; 8:1747-54). Phytase (e.g., from E coli) xylanase (e.g., from Aspergillus niger), beta-glucanase (e.g., from bacillus lichenformis) may be introduced to reduce the environmental impact through phosphorous and nitrogen release reduction, e.g., in pigs (such as described in Golovan S P, et al., Nat Biotechnol. 2001; 19:741-5; Zhang X et al., elife. 2018). snucleic acid component decoy may be introduced to induce avian influenza resilience e.g., in chicken (such as described in Lyall et al., Science. 2011; 331:223-6). Lysozyme or lysostaphin may be introduced to induce mastitis resilience e.g., in goat and cow (such as described in Maga E A et al., Foodborne Pathog Dis. 2006; 3:384-92; Wall R J, et al., Nat Biotechnol. 2005; 23:445-51). Histone deacetylase such as HDAC6 may be introduced to induce PRRSV resilience, e.g., in pig (such as described in Lu T., et al., PLOS One. 2017; 12: e0169317). CD163 may be modified (e.g., inactivated or removed) to introduce PRRSV resilience in pigs (such as described in Prather R S et al . . . , Sci Rep. 2017 Oct. 17;7 (1): 13371). Similar approaches may be used to inhibit or remove viruses and bacteria (e.g., Swine Influenza Virus (SIV) strains which include influenza C and the subtypes of influenza A known as HIN1, HIN2, H2N1, H3N1, H3N2, and H2N3, as well as pneumonia, meningitis and oedema) that may be transmitted from animals to humans.

[0995] In one embodiment, one or more genes may be modified or edited for disease resistance and production traits. Myostatin (e.g., GDF8) may be modified to increase muscle growth, e.g., in cow, sheep, goat, catfish, and pig (such as described in Crispo M et al., PLOS One. 2015; 10: e⁰¹³⁶⁶⁹⁰; Wang X, et al., Anim Genet. 2018; 49:43-51; Khalil K, et al., Sci Rep. 2017; 7:7301; Kang J-D, et al., RSC Adv. 2017; 7:12541-9). Pc POLLED may be modified to induce horlessness, e.g., in cow (such as described in Carlson D F et al., Nat Biotechnol. 2016; 34:479-81). KISSIR may be modified to induce boretaint (hormone release during sexual maturity leading to undesired meat taste), e.g., in pigs. Dead end protein (dnd) may be modified to induce sterility, e.g., in salmon (such as described in Wargelius A, et al., Sci Rep. 2016; 6:21284). Nano2 and DDX may be modified to induce sterility (e.g., in surrogate hosts), e.g., in pigs and chicken (such as described Park K-E, et al., Sci Rep. 2017; 7:40176; Taylor L et al., Development. 2017; 144:928-34). CD163 may be modified to induce PRRSV resistance, e.g., in pigs (such as described in Whitworth K M, et al., Nat Biotechnol. 2015; 34:20-2). RELA may be modified to induce ASFV resilience, e.g., in pigs (such as described in Lillico S G, et al., Sci Rep. 2016; 6:21645). CD18 may be modified to induce Mannheimia (Pasteurella) haemolytica resilience, e.g., in cows (such as described in Shanthalingam S, et al., roc Natl Acad Sci USA. 2016; 113:13186-90). NRAMP1 may be modified to induce tuberculosis resilience, e.g., in cows (such as described in Gao Y et al., Genome Biol. 2017; 18:13). Endogenous retrovirus genes may be modified or removed for xenotransplantation such as described in Yang L, et al. Science. 2015; 350:1101-4; Niu D et al., Science. 2017; 357:1303-7). Negative regulators of muscle mass (e.g., Myostatin) may be modified (e.g., inactivated) to increase muscle mass, e.g., in dogs (as described in Zou Q et al., J Mol Cell Biol. 2015 December;7 (6): 580-3).

[0996] Animals such as pigs with severe combined immunodeficiency (SCID) may generated (e.g., by modifying RAG2) to provide useful models for regenerative medicine, xenotransplantation (discussed also elsewhere herein), and tumor development. Examples of methods and approaches include those described Lee K, et al., Proc Natl Acad Sci USA. 2014 May 20;111 (20): 7260-5; and Schomberg et al. FASEB Journal, April 2016; 30 (1): Suppl 571.1.

[0997] SNPs in the animals may be modified. Examples of methods and approaches include those described Tan W. et al., Proc Natl Acad Sci USA. 2013 Oct. 8;110 (41): 16526-31; Mali P, et al., Science. 2013 Feb. 15;339 (6121): 823-6.

[0998] Stem cells (e.g., induced pluripotent stem cells) may be modified and differentiated into desired progeny cells, e.g., as described in Heo Y T et al., Stem Cells Dev. 2015 Feb. 1;24 (3): 393-402.

[0999] Profile analysis (such as Igenity) may be performed on animals to screen and identify genetic variations related to economic traits. The genetic variations may be modified to introduce or improve the traits, such as carcass composition, carcass quality, maternal and reproductive traits and average daily gain.

[1000] It will be appreciated that the systems and compositions of the present invention can be used on animals of agriculture importance as well as companion animals, particularly for the treatment and diagnosis of disease, disease susceptibility and/or risk, prevention, coat color, performance (e.g., athletic or reproductive), and lineage/parentage, and breed identity. Exemplary profile analysis for companion animals includes Embark Pet DNA tests, Wisdom Panel pet DNA tests, Basepaws DNA test, Optimal Selection DNA test, and/or the like. These screen for a variety of health and disease risk markers, breed identification markers, and lineage markers. The systems and compositions described herein can be used in similar type profile analysis.

[1001] Compositions and methods for detection of markers relevant to these and other profile analysis of non-human animals are described in greater detail elsewhere herein.

### Detection, Selection, and Screening Compositions, Devices, and Methods

[1002] The Fanzor compositions and systems described herein can be used to detect, select, and screen for target nucleic acid targets, such as those in a sample. In some embodiments, the method of detection includes other processes and methods such as one or more sample and/or nucleic acid preparation or extraction methods, target nucleic amplification. These and others are described herein. Exemplary applications of the detection, selection, and screening methods described herein are also described herein.

### Detection Compositions and Methods of Detection

### Detection Compositions

[1003] In another aspect, embodiments disclosed herein are directed to polynucleotide detection compositions, systems and methods. The detection composition may comprise any of the Fanzor polypeptides and any one or more ωRNAs discussed above. In the addition, the compositions and system may comprise a detection construct. In one example embodiment, the detection construct comprises at least a portion of single-stranded polynucleotide. The one or more ωRNAs are configured to bind a target sequence on a target polypeptide. Binding of the Fanzor complex to the target sequence activates Fanzor cleavage activity and may further activate Fanzor collateral activity whereby Fanzor subsequently cleaves non-target single-stranded polynucleotides in an ωRNA-independent fashion. Accordingly, the detection construct can be configured so that a detectable signal is generated upon cleavage of the single-stranded portion of the detection constructs thereby indicating the present of the target sequence in a sample. Example detection constructs are discussed in further detail below. In further example embodiments, the compositions may further comprise amplification reagents. Amplification reagents may comprise primers and polymerase and/or reverse transcriptases needed to amplify the target sequence. In an example embodiment, the amplification reagents are isothermal amplification reagents. In other example embodiments, the compositions and systems may further comprise quick extraction solutions that allow for detection of target sequences in crude samples or with minimal purification prior to amplification and/or detection.

### Detection Construct

[1004] The systems and methods described herein comprise a detection construct. As used herein, a “detection construct” refers to a molecule that can be cleaved or otherwise deactivated by an activated Fanzor system protein described herein. The term “detection construct” may also be referred to in the alternative as a “masking construct.” Depending on the nuclease activity of the Fanzor protein and the methods utilized, the masking construct may be an RNA-based masking construct or a DNA-based masking construct. The Nucleic Acid-based masking constructs comprises a nucleic acid element that is cleavable by a Fanzor protein. Cleavage of the nucleic acid element releases agents or produces conformational changes that allow a detectable signal to be produced. Example constructs demonstrating how the nucleic acid element may be used to prevent or mask generation of detectable signal are described below and embodiments of the invention comprise variants of the same. Prior to cleavage, or when the masking construct is in an ‘active’ state, the masking construct blocks the generation or detection of a positive detectable signal. In one embodiment, detection constructs are designed for cutting motifs of particular Fanzor proteins.

[1005] It will be understood that in certain example embodiments a minimal background signal may be produced in the presence of an active masking construct. A positive detectable signal may be any signal that can be detected using optical, fluorescent, chemiluminescent, electrochemical or other detection methods known in the art. The term “positive detectable signal” is used to differentiate from other detectable signals that may be detectable in the presence of the masking construct. For example, in one embodiment a first signal may be detected when the masking agent is present or when a Fanzor system has not been activated (i.e., a negative detectable signal), which then converts to a second signal (e.g., the positive detectable signal) upon detection of the target molecules and cleavage or deactivation of the masking agent, or upon activation of the Fanzor protein. The positive detectable signal, then, is a signal detected upon activation of the Fanzor protein, and may be, in a colorimetric or fluorescent assay, a decrease in fluorescence or color relative to a control or an increase in fluorescence or color relative to a control, depending on the configuration of the lateral flow substrate, and as described further herein.

[1006] In certain example embodiments, the masking construct may comprise a HCR initiator sequence and a cutting motif, or a cleavable structural element, such as a loop or hairpin, that prevents the initiator from initiating the HCR reaction. The cutting motif may be preferentially cut by one of the activated Fanzor effector proteins. Upon cleavage of the cutting motif or structure element by an activated Fanzor protein, the initiator is then released to trigger the HCR reaction, detection thereof indicating the presence of one or more targets in the sample. In certain example embodiments, the masking construct comprises a hairpin with a RNA loop. When an activated Fanzor protein cuts the RNA loop, the initiator can be released to trigger the HCR reaction.

[1007] In certain example embodiments, the masking construct may suppress generation of a gene product. The gene product may be encoded by a reporter construct that is added to the sample. The masking construct may be an interfering RNA involved in a RNA interference pathway, such as a short hairpin RNA (shRNA) or small interfering RNA (siRNA). The masking construct may also comprise microRNA (miRNA). While present, the masking construct suppresses expression of the gene product. The gene product may be a fluorescent protein or other RNA transcript or proteins that would otherwise be detectable by a labeled probe, aptamer, or antibody but for the presence of the masking construct. Upon activation of the effector protein the masking construct is cleaved or otherwise silenced allowing for expression and detection of the gene product as the positive detectable signal. In preferred embodiments, the masking constructs comprise two or more detectable signals, for example, fluorescent signals, that can be read on different channels of a fluorimeter.

[1008] In specific embodiments, the masking construct comprises a silencing RNA that suppresses generation of a gene product encoded by a reporting construct, wherein the gene product generates the detectable positive signal when expressed.

[1009] In certain example embodiments, the masking construct may sequester one or more reagents needed to generate a detectable positive signal such that release of the one or more reagents from the masking construct results in generation of the detectable positive signal. The one or more reagents may combine to produce a colorimetric signal, a chemiluminescent signal, a fluorescent signal, or any other detectable signal and may comprise any reagents known to be suitable for such purposes. In certain example embodiments, the one or more reagents are sequestered by RNA aptamers that bind the one or more reagents. The one or more reagents are released when the effector protein is activated upon detection of a target molecule and the RNA or DNA aptamers are degraded.

[1010] In certain example embodiments, the masking construct may be immobilized on a solid substrate in an individual discrete volume (defined further below) and sequesters a single reagent. For example, the reagent may be a bead comprising a dye. When sequestered by the immobilized reagent, the individual beads are too diffuse to generate a detectable signal, but upon release from the masking construct are able to generate a detectable signal, for example by aggregation or simple increase in solution concentration. In certain example embodiments, the immobilized masking agent is a RNA- or DNA-based aptamer that can be cleaved by the activated effector protein upon detection of a target molecule.

[1011] In certain other example embodiments, the masking construct binds to an immobilized reagent in solution thereby blocking the ability of the reagent to bind to a separate labeled binding partner that is free in solution. Thus, upon application of a washing step to a sample, the labeled binding partner can be washed out of the sample in the absence of a target molecule. However, if the effector protein is activated, the masking construct is cleaved to a degree sufficient to interfere with the ability of the masking construct to bind the reagent thereby allowing the labeled binding partner to bind to the immobilized reagent. Thus, the labeled binding partner remains after the wash step indicating the presence of the target molecule in the sample. In certain aspects, the masking construct that binds the immobilized reagent is a DNA or RNA aptamer. The immobilized reagent may be a protein and the labeled binding partner may be a labeled antibody. Alternatively, the immobilized reagent may be streptavidin and the labeled binding partner may be labeled biotin. The label on the binding partner used in the above embodiments may be any detectable label known in the art. In addition, other known binding partners may be used in accordance with the overall design described herein.

[1012] In certain example embodiments, the masking construct may comprise a ribozyme. Ribozymes are RNA molecules having catalytic properties. Ribozymes, both naturally and engineered, comprise or consist of RNA that may be targeted by the effector proteins disclosed herein. The ribozyme may be selected or engineered to catalyze a reaction that either generates a negative detectable signal or prevents generation of a positive control signal. Upon deactivation of the ribozyme by the activated effector protein the reaction generating a negative control signal, or preventing generation of a positive detectable signal, is removed thereby allowing a positive detectable signal to be generated. In one example embodiment, the ribozyme may catalyze a colorimetric reaction causing a solution to appear as a first color. When the ribozyme is deactivated, the solution then turns to a second color, the second color being the detectable positive signal. An example of how ribozymes can be used to catalyze a colorimetric reaction are described in Zhao et al. “Signal amplification of glucosamine-6-phosphate based on ribozyme glmS,” Biosens Bioelectron. 2014; 16:337-42 and provide an example of how such a system could be modified to work in the context of the embodiments disclosed herein. Alternatively, ribozymes, when present can generate cleavage products of, for example, RNA transcripts. Thus, detection of a positive detectable signal may comprise detection of non-cleaved RNA transcripts that are only generated in the absence of the ribozyme.

[1013] In one embodiment, the masking construct may be a ribozyme that generates a negative detectable signal, and wherein a positive detectable signal is generated when the ribozyme is deactivated.

[1014] In certain example embodiments, the one or more reagents is a protein, such as an enzyme, capable of facilitating generation of a detectable signal, such as a colorimetric, chemiluminescent, or fluorescent signal, that is inhibited or sequestered such that the protein cannot generate the detectable signal by the binding of one or more DNA or RNA aptamers to the protein. Upon activation of the effector proteins disclosed herein, the DNA or RNA aptamers are cleaved or degraded to an extent that they no longer inhibit the protein's ability to generate the detectable signal. In certain example embodiments, the aptamer is a thrombin inhibitor aptamer. In certain example embodiments, the thrombin inhibitor aptamer has a sequence of GGGAACAAAGCUGAAGUACUUACCC (SEQ ID NO: 561). When this aptamer is cleaved, thrombin will become active and will cleave a peptide colorimetric or fluorescent substrate. In certain example embodiments, the colorimetric substrate is para-nitroanilide (pNA) covalently linked to the peptide substrate for thrombin. Upon cleavage by thrombin, pNA is released and becomes yellow in color and easily visible to the eye. In certain example embodiments, the fluorescent substrate is 7-amino-4-methylcoumarin a blue fluorophore that can be detected using a fluorescence detector. Inhibitory aptamers may also be used for horseradish peroxidase (HRP), beta-galactosidase, or calf alkaline phosphatase (CAP) and within the general principals laid out above.

[1015] In one embodiment, RNAse or DNAse activity is detected colorimetrically via cleavage of enzyme-inhibiting aptamers. One potential mode of converting DNAse or RNAse activity into a colorimetric signal is to couple the cleavage of a DNA or RNA aptamer with the re-activation of an enzyme that is capable of producing a colorimetric output. In the absence of RNA or DNA cleavage, the intact aptamer will bind to the enzyme target and inhibit its activity. The advantage of this readout system is that the enzyme provides an additional amplification step: once liberated from an aptamer via collateral activity (e.g., Fanzor collateral activity), the colorimetric enzyme will continue to produce colorimetric product, leading to a multiplication of signal.

[1016] In one embodiment, an existing aptamer that inhibits an enzyme with a colorimetric readout is used. Several aptamer/enzyme pairs with colorimetric readouts exist, such as thrombin, protein C, neutrophil elastase, and subtilisin. These proteases have colorimetric substrates based upon pNA and are commercially available. In one embodiment, a novel aptamer targeting a common colorimetric enzyme is used. Common and robust enzymes, such as beta-galactosidase, horseradish peroxidase, or calf intestinal alkaline phosphatase, could be targeted by engineered aptamers designed by selection strategies such as SELEX. Such strategies allow for quick selection of aptamers with nanomolar binding efficiencies and could be used for the development of additional enzyme/aptamer pairs for colorimetric readout.

[1017] In one embodiment, the masking construct may be a DNA or RNA aptamer and/or may comprise a DNA or RNA-tethered inhibitor.

[1018] In one embodiment, the masking construct may comprise a DNA or RNA oligonucleotide to which a detectable ligand and a masking component are attached.

[1019] In one embodiment, RNAse or DNase activity is detected colorimetrically via cleavage of RNA-tethered inhibitors. Many common colorimetric enzymes have competitive, reversible inhibitors: for example, beta-galactosidase can be inhibited by galactose. Many of these inhibitors are weak, but their effect can be increased by increases in local concentration. By linking local concentration of inhibitors to DNase RNAse activity, colorimetric enzyme and inhibitor pairs can be engineered into DNase and RNAse sensors. The colorimetric DNase or RNAse sensor based upon small-molecule inhibitors involves three components: the colorimetric enzyme, the inhibitor, and a bridging RNA or DNA that is covalently linked to both the inhibitor and enzyme, tethering the inhibitor to the enzyme. In the uncleaved configuration, the enzyme is inhibited by the increased local concentration of the small molecule; when the DNA or RNA is cleaved (e.g. by Fanzor collateral cleavage), the inhibitor will be released and the colorimetric enzyme will be activated.

[1020] In one embodiment, the aptamer or DNA- or RNA-tethered inhibitor may sequester an enzyme, wherein the enzyme generates a detectable signal upon release from the aptamer or DNA or RNA tethered inhibitor by acting upon a substrate. In one embodiment, the aptamer may be an inhibitor aptamer that inhibits an enzyme and prevents the enzyme from catalyzing generation of a detectable signal from a substance. In one embodiment, the DNA- or RNA-tethered inhibitor may inhibit an enzyme and may prevent the enzyme from catalyzing generation of a detectable signal from a substrate.

[1021] In one embodiment, RNAse activity is detected colorimetrically via formation and/or activation of G-quadruplexes. G quadruplexes in DNA can complex with heme (iron (III)-protoporphyrin IX) to form a DNAzyme with peroxidase activity. When supplied with a peroxidase substrate (e.g., ABTS: (2,2′-Azinobis [3-ethylbenzothiazoline-6-sulfonic acid]-diammonium salt)), the G-quadruplex-heme complex in the presence of hydrogen peroxide causes oxidation of the substrate, which then forms a green color in solution. An example G-quadruplex forming DNA sequence is: GGGTAGGGCGGGTTGGGA (SEQ ID NO: 562). By hybridizing an additional DNA or RNA sequence, referred to herein as a “staple,” to this DNA aptamer, formation of the G-quadraplex structure will be limited. Upon collateral activation, the staple will be cleaved allowing the G quadraplex to form and heme to bind. This strategy is particularly appealing because color formation is enzymatic, meaning there is additional amplification beyond collateral activation.

[1022] In one embodiment, the masking construct may comprise an RNA oligonucleotide designed to bind a G-quadruplex forming sequence, wherein a G-quadruplex structure is formed by the G-quadruplex forming sequence upon cleavage of the masking construct, and wherein the G-quadruplex structure generates a detectable positive signal.

[1023] In certain example embodiments, the masking construct may be immobilized on a solid substrate in an individual discrete volume (defined further below) and sequesters a single reagent. For example, the reagent may be a bead comprising a dye. When sequestered by the immobilized reagent, the individual beads are too diffuse to generate a detectable signal, but upon release from the masking construct are able to generate a detectable signal, for example by aggregation or simple increase in solution concentration. In certain example embodiments, the immobilized masking agent is a DNA- or RNA-based aptamer that can be cleaved by the activated effector protein upon detection of a target molecule.

[1024] In one example embodiment, the masking construct comprises a detection agent that changes color depending on whether the detection agent is aggregated or dispersed in solution. For example, certain nanoparticles, such as colloidal gold, undergo a visible purple to red color shift as they move from aggregates to dispersed particles. Accordingly, in certain example embodiments, such detection agents may be held in aggregate by one or more bridge molecules. At least a portion of the bridge molecule comprises RNA or DNA. Upon activation of the effector proteins disclosed herein, the RNA or DNA portion of the bridge molecule is cleaved allowing the detection agent to disperse and resulting in the corresponding change in color. In certain example embodiments, the detection agent is a colloidal metal. The colloidal metal material may include water-insoluble metal particles or metallic compounds dispersed in a liquid, a hydrosol, or a metal sol. The colloidal metal may be selected from the metals in groups IA, IB, IIB and IIIB of the periodic table, as well as the transition metals, especially those of group VIII. Preferred metals include gold, silver, aluminum, ruthenium, zinc, iron, nickel and calcium. Other suitable metals also include the following in all of their various oxidation states: lithium, sodium, magnesium, potassium, scandium, titanium, vanadium, chromium, manganese, cobalt, copper, gallium, strontium, niobium, molybdenum, palladium, indium, tin, tungsten, rhenium, platinum, and gadolinium. The metals are preferably provided in ionic form, derived from an appropriate metal compound, for example the Al³⁺, Ru³⁺, Zn^{2 +}, Fe³⁺, Ni^{2 +} and Ca²⁺ ions.

[1025] When the RNA or DNA bridge is cut by the activated Fanzor polypeptide, the aforementioned color shift is observed. In certain example embodiments the particles are colloidal metals. In certain other example embodiments, the colloidal metal is a colloidal gold. In certain example embodiments, the colloidal nanoparticles are 15 nm gold nanoparticles (AuNPs). Due to the unique surface properties of colloidal gold nanoparticles, maximal absorbance is observed at 520 nm when fully dispersed in solution and appear red in color to the naked eye. Upon aggregation of AuNPs, they exhibit a red-shift in maximal absorbance and appear darker in color, eventually precipitating from solution as a dark purple aggregate. In certain example embodiments the nanoparticles are modified to include DNA linkers extending from the surface of the nanoparticle. Individual particles are linked together by single-stranded RNA (ssRNA) or single-stranded DNA (ssDNA) bridges that hybridize on each end to at least a portion of the DNA linkers. Thus, the nanoparticles will form a web of linked particles and aggregate, appearing as a dark precipitate. Upon activation of the Fanzor polypeptides disclosed herein, the ssRNA or ssDNA bridge will be cleaved, releasing the AU NPS from the linked mesh and produce a visible red color. Example DNA linkers and bridge sequences are listed below. Thiol linkers on the end of the DNA linkers may be used for surface conjugation to the AuNPS. Other forms of conjugation may be used. In certain example embodiments, two populations of AuNPs may be generated, one for each DNA linker. This will help facilitate proper binding of the ssRNA bridge with proper orientation. In certain example embodiments, a first DNA linker is conjugated by the 3′ end while a second DNA linker is conjugated by the 5′ end.

[1026] In certain other example embodiments, the masking construct may comprise an RNA or DNA oligonucleotide to which are attached a detectable label and a masking agent of that detectable label. An example of such a detectable label/masking agent pair is a fluorophore and a quencher of the fluorophore. Quenching of the fluorophore can occur as a result of the formation of a non-fluorescent complex between the fluorophore and another fluorophore or non-fluorescent molecule. This mechanism is known as ground-state complex formation, static quenching, or contact quenching. Accordingly, the RNA or DNA oligonucleotide may be designed so that the fluorophore and quencher are in sufficient proximity for contact quenching to occur. Fluorophores and their cognate quenchers are known in the art and can be selected for this purpose by one having ordinary skill in the art. The particular fluorophore/quencher pair is not critical in the context of this invention, only that selection of the fluorophore/quencher pairs ensures masking of the fluorophore. Upon activation of the effector proteins disclosed herein, the RNA or DNA oligonucleotide is cleaved thereby severing the proximity between the fluorophore and quencher needed to maintain the contact quenching effect. Accordingly, detection of the fluorophore may be used to determine the presence of a target molecule in a sample.

[1027] In certain other example embodiments, the masking construct may comprise one or more RNA oligonucleotides to which are attached one or more metal nanoparticles, such as gold nanoparticles. In one embodiment, the masking construct comprises a plurality of metal nanoparticles crosslinked by a plurality of RNA or DNA oligonucleotides forming a closed loop. In one embodiment, the masking construct comprises three gold nanoparticles crosslinked by three RNA or DNA oligonucleotides forming a closed loop. In one embodiment, the cleavage of the RNA or DNA oligonucleotides by the Fanzor protein leads to a detectable signal produced by the metal nanoparticles.

[1028] In certain other example embodiments, the masking construct may comprise one or more RNA or DNA oligonucleotides to which are attached one or more quantum dots. In one embodiment, the cleavage of the RNA or DNA oligonucleotides by the Fanzor protein leads to a detectable signal produced by the quantum dots.

[1029] In one example embodiment, the masking construct may comprise a quantum dot. The quantum dot may have multiple linker molecules attached to the surface. At least a portion of the linker molecule comprises RNA or DNA. The linker molecule is attached to the quantum dot at one end and to one or more quenchers along the length or at terminal ends of the linker such that the quenchers are maintained in sufficient proximity for quenching of the quantum dot to occur. The linker may be branched. As above, the quantum dot/quencher pair is not critical, only that selection of the quantum dot/quencher pair ensures masking of the fluorophore. Quantum dots and their cognate quenchers are known in the art and can be selected for this purpose by one having ordinary skill in the art. Upon activation of the effector proteins disclosed herein, the RNA or DNA portion of the linker molecule is cleaved thereby eliminating the proximity between the quantum dot and one or more quenchers needed to maintain the quenching effect. In certain example embodiments the quantum dot is streptavidin conjugated. RNA or DNA are attached via biotin linkers and recruit quenching molecules with the sequences/5Biosg/UCUCGUACGUUC/3IAbRQSp/(SEQ ID NO: 563) or/5Biosg/UCUCGUACGUUCUCUCGUACGUUC/3IAbRQSp/(SEQ ID NO: 564) where/5Biosg/is a biotin tag and/31AbRQSp/is an Iowa black quencher (Iowa Black FQ). Upon cleavage, by the activated effectors disclosed herein the quantum dot will fluoresce visibly.

[1030] In specific embodiments, the detectable ligand may be a fluorophore and the masking component may be a quencher molecule.

[1031] In a similar fashion, fluorescence energy transfer (FRET) may be used to generate a detectable positive signal. FRET is a non-radiative process by which a photon from an energetically excited fluorophore (i.e., “donor fluorophore”) raises the energy state of an electron in another molecule (i.e. “the acceptor”) to higher vibrational levels of the excited singlet state. The donor fluorophore returns to the ground state without emitting a fluoresce characteristic of that fluorophore. The acceptor can be another fluorophore or non-fluorescent molecule. If the acceptor is a fluorophore, the transferred energy is emitted as fluorescence characteristic of that fluorophore. If the acceptor is a non-fluorescent molecule the absorbed energy is loss as heat. Thus, in the context of the embodiments disclosed herein, the fluorophore/quencher pair is replaced with a donor fluorophore/acceptor pair attached to the oligonucleotide molecule. When intact, the masking construct generates a first signal (negative detectable signal) as detected by the fluorescence or heat emitted from the acceptor. Upon activation of the effector proteins disclosed herein the RNA oligonucleotide is cleaved and FRET is disrupted such that fluorescence of the donor fluorophore is now detected (positive detectable signal).

[1032] In certain example embodiments, the masking construct comprises the use of intercalating dyes which change their absorbance in response to cleavage of long RNAs or DNAs to short nucleotides. Several such dyes exist. For example, pyronine-Y will complex with RNA and form a complex that has an absorbance at 572 nm. Cleavage of the RNA results in loss of absorbance and a color change. Methylene blue may be used in a similar fashion, with changes in absorbance at 688 nm upon RNA cleavage. Accordingly, in certain example embodiments the masking construct comprises a RNA and intercalating dye complex that changes absorbance upon the cleavage of RNA by the effector proteins disclosed herein.

[1033] In certain example embodiments, the masking construct may comprise an initiator for an HCR reaction. See e.g., Dirks and Pierce. PNAS 101, 15275-15728 (2004). HCR reactions utilize the potential energy in two hairpin species. When a single-stranded initiator having a portion of complementary to a corresponding region on one of the hairpins is released into the previously stable mixture, it opens a hairpin of one species. This process, in turn, exposes a single-stranded region that opens a hairpin of the other species. This process, in turn, exposes a single stranded region identical to the original initiator. The resulting chain reaction may lead to the formation of a nicked double helix that grows until the hairpin supply is exhausted. Detection of the resulting products may be done on a gel or colorimetrically. Example colorimetric detection methods include, for example, those disclosed in Lu et al. “Ultra-sensitive colorimetric assay system based on the hybridization chain reaction-triggered enzyme cascade amplification ACS Appl Mater Interfaces, 2017, 9 (1): 167-175, Wang et al. “An enzyme-free colorimetric assay using hybridization chain reaction amplification and split aptamers” Analyst 2015, 150, 7657-7662, and Song et al. “Non-covalent fluorescent labeling of hairpin DNA probe coupled with hybridization chain reaction for sensitive DNA detection.” Applied Spectroscopy, 70 (4): 686-694 (2016).

[1034] In certain example embodiments, the masking construct suppresses generation of a detectable positive signal until cleaved or modified by an activated Fanzor protein. In one embodiment, the masking construct may suppress generation of a detectable positive signal by masking the detectable positive signal or generating a detectable negative signal instead.

### Detection Methods

### Methods for Detecting Nucleic Acids

[1035] The low cost and adaptability of one or more embodiments of an assay platform lends itself to a number of applications including (i) general RNA/DNA quantitation, (ii) rapid, multiplexed RNA/DNA and protein expression detection, and (iii) sensitive detection of target nucleic acids, peptides, and proteins in both clinical and environmental samples. Additionally, the systems disclosed herein may be adapted for detection of transcripts within biological settings, such as cells. Given the highly specific nature of the Fanzor effectors described herein, it may be possible to track allelic specific expression of transcripts or disease-associated mutations in live cells.

[1036] In some embodiments, methods include detecting target nucleic acids in samples, comprising distributing a sample or set of samples into one or more individual discrete volumes comprising a Fanzor system as described herein. The sample or set of samples may then be incubated under conditions sufficient to allow binding of the one or more ωRNAs to one or more target molecules, and the Fanzor protein may be activated via binding of the one or more ωRNA to the one or more target molecules, wherein activating the Fanzor effector protein results in modification of the detection construct such that a detectable positive signal is generated. The one or more detectable positive signals may then be detected, with detection indicating the presence of one or more target molecules in the sample.

[1037] In some embodiments, methods of the invention include detecting polypeptides in samples, comprising distributing a sample or set of samples into a set of individual discrete volumes comprising peptide detection aptamers and a Fanzor as described herein. The sample or set of samples may then be incubated under conditions sufficient to allow binding of the peptide detection aptamers to the one or more target molecules, wherein binding of the aptamer to a corresponding target molecule exposes the RNA polymerase binding site or primer binding site resulting in generation of a trigger RNA. The Fanzor may then be activated via binding of the one or more ωRNAs to the trigger RNA, wherein activating the Fanzor protein results in modification of the detection construct such that a detectable positive signal is produced. The detectable positive signal may then be detected, with detection of the detectable positive signal indicating the presence of one or more target molecules in a sample.

[1038] In certain example embodiments, a single guide sequence specific to a single target is placed in separate volumes. Each volume may then receive a different sample or aliquot of the same sample. In certain example embodiments, multiple ωRNAs each to separate target may be placed in a single well such that multiple targets may be screened in a different well. In order to detect multiple ωRNA in a single volume, in certain example embodiments, multiple Fanzor proteins with different specificities may be used.

[1039] In embodiments, different Fanzor orthologs with different sequence specificities may be used. Cutting motifs may be used to take advantage of the sequence specificities of different orthologs. The detection construct can comprise a cutting motif preferentially cut by a given Fanzor ortholog. A cutting motif sequence can be a particular nucleotide base, a repeat nucleotide base in a homopolymer, or a heteropolymer of bases. The cutting motif can be a dinucleotide sequence, a trinucleotide sequence or more complex motifs comprising 4, 5, 6, 7, 8, 9, or 10 nucleotide motifs. For example, one orthologue may preferentially cut A, while others preferentially cut C, G, U/T. Accordingly, detection constructs completely comprising, or comprised of a substantial portion, of a single nucleotide may be generated, each with a different fluorophore that can be detected at differing wavelengths. In this way up to four different targets may be screened in a single individual discrete volume. In certain other example embodiments, different orthologues with different nucleotide editing preferences may be used such as Fanzor s in combination with a Cas13 or Cas12.

[1040] In addition to single base editing preferences, additional detection constructs can be designed based on other motif cutting preferences of Fanzor, Cas12, and Cas13 orthologs. For example, Cas13 or Cas12 orthologs may preferentially cut a dinucleotide sequence, a trinucleotide sequence or more complex motifs comprising 4, 5, 6, 7, 8, 9, or 10 nucleotide motifs. As an example, LwaCas13a showed strong preference for a hexanucleotide motif sequences, with CcaCas13b showing strong preference for other hexanucleotide motifs. Thus, the upper bound for multiplex assays using the embodiments disclosed herein is primarily limited by the number of distinguishable detectable labels and the detection channels needed to detect them. In certain example embodiments, 2, 3, 4, 5, 6, 7, 8, 9, 10, 11, 12, 13, 14, 15, 16, 17, 18, 19, 20, 21, 22, 23, 24, 25, 26, 27, 28, 29, or 30 different targets are detected. Example methods for identifying such motifs are further disclosed in the Working Examples below.

[1041] In specific embodiments, the target molecule may be a target DNA and the method may further comprise binding the target DNA with a primer comprising an RNA polymerase site, as described herein.

[1042] In specific embodiments, the one or more ωRNA may be designed to detect a single nucleotide polymorphism in a target RNA or DNA, or a splice variant of an RNA transcript.

[1043] In some embodiments, the one or more ωRNAs may be designed to bind to cell free nucleic acids. In some embodiments, the one or more ωRNAs may be designed to detect a single nucleotide polymorphism in a target RNA or DNA, or a splice variant of an RNA transcript. In some embodiments, the one or more guide RNAs are designed to bind to one or more target molecules that are diagnostic for a disease state, as described herein.

[1044] In some embodiments, the disease state may be an infection, an organ disease, a blood disease, an immune system disease, a cancer, a brain and nervous system disease, an endocrine disease, a pregnancy or childbirth-related disease, an inherited disease, or an environmentally-acquired disease.

[1045] In certain example embodiments, the systems, devices, and methods, disclosed herein are directed to detecting the presence of one or more microbial agents in a sample, such as a biological sample obtained from a subject. In certain example embodiments, the microbe may be a bacterium, a fungus, a yeast, a protozoa, a parasite, or a virus. Accordingly, the methods disclosed herein can be adapted for use in other methods (or in combination) with other methods that require quick identification of microbe species, monitoring the presence of microbial proteins (antigens), antibodies, antibody genes, detection of certain phenotypes (e.g., bacterial resistance), monitoring of disease progression and/or outbreak, and antibiotic screening. Because of the rapid and sensitive diagnostic capabilities of the embodiments disclosed here, detection of microbe species type, down to a single nucleotide difference, and the ability to be deployed as a POC device, the embodiments disclosed herein may be used guide therapeutic regimens, such as selection of the appropriate antibiotic or antiviral. The embodiments disclosed herein may also be used to screen environmental samples (air, water, surfaces, food etc.) for the presence of microbial contamination.

[1046] Disclosed is a method to identify microbial species, such as bacterial, viral, fungal, yeast, or parasitic species, or the like. Particular embodiments disclosed herein describe methods and systems that will identify and distinguish microbial species within a single sample, or across multiple samples, allowing for recognition of many different microbes. The present methods allow the detection of pathogens and distinguishing between two or more species of one or more organisms, e.g., bacteria, viruses, yeast, protozoa, and fungi or a combination thereof, in a biological or environmental sample, by detecting the presence of a target nucleic acid sequence in the sample. A positive signal obtained from the sample indicates the presence of the microbe. Multiple microbes can be identified simultaneously using the methods and systems of the invention, by employing the use of more than one effector protein, wherein each effector protein targets a specific microbial target sequence. In this way, a multi-level analysis can be performed for a particular subject in which any number of microbes can be detected at once. In some embodiments, simultaneous detection of multiple microbes may be performed using a set of probes that can identify one or more microbial species.

[1047] Multiplex analysis of samples enables large-scale detection of samples, reducing the time and cost of analyses. However, multiplex analyses are often limited by the availability of a biological sample. In accordance with the invention, however, alternatives to multiplex analysis may be performed such that multiple effector proteins can be added to a single sample and each masking construct may be combined with a separate quencher dye. In this case, positive signals may be obtained from each quencher dye separately for multiple detection in a single sample.

[1048] Disclosed herein are methods for distinguishing between two or more species of one or more organisms in a sample. The methods are also amenable to detecting one or more species of one or more organisms in a sample.

[1049] In some embodiments, the methods provide for detection of disease states that are characterized by the presence or absence of an antibiotic or drug resistance or susceptibility gene or transcript or polypeptide, preferably in a pathogen or a cell.

### Incubating

[1050] Methods of detection, amplification and/or extraction using the systems disclosed herein can comprise incubating the sample or set of samples under conditions sufficient to allow binding of the nucleic acid component molecules to one or more target molecules. Exstraction can comprise incubating the sample under conditions sufficient to allow release of viral RNA present in the sample, which may comprise incubating at 22° C. to 60° C. for 30 to 70 minutes or at 90° C.-100° C. for about 10 minutes.

[1051] In certain example embodiments, the incubation time of the amplifying and detecting in the present invention may be shortened. The assay may be performed in a period of time required for an enzymatic reaction to occur. One skilled in the art can perform biochemical reactions in 5 minutes (e.g., 5 minute ligation). Incubating may occur at one or more temperatures over timeframes between about 10 minutes and 90 minutes, preferably less than 90 minutes, 75 minutes, 60 minutes, 45 minutes, 30 minutes, 25 minutes, 20 minutes, 15 minutes, or 10 minutes depending on sample, reagents and components of the system. In one embodiment, incubating for the amplification is performed at one or more temperatures between about 20° C. and 80° C., In one embodiment, about 37° C. In one embodiment, incubating for the amplification is performed at one or more temperatures between about 55° C. and 65° C., between about 59° C. and 61° C., In one embodiment, about 60° C.

### Activating

[1052] In certain example embodiment, activating of the Fanzor protein occurs via binding of the Fanzor complex via the nucleic acid component molecule to the one or more target molecules, wherein activating the Fanzor protein results in modification of the detection construct such that a detectable signal is generated.

### Detecting a Signal

[1053] Detecting may comprise visual observance of a positive signal relative to a control. Detecting may comprise a loss of signal or presence of signal at one or more capture regions, for example colorimetric detection, or fluorescent detection. In certain example embodiments, further modifications may be introduced that further amplify the detectable positive signal. For example, activated Fanzor protein collateral activation may be used to generate a secondary target or additional nucleic acid component molecule sequence, or both. In one example embodiment, the reaction solution would contain a secondary target that is spiked in at high concentration. The secondary target may be distinct from the primary target (i.e., the target for which the assay is designed to detect) and in certain instances may be common across all reaction volumes. A secondary nucleic acid component molecule sequence for the secondary target may be protected, e.g., by a secondary structural feature such as a hairpin with an RNA loop, and unable to bind the second target or the Fanzor protein. Cleavage of the protecting group by an activated Fanzor r protein (i.e., after activation by formation of complex with the primary target(s) in solution) and formation of a complex with free Fanzor protein in solution and activation from the spiked in secondary target. In certain other example embodiments, a similar concept is used with free nucleic acid component molecule sequence to a secondary target and protected secondary target. Cleavage of a protecting group off the secondary target would allow additional Fanzor protein, nucleic acid component sequence, secondary target sequence to form. In yet another example embodiment, activation of Fanzor protein by the primary target(s) may be used to cleave a protected or circularized primer, which would then be released to perform an isothermal amplification reaction, such as those disclosed herein, on a template for either secondary nucleic acid component sequence, secondary target, or both. Subsequent transcription of this amplified template would produce more secondary nucleic acid component molecule sequence and/or secondary target sequence, followed by additional Fanzor protein collateral activation.

### Quantifying

[1054] In particular methods, comparing the intensity of the one or more signals to a control is performed to quantify the nucleic acid in the sample. The term “control” refers to any reference standard suitable to provide a comparison to the expression products in the test sample. In one embodiment, the control comprises obtaining a “control sample” from which expression product levels are detected and compared to the expression product levels from the test sample. Such a control sample may comprise any suitable sample, including but not limited to a sample from a control patient (can be stored sample or previous sample measurement) with a known outcome; normal tissue, fluid, or cells isolated from a subject, such as a normal patient or the patient having a condition of interest.

[1055] The intensity of a signal is “significantly” higher or lower than the normal intensity if the signal is greater or less, respectively, than the normal or control level by an amount greater than the standard error of the assay employed to assess amount, and preferably at least 20%, 30%, 40%, 50%, 60%, 70%, 80%, 90%, 100%, 150%, 200%, 300%, 350%, 400%, 500%, 600%, 700%, 800%, 900%, 1000% or than that amount. Alternatively, the signal can be considered “significantly” higher or lower than the normal and/or control signal if the amount is at least about two, and preferably at least about 5%, 10%, 15%, 20%, 25%, 30%, 35%, 40%, 45%, 50%, 55%, 60%, 65%, 70%, 75%, 80%, 85%, 90%, 95%, 100%, 105%, 110%, 115%, 120%, 125%, 130%, 135%, 140%, 145%, 150%, 155%, 160%, 165%, 170%, 175%, 180%, 185%, 190%, 195%, two times, three times, four times, five times, or more, or any range in between, such as 5%-100%, higher or lower, respectively, than the normal and/or control signal. Such significant modulation values can be applied to any metric described herein, such as altered level of expression, altered activity, changes in biomarker inhibition, changes in test agent binding, and the like.

[1056] In one embodiment, the detectable positive signal may be a loss of fluorescent signal or colorimetric relative to a control, as described herein. In one embodiment, the detectable positive signal may be detected on a lateral flow device, as described herein.

Methods for Detecting and/or Quantifying Target Nucleic Acids Using a Lateral Flow Device

[1057] In one embodiment, the invention provides methods for detecting target nucleic acids in a sample. Such methods may comprise contacting a sample with the first end of a lateral flow device as described elsewhere herein. The first end of the lateral flow device may comprise a sample loading portion, wherein the sample flows from the sample loading portion of the substrate towards the first and second capture regions and generates a detectable signal.

[1058] A positive detectable signal may be any signal that can be detected using optical, fluorescent, chemiluminescent, electrochemical or other detection methods known in the art, as described elsewhere herein.

[1059] In one embodiment, the lateral flow device may be capable of detecting two different target nucleic acid sequences. In one embodiment, this detection of two different target nucleic acid sequences may occur simultaneously.

[1060] In one embodiment, the absence of target nucleic acid sequences in a sample elicits a detectable fluorescent signal at each capture region. In such instances, the absence of any target nucleic acid sequences in a sample may cause a detectable signal to appear at the first and second capture regions.

[1061] In one embodiment, the lateral flow device as described herein is capable of detecting three different target nucleic acid sequences. In specific embodiments, when the target nucleic acid sequences are absent from the sample, a fluorescent signal may be generated at each of the three capture regions. In such exemplary embodiments, a fluorescent signal may be absent at the capture region for the corresponding target nucleic acid sequence when the sample contains one or more target nucleic acid sequences.

[1062] Samples to be screened are loaded at the sample loading portion of the lateral flow substrate. The samples must be liquid samples or samples dissolved in an appropriate solvent, usually aqueous. The liquid sample reconstitutes the system reagents such that a detection reaction can occur. Intact reporter construct is bound at the first capture region by binding between the first binding agent and the first molecule. Likewise, the detection agent will begin to collect at the first binding region by binding to the second molecule on the intact reporter construct. If target molecule(s) are present in the sample, the Fanzor protein collateral effect is activated. As activated Fanzor protein comes into contact with the bound reporter construct, the reporter constructs are cleaved, releasing the second molecule to flow further down the lateral flow substrate towards the second binding region. The released second molecule is then captured at the second capture region by binding to the second binding agent, where additional detection agent may also accumulate by binding to the second molecule. Accordingly, if the target molecule(s) is not present in the sample, a detectable signal will appear at the first capture region, and if the target molecule(s) is present in the sample, a detectable signal will appear at the location of the second capture region.

[1063] In one embodiment, the invention provides a method for quantifying target nucleic acids in samples comprising distributing a sample or set of samples into one or more individual discrete volumes comprising two or more Fanzor systems as described herein. The method may comprise using HDA to amplify one or more target molecules in the sample or set of samples, as described herein. The method may further comprise incubating the sample or set of samples under conditions sufficient to allow binding of the nucleic acid component molecules to one or more target molecules. The method may further comprise activating the Fanzor protein via binding of the nucleic acid component molecules to the one or more target molecules. Activating the Fanzor protein may result in modification of the detection construct such that a detectable positive signal is generated. The method may further comprise detecting the one or more detectable positive signals, wherein detection indicates the presence of one or more target molecules in the sample. The method may further comprise comparing the intensity of the one or more signals to a control to quantify the nucleic acid in the sample. The steps of amplifying, incubating, activating, and detecting may all be performed in the same individual discrete volume.

[1064] An “individual discrete volume” is a discrete volume or discrete space, such as a container, receptacle, or other defined volume or space that can be defined by properties that prevent and/or inhibit migration of nucleic acids and reagents necessary to carry out the methods disclosed herein, for example a volume or space defined by physical properties such as walls, for example the walls of a well, tube, or a surface of a droplet, which may be impermeable or semipermeable, or as defined by other means such as chemical, diffusion rate limited, electro-magnetic, or light illumination, or any combination thereof. By “diffusion rate limited” (for example diffusion defined volumes) is meant spaces that are only accessible to certain molecules or reactions because diffusion constraints effectively defining a space or volume as would be the case for two parallel laminar streams where diffusion will limit the migration of a target molecule from one stream to the other. By “chemical” defined volume or space is meant spaces where only certain target molecules can exist because of their chemical or molecular properties, such as size, where for example gel beads may exclude certain species from entering the beads but not others, such as by surface charge, matrix size or other physical property of the bead that can allow selection of species that may enter the interior of the bead. By “electro-magnetically” defined volume or space is meant spaces where the electro-magnetic properties of the target molecules or their supports such as charge or magnetic properties can be used to define certain regions in a space such as capturing magnetic particles within a magnetic field or directly on magnets. By “optically” defined volume is meant any region of space that may be defined by illuminating it with visible, ultraviolet, infrared, or other wavelengths of light such that only target molecules within the defined space or volume may be labeled. One advantage to the used of non-walled, or semipermeable is that some reagents, such as buffers, chemical activators, or other agents maybe passed in Applicants' through the discrete volume, while other material, such as target molecules, maybe maintained in the discrete volume or space. Typically, a discrete volume will include a fluid medium, (for example, an aqueous solution, an oil, a buffer, and/or a media capable of supporting cell growth) suitable for labeling of the target molecule with the indexable nucleic acid identifier under conditions that permit labeling. Exemplary discrete volumes or spaces useful in the disclosed methods include droplets (for example, microfluidic droplets and/or emulsion droplets), hydrogel beads or other polymer structures (for example poly-ethylene glycol di-acrylate beads or agarose beads), tissue slides (for example, fixed formalin paraffin embedded tissue slides with particular regions, volumes, or spaces defined by chemical, optical, or physical means), microscope slides with regions defined by depositing reagents in ordered arrays or random patterns, tubes (such as, centrifuge tubes, microcentrifuge tubes, test tubes, cuvettes, conical tubes, and the like), bottles (such as glass bottles, plastic bottles, ceramic bottles, Erlenmeyer flasks, scintillation vials and the like), wells (such as wells in a plate), plates, pipettes, or pipette tips among others. In certain example embodiments, the individual discrete volumes are the wells of a microplate. In certain example embodiments, the microplate is a 96 well, a 384 well, or a 1536 well microplate.

[1065] Incubating the sample at either the amplification step or the extraction steps as described herein can be performed using heat sources known in the art. Advantageously, the heat source can be readily commercially available heating sources that do not require complicated instrumentation. Exemplary heating systems can include heating blocks, incubators, and/or water baths with temperatures maintained by commercially available sous-vide cookers. In this way, sample diagnostics can be performed without the requirement of expensive and proprietary equipment found primarily in diagnostic laboratory and hospital settings.

[1066] In certain example embodiments, paper-based microfluidics may be used for transfer of samples or reagents. For example, paper strips having wax barrier printed at a defined distance from the end of a paper dipstick may be used to define a volume of reagent or sample to be transferred. For example, a wax barrier may be printed across a paper dipstick to define a microliter volume such that when the dipstick is transferred into a volume of a reagent or sample only a microliter of said reagent or sample is absorbed onto the dipstick. The dipstick may be place in a second reagent mix, where the reagent or sample will diffuse into the reaction mixture. Such components allow for preparation and use of the assay without specialized equipment such as pipettors.

[1067] Optical means may be used to assess the presence and level of a given target molecule. In one embodiment, an optical sensor detects unmasking of a fluorescent masking agent. In one embodiment, the device of the present invention may include handheld portable devices for diagnostic reading of an assay (see e.g., Vashist et al., Commercial Smartphone-Based Devices and Smart Applications for Personalized Healthcare Monitoring and Management, Diagnostics 2014, 4 (3), 104-128; mReader from Mobile Assay; and Holomic Rapid Diagnostic Test Reader).

[1068] As noted herein, certain embodiments allow detection via colorimetric change which has certain attendant benefits when embodiments are utilized in POC situations and or in resource poor environments where access to more complex detection equipment to readout the signal may be limited. However, portable embodiments disclosed herein may also be coupled with hand-held spectrophotometers that enable detection of signals outside the visible range. An example of a hand-held spectrophotometer device that may be used in combination with the present invention is described in Das et al. “Ultra-portable, wireless smartphone spectrophotometer for rapid, non-destructive testing of fruit ripeness.” Nature Scientific Reports. 2016, 6:32504, DOI: 10.1038/srep32504. Finally, in one embodiment utilizing quantum dot-based masking constructs, use of a hand-held UV light, or other suitable device, may be successfully used to detect a signal owing to the near complete quantum yield provided by quantum dots.

### Amplification Methods and Reagents

[1069] In certain example embodiments, target RNAs and/or DNAs may be amplified prior to activating the Fanzor polypeptide or a CRISPR effector protein in a detection method. Any suitable amplification DNA or RNA method or technique can be used for amplification. Exemplary methods are described herein and others suitable for use with the present systems and methods of the present invention described herein will be appreciated in view of the description herein.

[1070] In certain example embodiments, the RNA or DNA amplification is an isothermal amplification. In certain example embodiments, the isothermal amplification may be nucleic-acid sequenced-based amplification (NASBA), recombinase polymerase amplification (RPA), loop-mediated isothermal amplification (LAMP), strand displacement amplification (SDA), helicase-dependent amplification (HDA), or nicking enzyme amplification reaction (NEAR). In certain example embodiments, non-isothermal amplification methods may be used which include, but are not limited to, PCR, multiple displacement amplification (MDA), rolling circle amplification (RCA), ligase chain reaction (LCR), or ramification amplification method (RAM).

[1071] In certain other example embodiments, a recombinase polymerase amplification (RPA) reaction may be used to amplify the target nucleic acids. RPA reactions employ recombinases which are capable of pairing sequence-specific primers with homologous sequence in duplex DNA. If target DNA is present, DNA amplification is initiated and no other sample manipulation such as thermal cycling or chemical melting is required. The entire RPA amplification system is stable as a dried formulation and can be transported safely without refrigeration. RPA reactions may also be carried out at isothermal temperatures with an optimum reaction temperature of 37-42 degrees C. The sequence specific primers are designed to amplify a sequence comprising the target nucleic acid sequence to be detected. In certain example embodiments, a RNA polymerase promoter, such as a T7 promoter, is added to one of the primers. This results in an amplified double-stranded DNA product comprising the target sequence and a RNA polymerase promoter. After, or during, the RPA reaction, an RNA polymerase is added that will produce RNA from the double-stranded DNA templates. The amplified target RNA can then in turn be detected by the CRISPR effector system. In this way target DNA can be detected using the embodiments disclosed herein. RPA reactions can also be used to amplify target RNA. The target RNA is first converted to cDNA using a reverse transcriptase, followed by second strand DNA synthesis, at which point the RPA reaction proceeds as outlined above.

[1072] In certain embodiments, the amplifying step may take less than about 1 hour, 50 minutes, 40 minutes, 30 minutes, 25 minutes, 20 minutes or 15 minutes, which may depend on the sample, starting concentrations and nature of amplification used.

[1073] In an aspect, the isothermal amplification reagents and isothermal amplification may be utilized and performed with a thermostable Fanzor protein. The combination of thermostable protein and isothermal amplification reagents may be utilized to further improve reaction times for detection and diagnostics.

[1074] In one embodiment, the amplifying of the target molecules and the detection of the target molecules can be performed in a single reaction, for example, a ‘one-pot’ method. General guidance for use of a single-pot approach can be as described in Gootenberg, et al., Science 2018 Apr. 27: 360 (6387) 439-444 (using Cas13, Cas12a and Csm6 generally, detecting multiple targets in a single reaction, and specifically performing DNA extraction in a sample and using as input for direct detection at Figure S33); and Ding et al., “All-in-One Dual CRISPR-Cas12a (AIOD-CRISPR) Assay: A Case for Rapid, Ultrasensitive and Visual Detection of Novel Coronavirus SARS-COV-2 and HIV Virus,” doi: 10.1101/2020.03.19.998724, biorxiv preprint (utilizing a pair of crRNAs with dual CRISPR-Cas12a detection for a one-pot approach to target-specific nucleic acid detection).

[1075] Amplification of target molecules can be optimized by methods as detailed herein. In an aspect, the design optimizes the primers used in the amplification. In particular aspects, the isothermal amplification is used with Fanzor systems. In either approach, design considerations can follow a rational design for optimization of the reactions. Optimization of the methods as disclosed herein can include first screening primers to identify one or more sets of primers that work well for a particular target, Fanzor protein and/or reaction. Once the primers have been screened, titration of magnesium concentration can be performed to identify an optimal magnesium concentration for higher signal to noise readout. In an example, varying additives with specific primers, target, Fanzor protein, temperature, and other additive concentrations within the reaction can be identified. Optimization can be made with the goal of reducing the number of steps and buffer exchanges that have to occur in the reaction, simplifying the reaction and reducing the risks of contamination at transfer steps. Similarly, optimizing the salt levels as well as the type of salt utilized can further facilitate and optimize the one-pot detections disclosed herein.

[1076] Accordingly, in certain example embodiments the systems disclosed herein may include amplification reagents. Different components or reagents useful for amplification of nucleic acids are described herein. For example, an amplification reagent as described herein may include a buffer, such as a Tris buffer. A Tris buffer may be used at any concentration appropriate for the desired application or use, for example including, but not limited to, a concentration of 1 mM, 2 mM, 3 mM, 4 mM, 5 mM, 6 mM, 7 mM, 8 mM, 9 mM, 10 mM, 11 mM, 12 mM, 13 mM, 14 mM, 15 mM, 25 mM, 50 mM, 75 mM, 1 M, or the like. One of skill in the art will be able to determine an appropriate concentration of a buffer such as Tris for use with the present invention.

[1077] Other components of a biological or chemical reaction may include a cell lysis component in order to break open or lyse a cell for analysis of the materials therein. A cell lysis component may include, but is not limited to, a detergent, a salt as described above, such as NaCl, KCl, ammonium sulfate [(NH₄)₂SO₄], or others. Detergents that may be appropriate for the invention may include Triton X-100, sodium dodecyl sulfate (SDS), CHAPS (3-[(3-cholamidopropyl)dimethylammonio]-1-propanesulfonate), ethyl trimethyl ammonium bromide, nonyl phenoxypolyethoxylethanol (NP-40). Concentrations of detergents may depend on the particular application, and may be specific to the reaction in some cases. Amplification reactions may include dNTPs and nucleic acid primers used at any concentration appropriate for the invention, such as including, but not limited to, a concentration of 100 nM, 150 nM, 200 nM, 250 nM, 300 nM, 350 nM, 400 nM, 450 nM, 500 nM, 550 nM, 600 nM, 650 nM, 700 nM, 750 nM, 800 nM, 850 nM, 900 nM, 950 nM, 1 mM, 2 mM, 3 mM, 4 mM, 5 mM, 6 mM, 7 mM, 8 mM, 9 mM, 10 mM, 20 mM, 30 mM, 40 mM, 50 mM, 60 mM, 70 mM, 80 mM, 90 mM, 100 mM, 150 mM, 200 mM, 250 mM, 300 mM, 350 mM, 400 mM, 450 mM, 500 mM, or the like. Likewise, a polymerase useful in accordance with the invention may be any specific or general polymerase known in the art and useful or the invention, including Taq polymerase, Q5 polymerase, or the like.

[1078] A salt, such as magnesium chloride (MgCl₂), potassium chloride (KCl), or sodium chloride (NaCl), may be included in an amplification reaction, such as PCR, in order to improve the amplification of nucleic acid fragments. Although the salt concentration will depend on the particular reaction and application, in one embodiment, nucleic acid fragments of a particular size may produce optimum results at particular salt concentrations. Larger products may require altered salt concentrations, typically lower salt, in order to produce desired results, while amplification of smaller products may produce better results at higher salt concentrations. One of skill in the art will understand that the presence and/or concentration of a salt, along with alteration of salt concentrations, may alter the stringency of a biological or chemical reaction, and therefore any salt may be used that provides the appropriate conditions for a reaction of the present invention and as described herein. In certain preferred embodiments, when polynucleotide extraction beads such as magnetic beads are utilized, a Plant QuickExtract solution can be used in combination with a KCl buffer in optimized detection methods according to the present disclosure.

[1079] In some embodiments, amplification reagents as described herein may be appropriate for use in hot-start amplification. Hot start amplification may be beneficial in some embodiments to reduce or eliminate dimerization of adaptor molecules or oligos, or to otherwise prevent unwanted amplification products or artifacts and obtain optimum amplification of the desired product. Many components described herein for use in amplification may also be used in hot-start amplification. In some embodiments, reagents or components appropriate for use with hot-start amplification may be used in place of one or more of the composition components as appropriate. For example, a polymerase or other reagent may be used that exhibits a desired activity at a particular temperature or other reaction condition. In some embodiments, reagents may be used that are designed or optimized for use in hot-start amplification, for example, a polymerase may be activated after transposition or after reaching a particular temperature. Such polymerases may be antibody-based or aptamer-based. Polymerases as described herein are known in the art. Examples of such reagents may include, but are not limited to, hot-start polymerases, hot-start dNTPs, and photo-caged dNTPs. Such reagents are known and available in the art. One of skill in the art will be able to determine the optimum temperatures as appropriate for individual reagents.

[1080] Amplification of nucleic acids may be performed using specific thermal cycle machinery or equipment and may be performed in single reactions or in bulk, such that any desired number of reactions may be performed simultaneously. In some embodiments, amplification may be performed using microfluidic or robotic devices, or may be performed using manual alteration in temperatures to achieve the desired amplification. In some embodiments, optimization may be performed to obtain the optimum reactions conditions for the particular application or materials. One of skill in the art will understand and be able to optimize reaction conditions to obtain sufficient amplification.

[1081] In certain embodiments, detection of DNA with the methods or systems of the invention requires transcription of the (amplified) DNA into RNA prior to detection.

[1082] It will be evident that detection methods of the invention can involve nucleic acid amplification and detection procedures in various combinations. The nucleic acid to be detected can be any naturally occurring or synthetic nucleic acid, including but not limited to DNA and RNA, which may be amplified by any suitable method to provide an intermediate product that can be detected. Detection of the intermediate product can be by any suitable method including but not limited to binding and activation of a Fanzor or CRISPR protein which produces a detectable signal moiety by direct or collateral activity.

### Loop Mediated Isothermal Amplification (LAMP)

[1083] In certain example embodiments, a loop-mediated isothermal amplification (LAMP) reaction may be used to target nucleic acids, which encompasses both LAMP and RT-LAMP reactions. LAMP can be performed with a four-primer system for isothermal nucleic acid amplification in conjunction with a polymerase. Notomi et al., Nucleic Acids Res. 2000, 28, 12, Nagamine et al., Molecular and Cellular Probes (2002) 16, 223-229, doi: 10.1006/mcpr.2002.0415. When performing LAMP with a 4-primer system, two loop-forming inner primers, denoted as FIP and BIP, are provided with two outer primers, F3 and β3. The inner primers each contain two distinct sequences, one for priming in the first stage of the amplification and the other sequence for self-priming in subsequent amplification states. The two outer primers initiate strand displacement of nucleic acid strands initiated from the FIP and BIP primers, thereby generating formation of loops and strand displacement nucleic acid synthesis utilizing the provided polymerase. LAMP can be conducted with two to six primers, ranging from only the two loop-forming primers, up to at least the addition of 2 additional primers, LF and LB along with the two outer primers and two inner primers. LAMP technologies advantageously have high specificity and can work at a variety of pH and temperature. In a preferred aspect, the LAMP is an isothermal reaction at between about 45° C. to 75° C., 55 to 70° C. or 60° C. to 65° C. Colorimetric LAMP (Y. Zhang et al., doi: 10.1101/2020.92.26.20028373), RT-LAMP (Lamb et al., doi: 10.1101/2020.02.19.20025155; and Yang et al., doi: 10.1101/2020.03.02.20030130) have been developed for detection of COVID-19 and are incorporated herein by reference in their entirety.

[1084] In one embodiment, the LAMP reagents may include Bst 2.0+RTx or Bst 3.0 from New England Biolabs. In one embodiment, the LAMP reagents may comprise colorimetric or fluorescent detection. Detection of LAMP products can be accomplished using colorimetric tools, such as hydroxy napthol blue (see, e.g., Goto, M., et al., Colorimetric detection of loop-mediated isothermal amplification reaction by using hydroxy naphthol blue. Biotechniques, 2009. 46 (3): p. 167-72.) leuco triphenylmethane dyes (see, e.g., Miyamoto, S., et al., Method for colorimetric detection of double-stranded nucleic acid using leuco triphenylmethane dyes. Anal Biochem, 2015. 473: p. 28-33) and pH-snesitive dyes (see, e.g., Tanner, N. A., Y. Zhang, and T. C. Evans, Jr., Visual detection of isothermal nucleic acid amplification using pH-sensitive dyes. Biotechniques, 2015. 58 (2): p. 59-68); as well as fluorescent detection (see, e.g., Yu et al., Clinical Chemistry, hvaa102, doi: 10.1093/clinchem/hvaa102 12 May 2020), including use of quenching probes (see, e.g., Shirato et al., J Virol Methods. 2018 August;258:41-48. doi: 10.1016/j.jviromet.2018.05.006).

[1085] In an aspect, the primer sets for LAMP are designed to amplify one or more target sequences, generating amplicons that comprise the one or more target sequences. Optionally, the primers can comprise barcodes that can be designed as described elsewhere herein. Incubating to a temperature sufficient for LAMP amplification, e.g., 50° C.-72° C., more preferably 55° C. to 65° C., using a polymerase and, optionally a reverse transcriptase (in the event RT-LAMP is utilized). Preferably the enzymes utilized in the LAMP reaction are heat-stabilized. LAMP primer sites have been designed, see, e.g., Park et al., “Development of Reverse Transcription Loop-Mediated Isothermal Amplification Assays Targeting SARS-CoV-2” J. of Mol. Diag. (2020). Optionally, a control template is further provided with the sample, which may differ from the target sequence but share primer binding sites. In an exemplary embodiment, visual read out of the detection results can be accomplished using commercially-available lateral flow substrate, e.g., a commercially available paper substrate.

[1086] In certain example embodiments, the LAMP amplification reagents may include primers specific to SARS-COV2 or other pathogens or pathogenic mutations. LAMP reagents may further comprise colorimetric and/or fluorescent detection reagents, such as hydroxy napthol blue (see, e.g., Goto, M., et al., Colorimetric detection of loop-mediated isothermal amplification reaction by using hydroxy naphthol blue. Biotechniques, 2009. 46 (3): p. 167-72.) leuco triphenylmethane dyes (see, e.g., Miyamoto, S., et al., Method for colorimetric detection of double-stranded nucleic acid using leuco triphenylmethane dyes. Anal Biochem, 2015. 473: p. 28-33) and pH-snesitive dyes (see, e.g., Tanner, N.A., Y. Zhang, and T. C. Evans, Jr., Visual detection of isothermal nucleic acid amplification using pH-sensitive dyes. Biotechniques, 2015. 58 (2): p. 59-68); as well as fluorescent detection (see, e.g., Yu et al., Clinical Chemistry, hvaa102, doi: 10.1093/clinchem/hvaa102 12 May 2020), including use of quenching probes (see, e.g., Shirato et al., J Virol Methods. 2018 August;258:41-48. doi: 10.1016/j.jviromet.2018.05.006). An overview of LAMP methods, including OSD-LAMP, for sequence-specific detection is described in Becherer et al., Anal. Methods, 2020,12, 717-746, doi: 10.1039/C9AY02246E, incorporated herein by reference.

[1087] In embodiments, the LAMP amplification reagents can comprise oligonucleotide strand displacement (OSD) probes. As used herein, oligonucleotide strand displacement probes are also referred to herein as oligonucleotide strand exchange probes or one-step strand displacement probes. The general concept of the use of OSD exchange is depicted in FIG. 1 of Bhadra et al., High-surety isothermal amplification and detection of SARS-COV-2, including with crude enzymes, doi: 10.1101/2020.04.13.039941. OSD probes rely on the binding enthalpy between the target-binding probe and amplicon of the LAMP reaction yielding a strand exchange reaction, leading to an easily read change in fluorescent signal. As a result, the results of a LAMP reaction can be visually or optically read fluorogenic OSD probes.

[1088] In an aspect, the OSD probes comprise a sequence specific for a target molecule. The OSD probes may comprise a pre-hybridized nucleic acid sequence, strand wherein the target sequence is 5, 6, 7, 8, 9, 10, 11, 12 or 13 nucleotides longer than the strand to which it is hybridized, allowing for sequence-specific interaction with a complementary target, with the OSD undergoing strand exchange and yielding a change in fluorescent signal.

[1089] In an aspect, the OSD probes are provided at a concentration of about 50 nM to 200 nM, about 75 nM to 150 nM, less than or equal to 200 nM, 190 nM, 180 nM, 170 nM, 160 nM, 150 nM, 140 nM, 130 nM, 120 nM, 110 nM, 100 nM, 90 nM, 80 nM, 75 nM, 65 nM, or 50 nM. Probes can be designed to be complementary to the loop region between the Flc and F2 primer binding sites for the LAMP primers, this can be referred to as the long toehold region. The complementary portion can be between about 9 and 14 nucleotides long, more preferably 11-12 nucleotides long. In an aspect, the longer strand of the OSD is labeled with a fluorescent molecule at the 5′ or 3′ end of the strand. In an aspect, the label is provided on the end opposite the designed complementary target region (long toehold region). The short strand is prepared with a quencher on one end of the probe and can be designed to comprise a region complementary to a portion of the long strand. The OSD probes can be provided as part of LAMP reagents as described herein, which may comprise their use on any of the devices, cartridges or in any of the compositions as provided herein, including being provided as a lyophilized reagent in some instances.

### NASBA

[1090] In certain example embodiments, the RNA or DNA amplification is NASBA, which is initiated with reverse transcription of target RNA by a sequence-specific reverse primer to create a RNA/DNA duplex. RNase H is then used to degrade the RNA template, allowing a forward primer containing a promoter, such as the T7 promoter, to bind and initiate elongation of the complementary strand, generating a double-stranded DNA product. The RNA polymerase promoter-mediated transcription of the DNA template then creates copies of the target RNA sequence. Importantly, each of the new target RNAs can be detected by the nucleic acid component molecules thus further enhancing the sensitivity of the assay. Binding of the target RNAs by the nucleic acid component molecules then leads to activation of the Fanzor protein and the methods proceed as outlined above. The NASBA reaction has the additional advantage of being able to proceed under moderate isothermal conditions, for example at approximately 41° C., making it suitable for systems and devices deployed for early and direct detection in the field and far from clinical laboratories.

### RPA

[1091] In certain other example embodiments, a recombinase polymerase amplification (RPA) reaction may be used to amplify the target nucleic acids. RPA reactions employ recombinases which are capable of pairing sequence-specific primers with homologous sequence in duplex DNA. If target DNA is present, DNA amplification is initiated and no other sample manipulation such as thermal cycling or chemical melting is required. The entire RPA amplification system is stable as a dried formulation and can be transported safely without refrigeration. RPA reactions may also be carried out at isothermal temperatures with an optimum reaction temperature of 37-420 C. The sequence specific primers are designed to amplify a sequence comprising the target nucleic acid sequence to be detected. In certain example embodiments, a RNA polymerase promoter, such as a T7 promoter, is added to one of the primers. This results in an amplified double-stranded DNA product comprising the target sequence and a RNA polymerase promoter. After, or during, the RPA reaction, a RNA polymerase is added that will produce RNA from the double-stranded DNA templates. The amplified target RNA can then in turn be detected by the Fanzor system. In this way target DNA can be detected using the embodiments disclosed herein. RPA reactions can also be used to amplify target RNA. The target RNA is first converted to cDNA using a reverse transcriptase, followed by second strand DNA synthesis, at which point the RPA reaction proceeds as outlined elsewhere herein.

### Transposase Based Amplification

[1092] Embodiments disclosed herein provide systems and methods for isothermal amplification of target nucleic acid sequences by contacting oligonucleotides containing the target nucleic acid sequence with a transposon complex. The oligonucleotides may be single stranded or double stranded RNA, DNA, or RNA/DNA hybrid oligonucleotides. The transposon complex comprises a transposase and a transposon sequence comprising one or more RNA polymerase promoters. The transposase facilitates insertion of the one or more RNA polymerase promoters into the oligonucleotide. A RNA polymerase promoter can then transcribe the target nucleic acid sequence from the inserted one or more RNA polymerase promoters. One advantage of this system is that there is no need to heat or melt double-stranded DNA templates, since RNA polymerase polymerases require a double-stranded template. Such isothermal amplification is fast and simple, obviating the need for complicated and expensive instrumentation for denaturation and cooling. In certain example embodiment the RNA polymerase promoter is a native of modified T7 RNA promoter.

[1093] The term “transposon”, as used herein, refers to a nucleic acid segment, which is recognized by a transposase or an integrase enzyme and which is an essential component of a functional nucleic acid-protein complex (i.e., a transposome) capable of transposition. The term “transposase” as used herein refers to an enzyme, which is a component of a functional nucleic acid-protein complex capable of transposition and which is mediating transposition. The term “transposase” also refers to integrases from retrotransposons or of retroviral origin. Transposon complexes form between a transposase enzyme and a fragment of double stranded DNA that contains a specific binding sequence for the enzyme, termed “transposon end”. The sequence of the transposon binding site can be modified with other bases, at certain positions, without affecting the ability for transposon complex to form a stable structure that can efficiently transpose into target DNA.

[1094] In embodiments provided herein, the transposon complex may comprise a transposase and a transposon sequence comprising one or more RNA polymerase promoters. The term “promoter” refers to a region of DNA involved in binding the RNA polymerase to initiate transcription. In specific embodiments, the RNA polymerase promoter may be a T7 RNA polymerase promoter. The T7 RNA promoter may be inserted into the double-stranded polynucleotide using the transposase. In one embodiment, insertion of the T7 RNA polymerase promoter into the oligonucleotide may be random.

[1095] The frequency of transposition is very low for most transposons, which use complex mechanisms to limit activity. Tn5 transposase, for example, utilizes a DNA binding sequence that is suboptimal and the C-terminus of the transposase interferes with DNA binding. Mechanisms involved in Tn5 transposition have been carefully characterized by Reznikoff and colleagues. Tn5 transposes by a cut-and-paste mechanism. The transposon has two pairs of 19 bp elements that are utilized by the transposase: outside elements (OE) and inside elements (IE). One transposase monomer binds to each of the two elements that are utilized. After a monomer is bound to each end of the transposon, the two monomers dimerize, forming a synapse. Vectors with donor backbones of at least 200 bp, but less than 1000 bp, are most functional for transposition in bacteria. Transposon cleavage occurs by trans catalysis and only when monomers bound to each DNA end are in a synaptic complex. Tn5 transposes with a relaxed target site selection and can therefore insert into target DNA with little to no target sequence specificity.

[1096] The natural downregulation of Tn5 transposition can be overcome by selection of a hyperactive transposase and by optimizing the transposase-binding elements [Yorket al. 1998]. A mosaic element (ME), made by modification of three bases of the wild-type OE, led to a 50-fold increase in transposition events in bacteria as well as cell-free systems. The combined effect of the optimized ME and hyperactive mutant transposase is estimated to result in a 100-fold increase in transposition activity. Goryshin et al showed that preformed Tn5 transposition complexes could be functionally introduced into bacterial or yeast by electroporation [Goryshin et al. 2000]. Linearization of the DNA, to have inverted repeats precisely positioned at both ends of the transposon, allowed Goryshin and coworkers to bypass the cutting step of transposition thus enhancing transposition efficiency.

[1097] In one embodiment, the transposase may be used to tagment the oligonucleotide sequence comprising the target sequence. The term “tagmentation” refers to a step in the Assay for Transposase Accessible Chromatin using sequencing (ATAC-seq) as described. (See, Buenrostro, J. D., Giresi, P. G., Zaba, L. C., Chang, H. Y., Greenleaf, W. J., Transposition of native chromatin for fast and sensitive epigenomic profiling of open chromatin, DNA-binding proteins and nucleosome position. Nature methods 2013; 10 (12): 1213-1218). Specifically, a hyperactive Tn5 transposase loaded in vitro with adapters for high-throughput DNA sequencing, can simultaneously fragment and tag a genome with sequencing adapters. In one embodiment the adapters are compatible with the methods described herein.

[1098] In one embodiment, the transposase may be a Tn5 transposase. In one embodiment, the transposase may be a variant of a Tn5 transposase, or an engineered transposase. Transposases may be engineered using any method known in the art. The engineered transposase may be optimized to function at a temperature ranging from 30° C. to 45° C., 35° C. to 40° C. or any temperature in between. The engineered transposase may be optimized to release from the oligonucleotide at a faster rate compared to a wild-type transposase.

[1099] In one embodiment, the transposase may be a Tn5 transposase, a Mu transposase, or a Tn7 transposase. Transposition efficiency in vitro may vary depending on the transposon system used. Generally, Tn5 and Mu transposases effect higher levels of transposition efficiency. In one embodiment, insertion may be random. In one embodiment, insertion may occur in GC rich regions of the target sequence.

[1100] In one embodiment, the transposon sequence may comprise two 19 base pair Mosaic End (ME) Tn5 transposase recognition sequences. Tn5 transposases will generally transpose any DNA sequence contained between such short 19 base pair ME Tn5 transposase recognition sequences.

[1101] In one embodiment, use of a transposase allows for separation of a double-stranded polynucleotide in the absence of heat or melting. Approaches can be adapted from those described in PCT/US2019/039195, incorporated herein by reference.

### Nickase Dependent Amplification

[1102] In an embodiment of the invention may comprise nickase-based amplification. The nicking enzyme may be a Fanzor protein. Accordingly, the introduction of nicks into dsDNA can be programmable and sequence-specific. In an embodiment of the invention, two guides can be designed to target opposite strands of a dsDNA target. According to the invention, the nickase can be Fanzor, or one may use any CRISPR protein such as Cpf1, C2c1, Cas9, or any ortholog or CRISPR protein that cleaves or is engineered to cleave a single strand of a DNA duplex. In a particular embodiment, the Fanzor is utilized in the nickase dependent amplification. The nicked strands may then be extended by a polymerase. In an embodiment, the locations of the nicks are selected such that extension of the strands by a polymerase is towards the central portion of the target duplex DNA between the nick sites. In one embodiment, primers are included in the reaction capable of hybridizing to the extended strands followed by further polymerase extension of the primers to regenerate two dsDNA pieces: a first dsDNA that includes the first strand Fanzor (or CRISPR effector) guide site or both the first and second strand Fanzor (or CRISPR effector) guide sites, and a second dsDNA that includes the second strand Fanzor guide site or both the first and second strand Fanzor (or CRISPR effector) guide sites. These pieces continue to be nicked and extended in a cyclic reaction that exponentially amplifies the region of the target between nicking sites. Alternatively, a CRISPR-Cas protein instead of Fanzor can be used for nickase-based amplification, and such methods are known in the art.

[1103] The amplification can be isothermal and selected for temperature. In one embodiment, the amplification proceeds rapidly at 37 degrees C. In other embodiments, the temperature of the isothermal amplification may be chosen by selecting a polymerase (e.g., Bsu, Bst, Phi29, klenow fragment etc.).operable at a different temperature.

[1104] Thus, whereas nicking isothermal amplification techniques use nicking enzymes with fixed sequence preference (e.g. in nicking enzyme amplification reaction or NEAR), which requires denaturing of the original dsDNA target to allow annealing and extension of primers that add the nicking substrate to the ends of the target, use of a Fanzor or CRISPR nickase wherein the nicking sites can be programed via guide RNAs means that no denaturing step is necessary, enabling the entire reaction to be truly isothermal. This also simplifies the reaction because these primers that add the nicking substrate are different than the primers that are used later in the reaction, meaning that NEAR requires two primer sets (i.e., 4 primers) while Fanzor or CRISPR effector (e.g., Cpf1) nicking amplification only requires one primer set (i.e., two primers). This makes nicking Fanzor or CRISPR effector amplification much simpler and easier to operate without complicated instrumentation to perform the denaturation and then cooling to the isothermal temperature.

### Helicase-Dependent Amplification

[1105] In helicase-dependent amplification, a helicase enzyme is used to unwind a double stranded nucleic acid to generate templates for primer hybridization and subsequent primer-extension. This process utilizes two oligonucleotide primers, each hybridizing to the 3′-end of either the sense strand containing the target sequence or the anti-sense strand containing the reverse-complementary target sequence. The HDA reaction is a general method for helicase-dependent nucleic acid amplification.

[1106] In combining this method with a Fanzor detection system, the target nucleic acid may be amplified by opening R-loops of the target nucleic acid using first and second Fanzor complexes. The first and second strand of the target nucleic acid may thus be unwound using a helicase, allowing primers and polymerase to bind and extend the DNA under isothermal conditions.

[1107] The term “helicase” refers here to any enzyme capable of unwinding a double stranded nucleic acid enzymatically. For example, helicases are enzymes that are found in all organisms and in all processes that involve nucleic acid such as replication, recombination, repair, transcription, translation and RNA splicing. (Kornberg and Baker, DNA Replication, W. H. Freeman and Company (2nd ed. (1992)), especially chapter 11). Any helicase that translocates along DNA or RNA in a 5′ to 3′ direction or in the opposite 3′ to 5′ direction may be used in present embodiments of the invention. This includes helicases obtained from prokaryotes, viruses, archaea, and eukaryotes or recombinant forms of naturally occurring enzymes as well as analogues or derivatives having the specified activity. Examples of naturally occurring DNA helicases, described by Kornberg and Baker in chapter 11 of their book, DNA Replication, W. H. Freeman and Company (2nd ed. (1992)), include E. coli helicase I, II, III, & IV, Rep, DnaB, PriA, PcrA, T4 Gp41helicase, T4 Dda helicase, T7 Gp4 helicases, SV40 Large T antigen, yeast RAD. Additional helicases that may be useful in HDA include RecQ helicase (Harmon and Kowalczykowski, J. Biol. Chem. 276:232-243 (2001)), thermostable UvrD helicases from T. tengcongensis (disclosed in this invention, Example XII) and T. thermophilus (Collins and Mccarthy, Extremophiles. 7:35-41. (2003)), thermostable DnaB helicase from T. aquaticus (Kaplan and Steitz, J. Biol. Chem. 274:6889-6897 (1999)), and MCM helicase from archaeal and eukaryotic organisms ((Grainge et al., Nucleic Acids Res. 31:4888-4898 (2003)).

[1108] A traditional definition of a helicase is an enzyme that catalyzes the reaction of separating/unzipping/unwinding the helical structure of nucleic acid duplexes (DNA, RNA or hybrids) into single-stranded components, using nucleoside triphosphate (NTP) hydrolysis as the energy source (such as ATP). However, it should be noted that not all helicases fit this definition anymore. A more general definition is that they are motor proteins that move along the single-stranded or double stranded nucleic acids (usually in a certain direction, 3′ to 5′ or 5 to 3, or both), i.e., translocases, that can or cannot unwind the duplexed nucleic acid encountered. In addition, some helicases simply bind and “melt” the duplexed nucleic acid structure without an apparent translocase activity.

[1109] Helicases exist in all living organisms and function in all aspects of nucleic acid metabolism. Helicases are classified based on the amino acid sequences, directionality, oligomerization state and nucleic-acid type and structure preferences. The most common classification method was developed based on the presence of certain amino acid sequences, called motifs. According to this classification helicases are divided into 6 super families: SF1, SF2, SF3, SF4, SF5 and SF6. SF1 and SF2 helicases do not form a ring structure around the nucleic acid, whereas SF3 to SF6 do. Superfamily classification is not dependent on the classical taxonomy.

[1110] DNA helicases are responsible for catalyzing the unwinding of double-stranded DNA (dsDNA) molecules to their respective single-stranded nucleic acid (ssDNA) forms.

[1111] Although structural and biochemical studies have shown how various helicases can translocate on ssDNA directionally, consuming one ATP per nucleotide, the mechanism of nucleic acid unwinding and how the unwinding activity is regulated remains unclear and controversial (T. M. Lohman, E. J. Tomko, C. G. Wu, “Non-hexameric DNA helicases and translocases: mechanisms and regulation,” Nat Rev Mol Cell Biol 9:391-401 (2008)). Since helicases can potentially unwind all nucleic acids encountered, understanding how their unwinding activities are regulated can lead to harnessing helicase functions for biotechnology applications.

[1112] The term “HDA” refers to Helicase Dependent Amplification, which is an in vitro method for amplifying nucleic acids by using a helicase preparation for unwinding a double stranded nucleic acid to generate templates for primer hybridization and subsequent primer-extension. This process utilizes two oligonucleotide primers, each hybridizing to the 3′-end of either the sense strand containing the target sequence or the anti-sense strand containing the reverse-complementary target sequence. The HDA reaction is a general method for helicase-dependent nucleic acid amplification.

[1113] The invention comprises use of any suitable helicase known in the art. These include, but are not necessarily limited to, UvrD helicase, CRISPR-Cas3 helicase, E. coli helicase I, E. coli helicase II, E. coli helicase III, E. coli helicase IV, Rep helicase, DnaB helicase, PriA helicase, PcrA helicase, T4 Gp41 helicase, T4 Dda helicase, SV40 Large T antigen, yeast RAD helicase, RecD helicase, RecQ helicase, thermostable T. tengcongensis UvrD helicase, thermostable T. thermophilus UvrD helicase, thermostable T. aquaticus DnaB helicase, Dda helicase, papilloma virus El helicase, archaeal MCM helicase, eukaryotic MCM helicase, and T7 Gp4 helicase.

[1114] In particularly preferred embodiments, the helicase comprises a super mutation. In particular embodiments, although the E coli mutation has been described, the mutations were generated by sequence alignment (e.g., D409A/D410A for TteUvrd) and result in thermophilic enzymes working at lower temperatures like 37° C., which is advantageous for amplification methods and systems described herein. In one embodiment, the super mutations is an aspartate to alanine mutation, with position based on sequence alignment. In one embodiment, the super mutant helicase is selected from WP 003870487.1 Thermoanaerobacter ethanolicus 403/404, WP 049660019.1 Bacillus sp. FJAT-27231 407/408, WP_034654680.1 Bacillus megaterium 415/416, WP_095390358.1 Bacillus simplex 407/408, and WP_055343022.1 Paeniclostridium sordellii 402/403.

### Extraction and Processing Methods and Reagents for Detection and Amplification

[1115] Also described herein are composition and reagents that can be used for various processing and amplification steps that are optionally employed prior to a detection reaction. Such processing can include extraction, cell lysis, and other sample and nucleic acid preparation techniques.

[1116] Exemplary components of a biological or chemical reaction may include a cell lysis component in order to break open or lyse a cell for analysis of the materials therein. A cell lysis component may include, but is not limited to, a detergent, a salt as described above, such as NaCl, KCl, ammonium sulfate [(NH₄) 2SO₄], or others. Detergents that may be appropriate for the invention may include Triton X-100, sodium dodecyl sulfate (SDS), CHAPS (3-[(3-cholamidopropyl)dimethylammonio]-1-propanesulfonate), ethyl trimethyl ammonium bromide, nonyl phenoxypolyethoxylethanol (NP-40). Concentrations of detergents may depend on the particular application and may be specific to the reaction in some cases. Amplification reactions may include dNTPs and nucleic acid primers used at any concentration appropriate for the invention, such as including, but not limited to, a concentration of 100 nM, 150 nM, 200 nM, 250 nM, 300 nM, 350 nM, 400 nM, 450 nM, 500 nM, 550 nM, 600 nM, 650 nM, 700 nM, 750 nM, 800 nM, 850 nM, 900 nM, 950 nM, 1 mM, 2 mM, 3 mM, 4 mM, 5 mM, 6 mM, 7 mM, 8 mM, 9 mM, 10 mM, 20 mM, 30 mM, 40 mM, 50 mM, 60 mM, 70 mM, 80 mM, 90 mM, 100 mM, 150 mM, 200 mM, 250 mM, 300 mM, 350 mM, 400 mM, 450 mM, 500 mM, or the like. Likewise, a polymerase useful in accordance with the invention may be any specific or general polymerase known in the art and useful or the invention, including Taq polymerase, Q5 polymerase, or the like.

[1117] In certain aspects, embodiments disclosed herein are directed to compositions and kits that consolidate extraction-free lysis and amplification of target nucleic acids into a single reaction volume. In certain example embodiments, the extraction-free lysis reagents can be used to extract nucleic acids from cells and/or viral particles. In contrast to existing protocols, the extraction-free lysis solution does not require isolation of the nucleic acid prior to further amplification. The extraction-free lysis reagents may be mixed with amplification reagents such as standard RT-PCR amplification reactions.

[1118] In one embodiment, extraction-free lysis solution and isothermal amplification reagents may be lyophilized in a single reaction volume, to be reconstituted by addition of a sample to be assayed. In certain other embodiments, the extraction-free lysis solution and isothermal amplification reagents may be lyophilized and stored on a cartridge or lateral flow strip, as discussed in further detail below.

[1119] In certain example embodiments, the single lysis reaction compositions and kits may further comprise one or more Fanzor proteins possessing collateral activity and a detection construct. Pairing with one or more Fanzor proteins may increase sensitivity or specificity of the assay. In certain example embodiments, the one or more Fanzor proteins may be thermostable Fanzor proteins. Example Fanzor proteins are disclosed in further detail below.

[1120] In certain example embodiments, the single lysis amplification reaction compositions and kits may comprise optimized primers and/or one or more additives. In an aspect, the design optimizes the primers used in the amplification. In particular aspects, the isothermal amplification is used alone. In another aspect, the isothermal amplification is used with Fanzor systems. In either approach, design considerations can follow a rational design for optimization of the reactions. In an example, varying additives with specific primers, target, Fanzor protein, temperature, and other additive concentrations within the reaction can be identified. Optimization can be made with the goal of reducing the number of steps and buffer exchanges that have to occur in the reaction, simplifying the reaction and reducing the risks of contamination at transfer steps. In an aspect, addition of inhibitors, such as proteinase K can be considered so that buffer exchanges can be reduced. Similarly, optimizing the salt levels as well as the type of salt utilized can further facilitate and optimize the one-pot detections disclosed herein. In an aspect, potassium chloride can be utilized rather than sodium chloride when such amplification approaches are used with bead concentration in a lysis step.

[1121] In one embodiment, the compositions and kits may further comprise nucleic acid binding bead. The bead may be used to capture, concentrate or otherwise enrich for particular material. The bead may be magnetic and may be provided to capture nucleic acid material. In another aspect, the bead is a silica bead. Beads may be utilized in an extraction step of the methods disclosed herein. Beads can be optionally used with the methods described herein, including with the one-pot methods that allow for concentration of viral nucleic acids from large volume samples, such as saliva or swab samples to allow for a single one-pot reaction method. Concentration of desired target molecules can be increased by about 10-fold, 50-fold, 100-fold, 200-fold, 500-fold, 800-fold, 1000-fold, 1500-fold, 2000-fold, 2500-fold, 3000-fold, or more.

[1122] Magnetic beads in a PEG and salt solution are preferred in an aspect, and in embodiments bind to viral RNA and/or DNA which allows for concentration and lysis concurrently. Silica beads can be used in another aspect. Capture moieties such as oligonucleotide functionalized beads are envisioned for use. The beads may be using with the extraction reagents, allowed to incubate with a sample and the lysis/extraction buffer, thereby concentrating target molecules on the beads. When used with a cartridge device detailed elsewhere herein, a magnet can be activated and the beads collected, with optional flushing of the extraction buffer and one or more washes performed. Advantageously, the beads can be used in the one-pot methods and systems without additional washings of the beads, allowing for a more efficient process without increased risks of contamination in multi-step processes. Beads can be utilized with the isothermal amplifications detailed herein, and the beads can flow into an amplification chamber of the cartridge or be maintained in the pot for the amplification step. Upon heating, nucleic acid can be released off the beads.

### Exemplary Detection, Selection, and Screening Applications

### Detection Methods Such as FISH

[1123] In one aspect, the invention provides an engineered, non-naturally occurring composition comprising a catalytically inactivate Fanzor polypeptide described herein and use this system in detection methods such as fluorescence in situ hybridization (FISH). A dead Fanzor polypeptide which lacks the ability to produce DNA double-strand breaks may be fused with a marker, such as fluorescent protein, such as the enhanced green fluorescent protein (eEGFP) and co-expressed with small nucleic acid component molecules to target pericentric, centric and teleomeric repeats in vivo. The dead Fanzor polypeptide system can be used to visualize both repetitive sequences and individual genes in the human genome. Such new applications of labelled dead Fanzor polypeptide may be important in imaging cells and studying the functional nuclear architecture, especially in cases with a small nucleus volume or complex 3-D structures. (Chen B, Gilbert L A, Cimini B A, Schnitzbauer J, Zhang W, Li G W, Park J, Blackburn E H, Weissman J S, Qi L S, Huang B. 2013. Dynamic imaging of genomic loci in living human cells by an optimized CRISPR/Cas system. Cell 155 (7): 1479-91. doi: 10.1016/j.cell.2013.12.001.)

### Patient-Specific Screening Methods

[1124] The nucleic acid-targeting system such as the systems, compositions, and components thereof described herein that targets DNA, e.g., pathogenic and non-pathogenic mutations (e.g., repeats (including but not limited to trinucleotide repeats), in/dels, polymorphisms (including but not limited to single nucleotide polymorphisms), and/or the like) can be used to screen patients or patent samples for the presence of such pathogenic and non-pathogenic mutations. In some embodiments, the mutations can be the target of the RNA component molecule of the nucleic acid-targeting system, and if there is binding thereto by the nucleic acid-targeting system, that binding can be detected, to thereby indicate that such a mutation is present. Thus, a nucleic acid-targeting system can be used to screen patients or patient samples for the presence of the mutation(s). The patient can then be administered suitable compound(s) to address the condition; or, can be administered a nucleic acid-targeting system, such as a system of the present invention, to bind to and cause insertion, deletion or mutation and alleviate the condition. It will be appreciated that patients can be human and non-human animal, particularly pets and other companion animals (e.g., dogs, cats, horses and/or the like), agriculturally important animals (such as elite breeding stock), and endangered species or other wild animal in need of screening.

### Genome Wide Knock-Out Screening

[1125] The Fanzor polypeptide and systems described herein can be used to perform efficient and cost effective functional genomic screens. Such screens can utilize Fanzor polypeptide based genome wide libraries. Such screens and libraries can provide for determining the function of genes, cellular pathways genes are involved in, and how any alteration in gene expression can result in a particular biological process. An advantage of the present invention is that the composition avoids off-target binding and its resulting side effects. This is achieved using systems arranged to have a high degree of sequence specificity for the target DNA. In preferred embodiments of the invention, the Fanzor polypeptide complexes are Fanzor polypeptide complexes.

[1126] In embodiments of the invention, a genome wide library may comprise a plurality of Fanzor polypeptide nucleic acid component molecules, as described herein, comprising guide/spacer sequences that are capable of targeting a plurality of target sequences in a plurality of genomic loci in a population of eukaryotic cells. The population of cells may be a population of embryonic stem (ES) cells. The target sequence in the genomic locus may be a non-coding sequence. The non-coding sequence may be an intron, regulatory sequence, splice site, 3′ UTR, 5′ UTR, or polyadenylation signal. Gene function of one or more gene products may be altered by said targeting. The targeting may result in a knockout of gene function. The targeting of a gene product may comprise more than one nucleic acid component molecule. A gene product may be targeted by 2, 3, 4, 5, 6, 7, 8, 9, or 10 nucleic acid component molecules, preferably 3 to 4 per gene. Off-target modifications may be minimized by exploiting the staggered double strand breaks generated by Fanzor polypeptide complexes or by utilizing methods analogous to those used in composition (See, e.g., DNA targeting specificity of RNA-guided Cas nucleases. Hsu, P., Scott, D., Weinstein, J., Ran, FA., Konermann, S., Agarwala, V., Li, Y., Fine, E., Wu, X., Shalem, O., Cradick, TJ., Marraffini, L A., Bao, G., & Zhang, F. Nat Biotechnol doi: 10.1038/nbt.2647 (2013)), incorporated herein by reference. The targeting may be of about 100 or more sequences. The targeting may be of about 1000 or more sequences. The targeting may be of about 20,000 or more sequences. The targeting may be of the entire genome. The targeting may be of a panel of target sequences focused on a relevant or desirable pathway. The pathway may be an immune pathway. The pathway may be a cell division pathway.

[1127] One aspect of the invention comprehends a genome wide library that may comprise a plurality of nucleic acid component molecules that may comprise guide/spacer sequences that are capable of targeting a plurality of target sequences in a plurality of genomic loci, wherein said targeting results in a knockout of gene function. This library may potentially comprise nucleic acid component molecules that target each and every gene in the genome of an organism.

[1128] In one embodiment of the invention, the organism or subject is a eukaryote (including mammal including human) or a non-human eukaryote or a non-human animal or a non-human mammal. In one embodiment, the organism or subject is a non-human animal, and may be an arthropod, for example, an insect, or may be a nematode. In some methods of the invention the organism or subject is a plant. In some methods of the invention, the organism or subject is a mammal or a non-human mammal. A non-human mammal may be for example a rodent (preferably a mouse or a rat), an ungulate, or a primate. In some methods of the invention the organism or subject is algae, including microalgae, or is a fungus.

[1129] The knockout of gene function may comprise introducing into each cell in the population of cells a vector system of one or more vectors comprising an engineered, non-naturally occurring composition herein. The nucleic acid component molecule sequence may target a unique gene in each cell, wherein the Fanzor polypeptide is operably linked to a regulatory element, wherein when transcribed, the nucleic acid component molecule comprising the spacer sequence directs sequence-specific binding of the Fanzor polypeptide to a target sequence in the genomic loci of the unique gene, inducing cleavage of the genomic loci by the Fanzor polypeptide, and confirming different knockout mutations in a plurality of unique genes in each cell of the population of cells thereby generating a gene knockout cell library. The invention comprehends that the population of cells is a population of eukaryotic cells, and in a preferred embodiment, the population of cells is a population of embryonic stem(ES) cells.

[1130] The one or more vectors may be plasmid vectors. The vector may be a single vector comprising a Fanzor polypeptide, a nucleic acid component, and optionally, a selection marker into target cells. Not being bound by a theory, the ability to simultaneously deliver a Fanzor polypeptide and nucleic acid component through a single vector enables application to any cell type of interest, without the need to first generate cell lines that express the Fanzor polypeptide. The regulatory element may be an inducible promoter. The inducible promoter may be a doxycycline inducible promoter. In some methods of the invention the expression of the nucleic acid component molecule sequence is under the control of the T7 promoter and is driven by the expression of T7 polymerase. The confirming of different knockout mutations may be by whole exome sequencing. The knockout mutation may be achieved in 100 or more unique genes. The knockout mutation may be achieved in 1000 or more unique genes. The knockout mutation may be achieved in 20,000 or more unique genes. The knockout mutation may be achieved in the entire genome. The knockout of gene function may be achieved in a plurality of unique genes which function in a particular physiological pathway or condition. The pathway or condition may be an immune pathway or condition. The pathway or condition may be a cell division pathway or condition.

### Functional Alteration and Screening

[1131] In another aspect, the present invention provides for a method of functional evaluation and screening of genes. The use of the compositions to precisely deliver functional domains, to activate or repress genes or to alter epigenetic state by precisely altering the methylation site on a specific locus of interest, can be with one or more nucleic acid component molecules applied to a single cell or population of cells or with a library applied to genome in a pool of cells ex vivo or in vivo comprising the administration or expression of a library comprising a plurality of nucleic acid components (comprising spacer molecules) and wherein the screening further comprises use of a Fanzor polypeptide, wherein the complex comprising the Fanzor polypeptide is modified to comprise a heterologous functional domain. In an aspect the invention provides a method for screening a genome comprising the administration to a host or expression in a host in vivo of a library. In an aspect the invention provides a method as herein discussed further comprising an activator administered to the host or expressed in the host. In an aspect the invention provides a method as herein discussed wherein the activator is attached to a Fanzor polypeptide. In an aspect the invention provides a method as herein discussed wherein the activator is attached to the N terminus or the C terminus of the Fanzor polypeptide. In an aspect the invention provides a method as herein discussed wherein the activator is attached to a nucleic acid component loop. In an aspect the invention provides a method as herein discussed further comprising a repressor administered to the host or expressed in the host. In an aspect the invention provides a method as herein discussed, wherein the screening comprises affecting and detecting gene activation, gene inhibition, or cleavage in the locus.

[1132] It is also preferred to target endogenous (regulatory) control elements (such as enhancers and silencers) e.g., in addition to a promoter or promoter-proximal elements. Thus, the invention can also be used to target endogenous control elements (including enhancers and silencers) in addition to targeting of the promoter. These control elements can be located upstream and downstream of the transcriptional start site (TSS), starting from 200 bp from the TSS to 100 kb away. Targeting of known control elements can be used to activate or repress the gene of interest. In some cases, a single control element can influence the transcription of multiple target genes. Targeting of a single control element could therefore be used to control the transcription of multiple genes simultaneously.

[1133] Targeting of putative control elements on the other hand (e.g. by tiling the region of the putative control element as well as 200 bp up to 100 kB around the element) can be used as a means to verify such elements (by measuring the transcription of the gene of interest) or to detect novel control elements (e.g. by tiling 100 kb upstream and downstream of the TSS of the gene of interest). In addition, targeting of putative control elements can be useful in the context of understanding genetic causes of disease. Many mutations and common SNP variants associated with disease phenotypes are located outside coding regions. Targeting of such regions with either the activation or repression systems described herein can be followed by readout of transcription of either a) a set of putative targets (e.g., a set of genes located in closest proximity to the control element) or b) whole-transcriptome readout by e.g. RNAseq or microarray. This would allow for the identification of likely candidate genes involved in the disease phenotype. Such candidate genes could be useful as novel drug targets.

[1134] Histone acetyltransferase (HAT) inhibitors are mentioned herein. However, an alternative In one embodiment is for the one or more functional domains to comprise an acetyltransferase, preferably a histone acetyltransferase. These are useful in the field of epigenomics, for example in methods of interrogating the epigenome. Methods of interrogating the epigenome may include, for example, targeting epigenomic sequences. Targeting epigenomic sequences may include the nucleic acid component molecule being directed to an epigenomic target sequence. Epigenomic target sequence may include, in one embodiment, include a promoter, silencer or an enhancer sequence.

### Saturating Mutagenesis

[1135] The compositions herein can be used to perform saturating or deep scanning mutagenesis of genomic loci in conjunction with a cellular phenotype—for instance, for determining critical minimal features and discrete vulnerabilities of functional elements required for gene expression, drug resistance, and reversal of disease. By saturating or deep scanning mutagenesis is meant that every or essentially every DNA base is cut within the genomic loci. A library of Cas1 effector protein nucleic acid component molecules may be introduced into a population of cells. The library may be introduced, such that each cell receives a single nucleic acid component. In the case where the library is introduced by transduction of a viral vector, as described herein, a low multiplicity of infection (MOI) is used. The library may include nucleic acid components targeting every sequence upstream of a (targeted adjacent motif) (TAM) sequence in a genomic locus. The library may include at least 100 non-overlapping genomic sequences upstream of a TAMsequence for every 1000 base pairs within the genomic locus. The library may include nucleic acid components targeting sequences upstream of at least one different TAMsequence. The composition may include more than one Fanzor polypeptide. Any Fanzor polypeptide protein as described herein, including orthologues or engineered Fanzor polypeptides. The frequency of off target sites for a nucleic acid component may be less than 500. Off target scores may be generated to select nucleic acid components with the lowest off target sites. Any phenotype determined to be associated with cutting at a nucleic acid component target site may be confirmed by using nucleic acid components targeting the same site in a single experiment. Validation of a target site may also be performed by using a modified Fanzor polypeptide, as described herein, and two nucleic acid components targeting the genomic site of interest. Not being bound by a theory, a target site is a true hit if the change in phenotype is observed in validation experiments.

[1136] The genomic loci may include at least one continuous genomic region. The at least one continuous genomic region may comprise up to the entire genome. The at least one continuous genomic region may comprise a functional element of the genome. The functional element may be within a non-coding region, coding gene, intronic region, promoter, or enhancer. The at least one continuous genomic region may comprise at least 1 kb, preferably at least 50 kb of genomic DNA. The at least one continuous genomic region may comprise a transcription factor binding site. The at least one continuous genomic region may comprise a region of DNase I hypersensitivity. The at least one continuous genomic region may comprise a transcription enhancer or repressor element. The at least one continuous genomic region may comprise a site enriched for an epigenetic signature. The at least one continuous genomic DNA region may comprise an epigenetic insulator. The at least one continuous genomic region may comprise two or more continuous genomic regions that physically interact. Genomic regions that interact may be determined by ‘4C technology’. 4C technology allows the screening of the entire genome in an unbiased manner for DNA segments that physically interact with a DNA fragment of choice, as is described in Zhao et al. ((2006) Nat Genet 38, 1341-7) and in U.S. Pat. No. 8,642,295, both incorporated herein by reference in its entirety. The epigenetic signature may be histone acetylation, histone methylation, histone ubiquitination, histone phosphorylation, DNA methylation, or a lack thereof.

[1137] The compositions for saturating or deep scanning mutagenesis can be used in a population of cells. The compositions can be used in eukaryotic cells, including but not limited to mammalian and plant cells. The population of cells may be prokaryotic cells. The population of eukaryotic cells may be a population of embryonic stem (ES) cells, neuronal cells, epithelial cells, immune cells, endocrine cells, muscle cells, erythrocytes, lymphocytes, plant cells, or yeast cells.

[1138] In one aspect, the present invention provides for a method of screening for functional elements associated with a change in a phenotype. The library may be introduced into a population of cells that are adapted to contain a Fanzor polypeptide. The cells may be sorted into at least two groups based on the phenotype. The phenotype may be expression of a gene, cell growth, or cell viability. The relative representation of the nucleic acid component molecules present in each group are determined; whereby genomic sites associated with the change in phenotype are determined by the representation of nucleic acid component molecules present in each group. The change in phenotype may be a change in expression of a gene of interest. The gene of interest may be upregulated, downregulated, or knocked out. The cells may be sorted into a high expression group and a low expression group. The population of cells may include a reporter construct that is used to determine the phenotype. The reporter construct may include a detectable marker. Cells may be sorted by use of the detectable marker.

[1139] In another aspect, the present invention provides for a method of screening for genomic sites associated with resistance to a chemical compound. The chemical compound may be a drug or pesticide. The library may be introduced into a population of cells that are adapted to contain a Fanzor polypeptide, wherein each cell of the population contains no more than one nucleic acid component molecule; the population of cells are treated with the chemical compound; and the representation of nucleic acid component molecules are determined after treatment with the chemical compound at a later time point as compared to an early time point, whereby genomic sites associated with resistance to the chemical compound are determined by enrichment of nucleic acid components. Representation of nucleic acid components may be determined by deep sequencing methods.

[1140] Useful in the practice of the instant invention utilizing compositions are methods used in compositions and reference is made to the article entitled BCL11A enhancer dissection by Cas-mediated in situ saturating mutagenesis. Canver, M.C., Smith, E. C., Sher, F., Pinello, L., Sanjana, N. E., Shalem, O., Chen, D. D., Schupp, P. G., Vinjamur, D. S., Garcia, S. P., Luc, S., Kurita, R., Nakamura, Y., Fujiwara, Y., Maeda, T., Yuan, G., Zhang, F., Orkin, S. H., & Bauer, D. E. DOI: 10.1038/nature¹⁵⁵²¹, published online Sep. 16, 2015, the article is herein incorporated by reference and discussed briefly below.

[1141] Canver et al. involves novel pooled guide RNA libraries to perform in situ saturating mutagenesis of the human and mouse BCL11A erythroid enhancers previously identified as an enhancer associated with fetal hemoglobin (HbF) level and whose mouse ortholog is necessary for erythroid BCL11A expression. This approach revealed critical minimal features and discrete vulnerabilities of these enhancers. Through editing of primary human progenitors and mouse transgenesis, the authors validated the BCL11A erythroid enhancer as a target for HbF reinduction. The authors generated a detailed enhancer map that informs therapeutic genome editing.

### In Situ Disease Detection

[1142] The compositions, systems, and/or components thereof can be used for diagnostic methods of detection such as in CASFISH (see e.g., Deng et al. 2015. PNAS USA 112 (38): 11870-11875), CRISPR-Live FISH (see e.g., Wang et al. 2020. Science; 365 (6459): 1301-1305), sm-FISH (Lee and Jefcoate. 2017. Front. Endocrinol. doi.org/10.3389/fendo.2017.00289), sequential FISH CRISPRainbow (Ma et al. Nat Biotechnol, 34 (2016), pp. 528-530), CRISPR-Sirius (Nat Methods, 15 (2018), pp. 928-931), Casilio (Cheng et al. Cell Res, 26 (2016), pp. 254-257), Halo-Tag based genomic loci visualization techniques (e.g., Deng et al. 2015. PNAS USA 112 (38): 11870-11875; Knight et al., Science, 350 (2015), pp. 823-826), RNA-aptamer based methods (e.g. Ma et al., J Cell Biol, 214 (2016), pp. 529-537), molecular beacon-based methods (e.g. Zhao et al. Biomaterials, 100 (2016), pp. 172-183; Wu et al. Nucleic Acids Res (2018)), Quantum Dot-based systems (e.g. Ma et al. Anal Chem, 89 (2017), pp. 12896-12901), multiplexed methods (e.g. Ma et al., Proc Natl Acad Sci USA, 112 (2015), pp. 3002-3007; Fu et al. Nat Commun, 7 (2016), p. 11707; Ma et al. Nat Biotechnol, 34 (2016), pp. 528-530; Shao et al. Nucleic Acids Res, 44 (2016), Article e⁸⁶); Wang et al. Sci Rep, 6 (2016), p. 26857), and other in situ CRISPR-hybridization based methods (e.g. Chen et al. Cell, 155 (2013), pp. 1479-1491; Gu et al. Science, 359 (2018), pp. 1050-1055; Tanebaum et al. Cell, 159 (2014), pp. 635-646; Ye et al. Protein Cell, 8 (2017), pp. 853-855; Chen et al. Nat Commun, 9 (2018), p. 5065; Shao et al. ACS Synth Biol (2017); Fu et al. Nat Commun, 7 (2016), p. 11707; Shao et al. Nucleic Acids Res, 44 (2016), Article e⁸⁶; Wang et al., Sci Rep, 6 (2016), p. 26857), all of which are incorporated by reference herein as if expressed in their entirety and whose teachings can be adapted to the compositions, systems, and components thereof described herein in view of the description herein.

[1143] In one embodiment, the composition, system, or component thereof can be used in a detection method, such as an in situ detection method described herein. In one embodiment, the composition, system, or component thereof can include a catalytically inactive Fanzor polypeptide described herein and use this system in detection methods such as fluorescence in situ hybridization (FISH) or any other described herein. In one embodiment, the inactivated Fanzor polypeptide, which lacks the ability to produce DNA double-strand breaks may be fused with a marker, such as fluorescent protein, such as the enhanced green fluorescent protein (eEGFP) and co-expressed with small nucleic acid component molecules to target pericentric, centric and telomeric repeats in vivo. The dead Fanzor polypeptide or system thereof can be used to visualize both repetitive sequences and individual genes in the human genome. Such new applications of labelled dead Fanzor polypeptide and compositions, systems, thereof can be important in imaging cells and studying the functional nuclear architecture, especially in cases with a small nucleus volume or complex 3-D structures.

### Cell Selection

[1144] In one embodiment, the compositions, systems, and/or components thereof described herein can be used in a method to screen and/or select cells. In one embodiment, composition, system-based screening/selection method can be used to identify diseased cells in a cell population. In one embodiment, selection of the cells results in a modification in the cells such that the selected cells die. In this way, diseased cells can be identified, and removed from the healthy cell population. In one embodiment, the diseased cells can be a cancer cell, pre-cancerous cell, a virus or other pathogenic organism infected cells, or otherwise abnormal cell. In one embodiment, the modification can impart another detectable change in the cells to be selected (e.g., a functional change and/or genomic barcode) that facilitates selection of the desired cells. In one embodiment a negative selection scheme can be used to obtain a desired cell population. In these embodiments, the cells to be selected against are modified, thus can be removed from the cell population based on their death or identification or sorting based the detectable change imparted on the cells. Thus, in these embodiments, the remaining cells after selection are the desired cell population.

[1145] In one embodiment, a method of selecting one or more cell(s) containing a polynucleotide modification can include: introducing one or more composition, system, (s) and/or components thereof, and/or vectors or vector systems into the cell(s), wherein the composition, system, (s) and/or components thereof, and/or vectors or vector systems contains and/or is capable of expressing one or more of: a Fanzor polypeptide, an nucleic acid component sequence, and an recombination template; wherein, for example that which is being expressed is within and expressed in vivo by the composition, system, vector or vector system and/or the recombination template comprises the one or more mutations that abolish Fanzor polypeptide cleavage; allowing homologous recombination of the recombination template with the target polynucleotide in the cell(s) to be selected; allowing a composition, system, or complex to bind to a target polynucleotide to effect cleavage of the target polynucleotide within said gene, wherein the AAV-complex comprises the Fanzor polypeptide complexed with (1) the nucleic acid component molecule sequence that is hybridized to the target sequence within the target polynucleotide, and (2) the nucleic acid component scaffold, wherein binding of the complex to the target polynucleotide induces cell death or imparts some other detectable change to the cell, thereby allowing one or more cell(s) in which one or more mutations have been introduced to be selected. In one embodiment, the cell to be selected may be a eukaryotic cell. In one embodiment, the cell to be selected may be a prokaryotic cell. Selection of specific cells via the methods herein can be performed without requiring a selection marker or a two-step process that may include a counter-selection system.

### Further Applications of Detection Methods and Devices

[1146] Systems and methods can be designed for the detection and diagnosis of microbes, including bacterial, fungi and viral microbes. In an aspect, the systems may comprise multiplex detection of multiple variants of viral infections, including coronavirus, different viruses which may be related coronaviruses or respiratory viruses, or a combination thereof. In embodiments, assays can be performed for a variety of viruses and viral infections, including acute respiratory infections using the disclosure detailed herein. The systems can comprise two or more Fanzor systems to multiplex, as described elsewhere herein, to detect a plurality of respiratory infections or viral infections, including coronavirus. The coronavirus is a positive-sense single stranded RNA family of viruses, infecting a variety of animals and humans. SARS-COV is one type of coronavirus infection, as well as MERS-COV Detection of one or more coronaviruses are envisioned, including the 2019-nCOV detected in Wuhan City. Sequences of the 2019-nCOV are available at GISAID accession no. EPI ISL 402124 and EPI ISL 402127-402130, and described in DOI: 10.1101/2020.01.22.914952. Further deposits of the SARS-COV-2 deposited in the GISAID platform include EP_ISL 402119-402121 and EP ISL 402123-402124; see also GenBank Accession No. MN908947.3.

[1147] Target molecule detection can comprise two or more detection systems utilizing Fanzor proteins. The Fanzor protein may preferably be thermostable, with multiplexing designed such that different Fanzor proteins with different sequence specificities, operable temperatures, or cutting preferences can be used.

[1148] A multiplex embodiment can be designed to track one or more variants of coronavirus or one or more variants of coronavirus, including SARS-COV-2, in combination with other viruses, for example, Human respiratory syncytial virus, Middle East respiratory syndrome (MERS) coronavirus, Severe acute respiratory syndrome-related (SARS) coronavirus, and influenza. In embodiments, assays can be done in multiplex to detect multiple variants of coronavirus, different viruses which may be related coronaviruses or respiratory viruses, or a combination thereof. In an aspect, each assay can take place in an individual discrete volume. An “individual discrete volume” is a discrete volume or discrete space, such as a container, receptacle, or other defined volume or space that can be defined by properties that prevent and/or inhibit migration of nucleic acids and reagents necessary to carry out the methods disclosed herein, for example a volume or space defined by physical properties such as walls, for example the walls of a well, tube, or a surface of a droplet, which may be impermeable or semipermeable, or as defined by other means such as chemical, diffusion rate limited, electro-magnetic, or light illumination, or any combination thereof. By “diffusion rate limited” (for example diffusion defined volumes) is meant spaces that are only accessible to certain molecules or reactions because diffusion constraints effectively defining a space or volume as would be the case for two parallel laminar streams where diffusion will limit the migration of a target molecule from one stream to the other. By “chemical” defined volume or space is meant spaces where only certain target molecules can exist because of their chemical or molecular properties, such as size, where for example gel beads may exclude certain species from entering the beads but not others, such as by surface charge, matrix size or other physical property of the bead that can allow selection of species that may enter the interior of the bead. By “electro-magnetically” defined volume or space is meant spaces where the electro-magnetic properties of the target molecules or their supports such as charge or magnetic properties can be used to define certain regions in a space such as capturing magnetic particles within a magnetic field or directly on magnets. By “optically” defined volume is meant any region of space that may be defined by illuminating it with visible, ultraviolet, infrared, or other wavelengths of light such that only target molecules within the defined space or volume may be labeled. One advantage to the used of non-walled, or semipermeable is that some reagents, such as buffers, chemical activators, or other agents maybe passed in Applicants through the discrete volume, while other material, such as target molecules, maybe maintained in the discrete volume or space. Typically, a discrete volume will include a fluid medium, (for example, an aqueous solution, an oil, a buffer, and/or a media capable of supporting cell growth) suitable for labeling of the target molecule with the indexable nucleic acid identifier under conditions that permit labeling. Exemplary discrete volumes or spaces useful in the disclosed methods include droplets (for example, microfluidic droplets and/or emulsion droplets), hydrogel beads or other polymer structures (for example poly-ethylene glycol di-acrylate beads or agarose beads), tissue slides (for example, fixed formalin paraffin embedded tissue slides with particular regions, volumes, or spaces defined by chemical, optical, or physical means), microscope slides with regions defined by depositing reagents in ordered arrays or random patterns, tubes (such as, centrifuge tubes, microcentrifuge tubes, test tubes, cuvettes, conical tubes, and the like), bottles (such as glass bottles, plastic bottles, ceramic bottles, Erlenmeyer flasks, scintillation vials and the like), wells (such as wells in a plate), plates, pipettes, or pipette tips among others. In certain example embodiments, the individual discrete volumes are the wells of a microplate. In certain example embodiments, the microplate is a 96 well, a 384 well, or a 1536 well microplate.

[1149] In certain example embodiments, the systems, devices, and methods, disclosed herein are directed to detecting the presence of one or more microbial agents in a sample, such as a biological sample obtained from a subject. In certain example embodiments, the microbe may be a bacterium, a fungus, a yeast, a protozoan, a parasite, or a virus. Accordingly, the methods disclosed herein can be adapted for use in other methods (or in combination) with other methods that require quick identification of microbe species, monitoring the presence of microbial proteins (antigens), antibodies, antibody genes, detection of certain phenotypes (e.g., bacterial resistance), monitoring of disease progression and/or outbreak, and antibiotic screening. Because of the rapid and sensitive diagnostic capabilities of the embodiments disclosed here, detection of microbe species type, down to a single nucleotide difference, and the ability to be deployed as a POC device, the embodiments disclosed herein may be used as guide therapeutic regimens, such as a selection of the appropriate antibiotic or antiviral. The embodiments disclosed herein may also be used to screen environmental samples (air, water, surfaces, food etc.) for the presence of microbial contamination.

[1150] Disclosed is a method to identify microbial species, such as bacterial, viral, fungal, yeast, or parasitic species, or the like. Particular embodiments disclosed herein describe methods and systems that will identify and distinguish microbial species within a single sample, or across multiple samples, allowing for recognition of many different microbes. The present methods allow the detection of pathogens and distinguishing between two or more species of one or more organisms, e.g., bacteria, viruses, yeast, protozoa, and fungi or a combination thereof, in a biological or environmental sample, by detecting the presence of a target nucleic acid sequence in the sample. A positive signal obtained from the sample indicates the presence of the microbe. Multiple microbes can be identified simultaneously using the methods and systems of the invention, by employing the use of more than one effector protein, wherein each effector protein targets a specific microbial target sequence. In this way, a multi-level analysis can be performed for a particular subject in which any number of microbes can be detected at once, for example, a subject with unknown respiratory infection, having symptoms of coronavirus, or an individual at risk or having been exposed to coronavirus. In one embodiment, simultaneous detection of multiple microbes may be performed using a set of probes that can identify one or more microbial species.

### Microbe Detection

[1151] In one embodiment, a method for detecting microbes in samples is provided comprising distributing a sample or set of samples into one or more individual discrete volumes, the individual discrete volumes comprising a Fanzor system as described herein; incubating the sample or set of samples under conditions sufficient to allow binding of the one or more nucleic acid component molecules to one or more microbe-specific targets; activating the Fanzor protein via binding of the one or more nucleic acid component molecules to the one or more target molecules, wherein activating the Fanzor protein results in modification of the RNA-based masking construct such that a detectable positive signal is generated; and detecting the detectable positive signal, wherein detection of the detectable positive signal indicates a presence of one or more target molecules in the sample. The one or more target molecules may be mRNA, gDNA (coding or non-coding), trRNA, or rRNA comprising a target nucleotide tide sequence that may be used to distinguish two or more microbial species/strains from one another. The nucleic acid component molecules may be designed to detect target sequences. The embodiments disclosed herein may also utilize certain steps to improve hybridization between nucleic acid component molecule and target RNA sequences. Methods for enhancing ribonucleic acid hybridization are disclosed in WO 2015/085194, entitled “Enhanced Methods of Ribonucleic Acid Hybridization” which is incorporated herein by reference. The microbe-specific target may be RNA or DNA or a protein. If DNA method may further comprise the use of DNA primers that introduce a RNA polymerase promoter as described herein. If the target is a protein than the method will utilize aptamers and steps specific to protein detection described herein.

### Detection of Single Nucleotide Variants

[1152] In one embodiment, one or more identified target sequences may be detected using nucleic acid component molecules that are specific for and bind to the target sequence as described herein. The systems and methods of the present invention can distinguish even between single nucleotide polymorphisms present among different microbial species and therefore, use of multiple nucleic acid component molecules in accordance with the invention may further expand on or improve the number of target sequences that may be used to distinguish between species. For example, in one embodiment, the one or more nucleic acid component molecules may distinguish between microbes at the species, genus, family, order, class, phylum, kingdom, or phenotype, or a combination thereof.

Detection Based on rRNA Sequences

[1153] In certain example embodiments, the devices, systems, and methods disclosed herein may be used to distinguish multiple microbial species in a sample. In certain example embodiments, identification may be based on ribosomal RNA sequences, including the 16S, 23S, and 5S subunits. Methods for identifying relevant rRNA sequences are disclosed in U.S. Patent Application Publication No. 2017/0029872. In certain example embodiments, a set of nucleic acid component molecule may be designed to distinguish each species by a variable region that is unique to each species or strain. nucleic acid component molecules may also be designed to target RNA genes that distinguish microbes at the genus, family, order, class, phylum, kingdom levels, or a combination thereof. In certain example embodiments where amplification is used, a set of amplification primers may be designed to flanking constant regions of the ribosomal RNA sequence and a nucleic acid component molecule designed to distinguish each species by a variable internal region. In certain example embodiments, the primers and nucleic acid component molecules may be designed to conserved and variable regions in the 16S subunit respectfully. Other genes or genomic regions that uniquely variable across species or a subset of species such as the RecA gene family, RNA polymerase β subunit, may be used as well. Other suitable phylogenetic markers, and methods for identifying the same, are discussed for example in Wu et al. arXiv: 1307.8690 [q-bio.GN].

[1154] In certain example embodiments, a method or diagnostic is designed to screen microbes across multiple phylogenetic and/or phenotypic levels at the same time. For example, the method or diagnostic may comprise the use of multiple Fanzor systems with different nucleic acid component molecules. A first set of nucleic acid component molecules may distinguish, for example, between mycobacteria, gram positive, and gram negative bacteria. These general classes can be even further subdivided. For example, nucleic acid components could be designed and used in the method or diagnostic that distinguish enteric and non-enteric within gram negative bacteria. A second set of nucleic acid component molecules can be designed to distinguish microbes at the genus or species level. Thus a matrix may be produced identifying all mycobacteria, gram positive, gram negative (further divided into enteric and non-enteric) with each genus of species of bacteria identified in a given sample that fall within one of those classes. The foregoing is for example purposes only. Other means for classifying other microbe types are also contemplated and would follow the general structure described above.

### Screening for Drug Resistance

[1155] In certain example embodiments, the devices, systems and methods disclosed herein may be used to screen for microbial genes of interest, for example antibiotic and/or antiviral resistance genes. nucleic acid component molecules may be designed to distinguish between known genes of interest. Samples, including clinical samples, may then be screened using the embodiments disclosed herein for detection of such genes. The ability to screen for drug resistance at POC would have tremendous benefit in selecting an appropriate treatment regime. In certain example embodiments, the antibiotic resistance genes are carbapenemases including KPC, NDM1, CTX-M15, OXA-48. Other antibiotic resistance genes are known and may be found for example in the Comprehensive Antibiotic Resistance Database (Jia et al. “CARD 2017: expansion and model-centric curation of the Comprehensive Antibiotic Resistance Database.” Nucleic Acids Research, 45, D566-573).

[1156] Ribavirin is an effective antiviral that hits a number of RNA viruses. Several clinically important viruses have evolved ribavirin resistance including Foot and Mouth Disease Virus doi: 10.1128/JVI.03594-13; polio virus (Pfeifer and Kirkegaard. PNAS, 100 (12): 7289-7294, 2003); and hepatitis C virus (Pfeiffer and Kirkegaard, J. Virol. 79 (4): 2346-2355, 2005). A number of other persistent RNA viruses, such as hepatitis and HIV, have evolved resistance to existing antiviral drugs: hepatitis B virus (lamivudine, tenofovir, entecavir) doi: 10/1002/hep22900; hepatitis C virus (telaprevir, BILN2061, ITMN-191, SCh6, boceprevir, AG-021541, ACH-806) doi: 10.1002/hep.22549; and HIV (many drug resistance mutations) hivb.standford.edu. The embodiments disclosed herein may be used to detect such variants among others.

[1157] Aside from drug resistance, there are a number of clinically relevant mutations that could be detected with the embodiments disclosed herein, such as persistent versus acute infection in LCMV (doi: 10.1073/pnas.1019304108), and increased infectivity of Ebola (Diehl et al. Cell. 2016, 167 (4): 1088-1098.

[1158] As described herein elsewhere, closely related microbial species (e.g., having only a single nucleotide difference in a given target sequence) may be distinguished by introduction of a synthetic mismatch in the nucleic acid component molecule.

### Monitoring Microbe Outbreaks

[1159] In one embodiment, a Fanzor system or methods of use thereof as described herein may be used to determine the evolution of a pathogen outbreak. The method may comprise detecting one or more target sequences from a plurality of samples from one or more subjects, wherein the target sequence is a sequence from a microbe causing the outbreaks. Such a method may further comprise determining a pattern of pathogen transmission, or a mechanism involved in a disease outbreak caused by a pathogen.

[1160] The pattern of pathogen transmission may comprise continued new transmissions from the natural reservoir of the pathogen or subject-to-subject transmissions (e.g., human-to-human transmission) following a single transmission from the natural reservoir or a mixture of both. In one embodiment, the pathogen transmission may be bacterial or viral transmission, in such case, the target sequence is preferably a microbial genome or fragments thereof. In one embodiment, the pattern of the pathogen transmission is the early pattern of the pathogen transmission, i.e., at the beginning of the pathogen outbreak. Determining the pattern of the pathogen transmission at the beginning of the outbreak increases likelihood of stopping the outbreak at the earliest possible time thereby reducing the possibility of local and international dissemination.

[1161] Determining the pattern of the pathogen transmission may comprise detecting a pathogen sequence according to the methods described herein. Determining the pattern of the pathogen transmission may further comprise detecting shared intra-host variations of the pathogen sequence between the subjects and determining whether the shared intra-host variations show temporal patterns. Patterns in observed intrahost and interhost variation provide important insight about transmission and epidemiology (Gire, et al., 2014).

[1162] Detection of shared intra-host variations between the subjects that show temporal patterns is an indication of transmission links between subject (in particular between humans) because it can be explained by subject infection from multiple sources (superinfection), sample contamination recurring mutations (with or without balancing selection to reinforce mutations), or co-transmission of slightly divergent viruses that arose by mutation earlier in the transmission chain (Park, et al., Cell 161 (7): 1516-1526, 2015). Detection of shared intra-host variations between subjects may comprise detection of intra-host variants located at common single nucleotide polymorphism (SNP) positions. Positive detection of intra-host variants located at common (SNP) positions is indicative of superinfection and contamination as primary explanations for the intra-host variants. Superinfection and contamination can be parted on the basis of SNP frequency appearing as inter-host variants (Park, et al., 2015). Otherwise superinfection and contamination can be ruled out. In this latter case, detection of shared intra-host variations between subjects may further comprise assessing the frequencies of synonymous and nonsynonymous variants and comparing the frequency of synonymous and nonsynonymous variants to one another. A nonsynonymous mutation is a mutation that alters the amino acid of the protein, likely resulting in a biological change in the microbe that is subject to natural selection. Synonymous substitution does not alter an amino acid sequence. Equal frequency of synonymous and nonsynonymous variants is indicative of the intra-host variants evolving neutrally. If frequencies of synonymous and nonsynonymous variants are divergent, the intra-host variants are likely to be maintained by balancing selection. If frequencies of synonymous and nonsynonymous variants are low, this is indicative of recurrent mutation. If frequencies of synonymous and nonsynonymous variants are high, this is indicative of co-transmission (Park, et al., 2015).

[1163] Like Ebola virus, Lassa virus (LASV) can cause hemorrhagic fever with high case fatality rates. Andersen et al. generated a genomic catalog of almost 200 LASV sequences from clinical and rodent reservoir samples (Andersen, et al., Cell Volume 162, Issue 4, p 738-750, 13 Aug. 2015). Andersen et al. show that whereas the 2013-2015 EVD epidemic is fueled by human-to-human transmissions, LASV infections mainly result from reservoir-to-human infections. Andersen et al. elucidated the spread of LASV across West Africa and show that this migration was accompanied by changes in LASV genome abundance, fatality rates, codon adaptation, and translational efficiency. The method may further comprise phylogenetically comparing a first pathogen sequence to a second pathogen sequence and determining whether there is a phylogenetic link between the first and second pathogen sequences. The second pathogen sequence may be an earlier reference sequence. If there is a phylogenetic link, the method may further comprise rooting the phylogeny of the first pathogen sequence to the second pathogen sequence. Thus, it is possible to construct the lineage of the first pathogen sequence. (Park, et al., 2015).

[1164] The method may further comprise determining whether the mutations are deleterious or adaptive. Deleterious mutations are indicative of transmission-impaired viruses and dead-end infections, thus normally only present in an individual subject. Mutations unique to one individual subject are those that occur on the external branches of the phylogenetic tree, whereas internal branch mutations are those present in multiple samples (i.e., in multiple subjects). Higher rate of nonsynonymous substitution is a characteristic of external branches of the phylogenetic tree (Park, et al., 2015).

[1165] In internal branches of the phylogenetic tree, selection has had more opportunity to filter out deleterious mutants. Internal branches, by definition, have produced multiple descendent lineages and are thus less likely to include mutations with fitness costs. Thus, lower rate of nonsynonymous substitution is indicative of internal branches (Park, et al., 2015).

[1166] Synonymous mutations, which likely have less impact on fitness, occurred at more comparable frequencies on internal and external branches (Park, et al., 2015).

[1167] By analyzing the sequenced target sequence, such as viral genomes, it is possible to discover the mechanisms responsible for the severity of the epidemic episode such as during the 2014 Ebola outbreak. For example, Gire et al. made a phylogenetic comparison of the genomes of the 2014 outbreak to all 20 genomes from earlier outbreaks suggests that the 2014 West African virus likely spread from central Africa within the past decade. Rooting the phylogeny using divergence from other ebolavirus genomes was problematic (6, 13). However, rooting the tree on the oldest outbreak revealed a strong correlation between sample date and root-to-tip distance, with a substitution rate of 8×10−4 per site per year (13). This suggests that the lineages of the three most recent outbreaks all diverged from a common ancestor at roughly the same time, around 2004, which supports the hypothesis that each outbreak represents an independent zoonotic event from the same genetically diverse viral population in its natural reservoir. They also found out that the 2014 EBOV outbreak might be caused by a single transmission from the natural reservoir, followed by human-to-human transmission during the outbreak. Their results also suggested that the epidemic episode in Sierra Leon might stem from the introduction of two genetically distinct viruses from Guinea around the same time (Gire, et al., 2014).

[1168] It has been also possible to determine how the Lassa virus spread out from its origin point, in particular thanks to human-to-human transmission and even retrace the history of this spread 400 years back (Andersen, et al., Cell 162 (4): 738-50, 2015).

[1169] In relation to the work needed during the 2013-2015 EBOV outbreak and the difficulties encountered by the medical staff at the site of the outbreak, and more generally, the method of the invention makes it possible to carry out sequencing using fewer selected probes such that sequencing can be accelerated, thus shortening the time needed from sample taking to results procurement. Further, kits and systems can be designed to be usable on the field so that diagnostics of a patient can be readily performed without need to send or ship samples to another part of the country or the world.

[1170] In any method described above, sequencing the target sequence or fragment thereof may be used any of the sequencing processes described above. Further, sequencing the target sequence or fragment thereof may be a near-real-time sequencing. Sequencing the target sequence or fragment thereof may be carried out according to previously described methods (Experimental Procedures: Matranga et al., 2014; and Gire, et al., 2014). Sequencing the target sequence or fragment thereof may comprise parallel sequencing of a plurality of target sequences. Sequencing the target sequence or fragment thereof may comprise Illumina sequencing.

[1171] Analyzing the target sequence or fragment thereof that hybridizes to one or more of the selected probes may be an identifying analysis, wherein hybridization of a selected probe to the target sequence or a fragment thereof indicates the presence of the target sequence within the sample.

[1172] Currently, primary diagnostics are based on the symptoms a patient has. However, various diseases may share identical symptoms so that diagnostics rely much on statistics. For example, malaria triggers flu-like symptoms: headache, fever, shivering, joint pain, vomiting, hemolytic anemia, jaundice, hemoglobin in the urine, retinal damage, and convulsions. These symptoms are also common for septicemia, gastroenteritis, and viral diseases. Amongst the latter, Ebola hemorrhagic fever has the following symptoms fever, sore throat, muscular pain, headaches, vomiting, diarrhea, rash, decreased function of the liver and kidneys, internal and external hemorrhage.

[1173] When a patient is presented to a medical unit, for example in tropical Africa, basic diagnostics will conclude to malaria because statistically, malaria is the most probable disease within that region of Africa. The patient is consequently treated for malaria although the patient might not actually have contracted the disease and the patient ends up not being correctly treated. This lack of correct treatment can be life-threatening especially when the disease the patient contracted presents a rapid evolution. It might be too late before the medical staff realizes that the treatment given to the patient is ineffective and comes to the correct diagnostics and administers the adequate treatment to the patient.

[1174] The method of the invention provides a solution to this situation. Indeed, because the number of nucleic acid component molecules can be dramatically reduced, this makes it possible to provide on a single chip selected probes divided into groups, each group being specific to one disease, such that a plurality of diseases, e.g. viral infection, can be diagnosed at the same time. Thanks to the invention, more than 3 diseases can be diagnosed on a single chip, preferably more than 4, 5, 6, 7, 8, 9, 10, 11, 12, 13, 14, 15, 16, 17, 18, 19, 20 diseases at the same time, preferably the diseases that most commonly occur within the population of a given geographical area. Since each group of selected probes is specific to one of the diagnosed diseases, a more accurate diagnosis can be performed, thus diminishing the risk of administering the wrong treatment to the patient.

[1175] In other cases, a disease such as a viral infection may occur without any symptoms, or had caused symptoms but dissipated before the patient is presented to the medical staff. In such cases, either the patient does not seek any medical assistance or the diagnostics is complicated due to the absence of symptoms on the day of the presentation.

[1176] The present invention may also be used in concert with other methods of diagnosing disease, identifying pathogens and optimizing treatment based upon detection of nucleic acids, such as mRNA in crude, non-purified samples.

[1177] The method of the invention also provides a powerful tool to address this situation. Indeed, since a plurality of groups of selected nucleic acid component molecules, each group being specific to one of the most common diseases that occur within the population of the given area, are comprised within a single diagnostic, the medical staff only need to contact a biological sample taken from the patient with the chip. Reading the chip reveals the diseases the patient has contracted.

[1178] In some cases, the patient is presented to the medical staff for diagnostics of particular symptoms. The method of the invention makes it possible not only to identify which disease causes these symptoms but at the same time determine whether the patient suffers from another disease he was not aware of.

[1179] This information might be of utmost importance when searching for the mechanisms of an outbreak. Indeed, groups of patients with identical viruses also show temporal patterns suggesting a subject-to-subject transmission links.

### Example Microbes

[1180] The embodiment disclosed herein may be used to detect a number of different microbes. The term microbe as used herein includes bacteria, fungus, protozoa, parasites and viruses.

### Bacteria

[1181] The following provides an example list of the types of microbes that might be detected using the embodiments disclosed herein. In certain example embodiments, the microbe is a bacterium. Examples of bacteria that can be detected in accordance with the disclosed methods include without limitation any one or more of (or any combination of) Acinetobacter baumanii, Actinobacillus sp., Actinomycetes, Actinomyces sp. (such as Actinomyces israelii and Actinomyces naeslundii), Aeromonas sp. (such as Aeromonas hydrophila, Aeromonas veronii biovar sobria (Aeromonas sobria), and Aeromonas caviae), Anaplasma phagocytophilum, Anaplasma marginale Alcaligenes xylosoxidans, Acinetobacter baumanii, Actinobacillus actinomycetemcomitans, Bacillus sp. (such as Bacillus anthracis, Bacillus cereus, Bacillus subtilis, Bacillus thuringiensis, and Bacillus stearothermophilus), Bacteroides sp. (such as Bacteroides fragilis), Bartonella sp. (such as Bartonella bacilliformis and Bartonella henselae, Bifidobacterium sp., Bordetella sp. (such as Bordetella pertussis, Bordetella parapertussis, and Bordetella bronchiseptica), Borrelia sp. (such as Borrelia recurrentis, and Borrelia burgdorferi), Brucella sp. (such as Brucella abortus, Brucella canis, Brucella melintensis and Brucella suis), Burkholderia sp. (such as Burkholderia pseudomallei and Burkholderia cepacia), Campylobacter sp. (such as Campylobacter jejuni, Campylobacter coli, Campylobacter lari and Campylobacter fetus), Capnocytophaga sp., Cardiobacterium hominis, Chlamydia trachomatis, Chlamydophila pneumoniae, Chlamydophila psittaci, Citrobacter sp. Coxiella burnetii, Corynebacterium sp. (such as, Corynebacterium diphtheriae, Corynebacterium jeikeum and Corynebacterium), Clostridium sp. (such as Clostridium perfringens, Clostridium difficile, Clostridium botulinum and Clostridium tetani), Eikenella corrodens, Enterobacter sp. (such as Enterobacter aerogenes, Enterobacter agglomerans, Enterobacter cloacae and Escherichia coli, including opportunistic Escherichia coli, such as enterotoxigenic E. coli, enteroinvasive E. coli, enteropathogenic E. coli, enterohemorrhagic E. coli, enteroaggregative E. coli and uropathogenic E. coli) Enterococcus sp. (such as Enterococcus faecalis and Enterococcus faecium) Ehrlichia sp. (such as Ehrlichia chafeensia and Ehrlichia canis), Epidermophyton floccosum, Erysipelothrix rhusiopathiae, Eubacterium sp., Francisella tularensis, Fusobacterium nucleatum, Gardnerella vaginalis, Gemella morbillorum, Haemophilus sp. (such as Haemophilus influenzae, Haemophilus ducreyi, Haemophilus aegyptius, Haemophilus parainfluenzae, Haemophilus haemolyticus and Haemophilus parahaemolyticus, Helicobacter sp. (such as Helicobacter pylori, Helicobacter cinaedi and Helicobacter fennelliae), Kingella kingii, Klebsiella sp. (such as Klebsiella pneumoniae, Klebsiella granulomatis and Klebsiella oxytoca), Lactobacillus sp., Listeria monocytogenes, Leptospira interrogans, Legionella pneumophila, Leptospira interrogans, Peptostreptococcus sp., Mannheimia hemolytica, Microsporum canis, Moraxella catarrhalis, Morganella sp., Mobiluncus sp., Micrococcus sp., Mycobacterium sp. (such as Mycobacterium leprae, Mycobacterium tuberculosis, Mycobacterium paratuberculosis, Mycobacterium intracellulare, Mycobacterium avium, Mycobacterium bovis, and Mycobacterium marinum), Mycoplasm sp. (such as Mycoplasma pneumoniae, Mycoplasma hominis, and Mycoplasma genitalium), Nocardia sp. (such as Nocardia asteroides, Nocardia cyriacigeorgica and Nocardia brasiliensis), Neisseria sp. (such as Neisseria gonorrhoeae and Neisseria meningitidis), Pasteurella multocida, Pityrosporum orbiculare (Malassezia furfur), Plesiomonas shigelloides. Prevotella sp., Porphyromonas sp., Prevotella melaninogenica, Proteus sp. (such as Proteus vulgaris and Proteus mirabilis), Providencia sp. (such as Providencia alcalifaciens, Providencia rettgeri and Providencia stuartii), Pseudomonas aeruginosa, Propionibacterium acnes, Rhodococcus equi, Rickettsia sp. (such as Rickettsia rickettsii, Rickettsia akari and Rickettsia prowazekii, Orientia tsutsugamushi (formerly: Rickettsia tsutsugamushi) i) and Rickettsia typhi), Rhodococcus sp., Serratia marcescens, Stenotrophomonas maltophilia, Salmonella sp. (such as Salmonella enterica, Salmonella typhi, Salmonella paratyphi, Salmonella enteritidis, Salmonella cholerasuis and Salmonella typhimurium), Serratia sp. (such as Serratia marcesans and Serratia liquifaciens), Shigella sp. (such as Shigella dysenteriae, Shigella flexneri, Shigella boydii and Shigella sonnei), Staphylococcus sp. (such as Staphylococcus aureus, Staphylococcus epidermidis, Staphylococcus hemolyticus, Staphylococcus saprophyticus), Streptococcus sp. (such as Streptococcus pneumoniae (for example chloramphenicol-resistant serotype 4 Streptococcus pneumoniae, spectinomycin-resistant serotype 6B Streptococcus pneumoniae, streptomycin-resistant serotype 9V Streptococcus pneumoniae, erythromycin-resistant serotype 14 Streptococcus pneumoniae, optochin-resistant serotype 14 Streptococcus pneumoniae, rifampicin-resistant serotype 18C Streptococcus pneumoniae, tetracycline-resistant serotype 19F Streptococcus pneumoniae, penicillin-resistant serotype 19F Streptococcus pneumoniae, and trimethoprim-resistant serotype 23F Streptococcus pneumoniae, chloramphenicol-resistant serotype 4 Streptococcus pneumoniae, spectinomycin-resistant serotype 6B Streptococcus pneumoniae, streptomycin-resistant serotype 9V Streptococcus pneumoniae, optochin-resistant serotype 14 Streptococcus pneumoniae, rifampicin-resistant serotype 18C Streptococcus pneumoniae, penicillin-resistant serotype 19F Streptococcus pneumoniae, or trimethoprim-resistant serotype 23F Streptococcus pneumoniae), Streptococcus agalactiae, Streptococcus mutans, Streptococcus pyogenes, Group A streptococci, Streptococcus pyogenes, Group B streptococci, Streptococcus agalactiae, Group C streptococci, Streptococcus anginosus, Streptococcus equismilis, Group D streptococci, Streptococcus bovis, Group F streptococci, and Streptococcus anginosus Group G streptococci), Spirillum minus, Streptobacillus moniliformi, Treponema sp. (such as Treponema carateum, Treponema petenue, Treponema pallidum and Treponema endemicum, Trichophyton rubrum, T. mentagrophytes, Tropheryma whippelii, Ureaplasma urealyticum, Veillonella sp., Vibrio sp. (such as Vibrio cholerae, Vibrio parahemolyticus, Vibrio vulnificus, Vibrio parahaemolyticus, Vibrio vulnificus, Vibrio alginolyticus, Vibrio mimicus, Vibrio hollisae, Vibrio fluvialis, Vibrio metchnikovii, Vibrio damsela and Vibrio furnisii), Yersinia sp. (such as Yersinia enterocolitica, Yersinia pestis, and Yersinia pseudotuberculosis) and Xanthomonas maltophilia among others. Fungi

[1182] In certain example embodiments, the microbe is a fungus or a fungal species. Examples of fungi that can be detected in accordance with the disclosed methods include without limitation any one or more of (or any combination of), Aspergillus, Blastomyces, Candidiasis, Coccidiodomycosis, Cryptococcus neoformans, Cryptococcus gatti, sp. Histoplasma sp. (such as Histoplasma capsulatum), Pneumocystis sp. (such as Pneumocystis jirovecii), Stachybotrys (such as Stachybotrys chartarum), Mucroymcosis, Sporothrix, fungal eye infections ringworm, Exserohilum, Cladosporium.

[1183] In certain example embodiments, the fungus is a yeast. Examples of yeast that can be detected in accordance with disclosed methods include without limitation one or more of (or any combination of), Aspergillus species (such as Aspergillus fumigatus, Aspergillus flavus and Aspergillus clavatus), Cryptococcus sp. (such as Cryptococcus neoformans, Cryptococcus gattii, Cryptococcus laurentii and Cryptococcus albidus), a Geotrichum species, a Saccharomyces species, a Hansenula species, a Candida species (such as Candida albicans), a Kluyveromyces species, a Debaryomyces species, a Pichia species, or combination thereof. In certain example embodiments, the fungi is a mold. Example molds include, but are not limited to, a Penicillium species, a Cladosporium species, a Byssochlamys species, or a combination thereof.

### Protozoa

[1184] In certain example embodiments, the microbe is a protozoa. Examples of protozoa that can be detected in accordance with the disclosed methods and devices include without limitation any one or more of (or any combination of), Euglenozoa, Heterolobosea, Diplomonadida, Amoebozoa, Blastocystic, and Apicomplexa. Example Euglenoza include, but are not limited to, Trypanosoma cruzi (Chagas disease), T, brucei gambiense, T, brucei rhodesiense, Leishmania braziliensis, L. infantum, L. mexicana, L. major, L. tropica, and L. donovani. Example Heterolobosea include, but are not limited to, Naegleria fowleri. Example Diplomonadids include, but are not limited to, Giardia intestinalis (G. lamblia, G. duodenalis). Example Amoebozoa include, but are not limited to, Acanthamoeba castellanii, Balamuthia madrillaris, Entamoeba histolytica. Example Blastocysts include, but are not limited to, Blastocystic hominis. Example Apicomplexa include, but are not limited to, Babesia microti, Cryptosporidium parvum, Cyclospora cayetanensis, Plasmodium falciparum, P. vivax, P. ovale, P. malariae, and Toxoplasma gondii.

### Parasites

[1185] In certain example embodiments, the microbe is a parasite. Examples of parasites that can be detected in accordance with disclosed methods include without limitation one or more of (or any combination of), an Onchocerca species and a Plasmodium species.

### Viruses

[1186] In certain example embodiments, the systems, devices, and methods, disclosed herein are directed to detecting viruses in a sample. The embodiments disclosed herein may be used to detect viral infection (e.g., of a subject or plant), or determination of a viral strain, including viral strains that differ by a single nucleotide polymorphism. The virus may be a DNA virus, a RNA virus, or a retrovirus. Non-limiting example of viruses useful with the present invention include, but are not limited to Ebola, measles, SARS, Chikungunya, hepatitis, Marburg, yellow fever, MERS, Dengue, Lassa, influenza, rhabdovirus or HIV. A hepatitis virus may include hepatitis A, hepatitis B, or hepatitis C. An influenza virus may include, for example, influenza A or influenza B. An HIV may include HIV 1 or HIV 2. In certain example embodiments, the viral sequence may be a human respiratory syncytial virus, Sudan ebola virus, Bundibugyo virus, Tai Forest ebola virus, Reston ebola virus, Achimota, Aedes flavivirus, Aguacate virus, Akabane virus, Alethinophid reptarenavirus, Allpahuayo mammarenavirus, Amapari mmarenavirus, Andes virus, Apoi virus, Aravan virus, Aroa virus, Arumwot virus, Atlantic salmon paramyxovirus, Australian bat lyssavirus, Avian bornavirus, Avian metapneumovirus, Avian paramyxoviruses, penguin or Falkland Islandsvirus, BK polyomavirus, Bagaza virus, Banna virus, Bat herpesvirus, Bat sapovirus, Bear Canon mammarenavirus, Beilong virus, Betacoronavirus, Betapapillomavirus 1-6, Bhanja virus, Bokeloh bat lyssavirus, Borna disease virus, Bourbon virus, Bovine hepacivirus, Bovine parainfluenza virus 3, Bovine respiratory syncytial virus, Brazoran virus, Bunyamwera virus, Caliciviridae virus. California encephalitis virus, Candiru virus, Canine distemper virus, Canine pneumovirus, Cedar virus, Cell fusing agent virus, Cetacean morbillivirus, Chandipura virus, Chaoyang virus, Chapare mammarenavirus, Chikungunya virus, Colobus monkey papillomavirus, Colorado tick fever virus, Cowpox virus, Crimean-Congo hemorrhagic fever virus, Culex flavivirus, Cupixi mammarenavirus, Dengue virus, Dobrava-Belgrade virus, Donggang virus, Dugbe virus, Duvenhage virus, Eastern equine encephalitis virus, Entebbe bat virus, Enterovirus A-D, European bat lyssavirus 1-2, Eyach virus, Feline morbillivirus, Fer-de-Lance paramyxovirus, Fitzroy River virus, Flaviviridae virus, Flexal mammarenavirus, GB virus C, Gairo virus, Gemycircularvirus, Goose paramyxovirus SF02, Great Island virus, Guanarito mammarenavirus, Hantaan virus, Hantavirus Z10, Heartland virus, Hendra virus, Hepatitis A/B/C/E, Hepatitis delta virus, Human bocavirus, Human coronavirus, Human endogenous retrovirus K, Human enteric coronavirus, Human genital-associated circular DNA virus-1, Human herpesvirus 1-8, Human immunodeficiency virus 1/2, Human mastadenovirus A-G, Human papillomavirus, Human parainfluenza virus 1-4, Human paraechovirus, Human picornavirus, Human smacovirus, Ikoma lyssavirus, Ilheus virus, Influenza A-C, Ippy mammarenavirus, Irkut virus, J-virus, JC polyomavirus, Japanese encephalitis virus, Junin mammarenavirus, KI polyomavirus, Kadipiro virus, Kamiti River virus, Kedougou virus, Khujand virus, Kokobera virus, Kyasanur forest disease virus, Lagos bat virus, Langat virus, Lassa mammarenavirus, Latino mammarenavirus, Leopards Hill virus, Liao ning virus, Ljungan virus, Lloviu virus, Louping ill virus, Lujo mammarenavirus, Luna mammarenavirus, Lunk virus, Lymphocytic choriomeningitis mammarenavirus, Lyssavirus Ozernoe, MSSI2\0.225 virus, Machupo mammarenavirus, Mamastrovirus 1, Manzanilla virus, Mapuera virus, Marburg virus, Mayaro virus, Measles virus, Menangle virus, Mercadeo virus, Merkel cell polyomavirus, Middle East respiratory syndrome coronavirus, Mobala mammarenavirus, Modoc virus, Moijang virus, Mokolo virus, Monkeypox virus, Montana myotis leukoenchalitis virus, Mopeia lassa virus reassortant 29, Mopeia mammarenavirus, Morogoro virus, Mossman virus, Mumps virus, Murine pneumonia virus, Murray Valley encephalitis virus, Nariva virus, Newcastle disease virus, Nipah virus, Norwalk virus, Norway rat hepacivirus, Ntaya virus, O′nyong-nyong virus, Oliveros mammarenavirus, Omsk hemorrhagic fever virus, Oropouche virus, Parainfluenza virus 5, Parana mammarenavirus, Parramatta River virus, Peste-des-petits-ruminants virus, Pichande mammarenavirus, Picornaviridae virus, Pirital mammarenavirus, Piscihepevirus A, Porcine parainfluenza virus 1, porcine rubulavirus, Powassan virus, Primate T-lymphotropic virus 1-2, Primate erythroparvovirus 1, Punta Toro virus, Puumala virus, Quang Binh virus, Rabies virus, Razdan virus, Reptile bornavirus 1, Rhinovirus A-B, Rift Valley fever virus, Rinderpest virus, Rio Bravo virus, Rodent Torque Teno virus, Rodent hepacivirus, Ross River virus, Rotavirus A-I, Royal Farm virus, Rubella virus, Sabia mammarenavirus, Salem virus, Sandfly fever Naples virus, Sandfly fever Sicilian virus, Sapporo virus, Sathuperi virus, Seal anellovirus, Semliki Forest virus, Sendai virus, Seoul virus, Sepik virus, Severe acute respiratory syndrome-related coronavirus, Severe fever with thrombocytopenia syndrome virus, Shamonda virus, Shimoni bat virus, Shuni virus, Simbu virus, Simian torque teno virus, Simian virus 40-41, Sin Nombre virus, Sindbis virus, Small anellovirus, Sosuga virus, Spanish goat encephalitis virus, Spondweni virus, St. Louis encephalitis virus, Sunshine virus, TTV-like mini virus, Tacaribe mammarenavirus, Taila virus, Tamana bat virus, Tamiami mammarenavirus, Tembusu virus, Thogoto virus, Thottapalayam virus, Tick-borne encephalitis virus, Tioman virus, Togaviridae virus, Torque teno canis virus, Torque teno douroucouli virus, Torque teno felis virus, Torque teno midi virus, Torque teno sus virus, Torque teno tamarin virus, Torque teno virus, Torque teno zalophus virus, Tuhoko virus, Tula virus, Tupaia paramyxovirus, Usutu virus, Uukuniemi virus, Vaccinia virus, Variola virus, Venezuelan equine encephalitis virus, Vesicular stomatitis Indiana virus, WU Polyomavirus, Wesselsbron virus, West Caucasian bat virus, West Nile virus, Western equine encephalitis virus, Whitewater Arroyo mammarenavirus, Yellow fever virus, Yokose virus, Yug Bogdanovac virus, Zaire ebolavirus, Zika virus, or Zygosaccharomyces bailii virus Z viral sequence. Examples of RNA viruses that may be detected include one or more of (or any combination of) Coronaviridae virus, a Picornaviridae virus, a Caliciviridae virus, a Flaviviridae virus, a Togaviridae virus, a Bornaviridae, a Filoviridae, a Paramyxoviridae, a Pneumoviridae, a Rhabdoviridae, an Arenaviridae, a Bunyaviridae, an Orthomyxoviridae, or a Deltavirus. In certain example embodiments, the virus is Coronavirus, SARS, Poliovirus, Rhinovirus, Hepatitis A, Norwalk virus, Yellow fever virus, West Nile virus, Hepatitis C virus, Dengue fever virus, Zika virus, Rubella virus, Ross River virus, Sindbis virus, Chikungunya virus, Borna disease virus, Ebola virus, Marburg virus, Measles virus, Mumps virus, Nipah virus, Hendra virus, Newcastle disease virus, Human respiratory syncytial virus, Rabies virus, Lassa virus, Hantavirus, Crimean-Congo hemorrhagic fever virus, Influenza, or Hepatitis D virus.

[1187] In certain example embodiments, the virus may be a plant virus selected from the group comprising Tobacco mosaic virus (TMV), Tomato spotted wilt virus (TSWV), Cucumber mosaic virus (CMV), Potato virus Y (PVY), the RT virus Cauliflower mosaic virus (CaMV), Plum pox virus (PPV), Brome mosaic virus (BMV), Potato virus X (PVX), Citrus tristeza virus (CTV), Barley yellow dwarf virus (BYDV), Potato leafroll virus (PLRV), Tomato bushy stunt virus (TBSV), rice tungro spherical virus (RTSV), rice yellow mottle virus (RYMV), rice hoja blanca virus (RHBV), maize rayado fino virus (MRFV), maize dwarf mosaic virus (MDMV), sugarcane mosaic virus (SCMV), Sweet potato feathery mottle virus (SPFMV), sweet potato sunken vein closterovirus (SPSVV), Grapevine fanleaf virus (GFLV), Grapevine virus A (GVA), Grapevine virus B (GVB), Grapevine fleck virus (GFkV), Grapevine leafroll-associated virus-1, -2, and-3, (GLRaV-1, -2, and-3), Arabis mosaic virus (ArMV), or Rupestris stem pitting-associated virus (RSPaV). In a preferred embodiment, the target RNA molecule is part of said pathogen or transcribed from a DNA molecule of said pathogen. For example, the target sequence may be comprised in the genome of an RNA virus. It is further preferred that Fanzor protein hydrolyzes said target RNA molecule of said pathogen in said plant if said pathogen infects or has infected said plant. It is thus preferred that the Fanzor system is capable of cleaving the target RNA molecule from the plant pathogen both when the Fanzor system (or parts needed for its completion) is applied therapeutically, i.e., after infection has occurred or prophylactically, i.e, before infection has occurred.

[1188] In certain example embodiments, the virus may be a retrovirus. Example retroviruses that may be detected using the embodiments disclosed herein include one or more of or any combination of viruses of the Genus Alpharetrovirus, Betaretrovirus, Gammaretrovirus, Deltaretrovirus, Epsilonretrovirus, Lentivirus, Spumavirus, or the Family Metaviridae, Pseudoviridae, and Retroviridae (including HIV), Hepadnaviridae (including Hepatitis B virus), and Caulimoviridae (including Cauliflower mosaic virus).

[1189] In certain example embodiments, the virus is a DNA virus. Example DNA viruses that may be detected using the embodiments disclosed herein include one or more of (or any combination of) viruses from the Family Myoviridae, Podoviridae, Siphoviridae, Alloherpesviridae, Herpesviridae (including human herpes virus, and Varicella Zozter virus), Malocoherpesviridae, Lipothrixviridae, Rudiviridae, Adenoviridae, Ampullaviridae, Ascoviridae, Asfarviridae (including African swine fever virus), Baculoviridae, Cicaudaviridae, Clavaviridae, Corticoviridae, Fuselloviridae, Globuloviridae, Guttaviridae, Hytrosaviridae, Iridoviridae, Maseilleviridae, Mimiviridae, Nudiviridae, Nimaviridae, Pandoraviridae, Papillomaviridae, Phycodnaviridae, Plasmaviridae, Polydnaviruses, Polyomaviridae (including Simian virus 40, JC virus, BK virus), Poxviridae (including Cowpox and smallpox), Sphaerolipoviridae, Tectiviridae, Turriviridae, Dinodnavirus, Salterprovirus, Rhizidovirus, among others. In one embodiment, a method of diagnosing a species-specific bacterial infection in a subject suspected of having a bacterial infection is described as obtaining a sample comprising bacterial ribosomal ribonucleic acid from the subject; contacting the sample with one or more of the probes described, and detecting hybridization between the bacterial ribosomal ribonucleic acid sequence present in the sample and the probe, wherein the detection of hybridization indicates that the subject is infected with Escherichia coli, Klebsiella pneumoniae, Pseudomonas aeruginosa, Staphylococcus aureus, Acinetobacter baumannii, Candida albicans, Enterobacter cloacae, Enterococcus faecalis, Enterococcus faecium, Proteus mirabilis, Staphylococcus agalactiae, or Staphylococcus maltophilia or a combination thereof.

### Coronavirus

[1190] Systems and methods of the presently disclosed invention are designed to detect coronavirus, in an aspect, the target sequence is the 2019-nCOV, also referred to herein as SARS-COV-2, which causes COVID-19. The coronavirus is a positive-sense single stranded RNA family of viruses, infecting a variety of animals and humans. SARS-COV is one type of coronavirus infection, as well as MERS-COV. Detection of one or more coronaviruses are envisioned, including the SARS-COV-2 detected in Wuhan City. Sequences of the SARS-COV-2 are available at GISAID accession no. EPI ISL 402124 and EPI ISL 402127-402130, and described in DOI: 10.1101/2020.01.22.914952. Further deposits of the SARS-COV2 are deposited in the GISAID platform include EP ISL 402119-402121 and EP ISL 402123-402124; see also GenBank Accession No. MN908947.3. In an aspect, one may use known SARS and SARS-related coronaviruses or other viruses from one or more hosts to generate a non-redundant alignment. Related viruses can be found, for example in bats.

[1191] In one embodiment, the systems are designed to comprise at least one highly active nucleic acid component polynucleotide which is designed according to the methods disclosed herein. In a preferred embodiment, the nucleic acid component polynucleotide binds to at least one target sequence that is a unique coronavirus genomic sequence, thereby identifying the presence of coronavirus to the exclusion of other viruses. The systems and methods can be designed to detect a plurality of respiratory infections or viral infections, including coronavirus.

[1192] In an aspect the at least one nucleic acid component polynucleotide binds to a coronavirus sequence encoding a polypeptide that is immunostimulatory to a host immune system. Immunostiumulatory polypeptides have the ability to enhance, stimulate, or increase response of the immune system, typically by inducing the activation or activity of a components of the immune system (e.g., an immune cell). In embodiments, the immunostimulatory polypeptide contributes to immune-mediated disease in the host. In an aspect, the host is a mammal, for example, a human, a bat, or a pangolin, that may be infected by a coronavirus. Cyranoski, D. Did pangolins spread the China coronavirus to people? Nature, 7 Feb. 2020. In one embodiment, the nucleic acid component polynucleotide can be designed to detect SARS-COV-2 or a variant thereof in meat, live animals and humans so that testing can be performed, for example at markets and other public places where sources of contamination can arise.

[1193] Gene targets may comprise ORFlab, N protein, RNA-dependent RNA polymerase (RdRP), E protein, ORF1b-nsp14, Spike glycoprotein(S), or pancorona targets. Molecular assays have been under development and can be used as a starting point to develop nucleic acid component molecules for the methods and systems described herein. See, “Diagnostic detection of 2019-nCOV by real-time RT-PCR” Charité, Berlin Germany (17 Jan. 2020)′ Detection of 2019 novel coronavirus (2019-nCOV) in suspected human cases by RT-PCR-Hong Kong University (23 Jan. 2020); PCR and sequencing protocol for 2019-nCOV-Department of Medical Sciences, Ministry of Public Health, Thailand (updated 28 Jan. 2020); PCR and sequencing protocols for 2019-nCOV-National Institute of Infectious Diseases Japan (24 Jan. 2020); US CDC panel primer and probes-U.S. CDC, USAV-U.S. CDC, USA (28 Jan. 2020); China CDC Primers and probes for detection 2019-nCOV (24 Jan. 2020), incorporated in their entirety by reference. Further, the nucleic acid component molecule design may exploit differences or similarities with SARS-COV. Researchers have recently identified simialrities and fifrferences between 2019-nCOV and SARS-COV. “Coronavirus Genome Annotation Reveals Amino Acid Differences with Other SARS Viruses,” genomeweb, Feb. 10, 2020. For example, nucleic acid component molecules based on the 8a protein, which was present in SARS-COV but absent in SARS-COV-2, can be utilized to differentiate between the viruses. Similarly, the 8b and 3b proteins have different lengths in SARS-COV and SARS-COV-2 and can be utilized to design nucleic acid component molecules to detect non-overlapping proteins of nucleotides encoding in the two viruses. Wu et al., Genome Composition and Divergence of the Novel Coronavirus (2019-nCOV) Originating in China, Cell Host & Microbe (2020), DOI: 10.1016/j.chom.2020.02.001, incorporated herein by reference, including all supplemental information, in particular Table S1. Mutations may also be detected, with nucleic acid component and/or primers designed specifically to detect, for example, changes in the SARS-COV-2 virus. In an embodiment, the nucleic acid component or primer can be designed to detect the D614G mutation in the SARS-CoV-2 spike protein. See, Korber et al., Cell 182, 812-827 (2020); doi: 10.1016/j.cell.2020.06.043.Other mutations in the spike protein can be designed utilizing the COVID-19 viral genome analysis pipeline available at cov.lanl.gov. Further resources to design primers and nucleic acid components to detect coronavirus or coronavirus mutations can be found at Starr, et al, “Deep Mutational Scanning of SARS-COV-2 Receptor Binding Domain Reveals Constraints in Folding and ACE2 Binding,” Cell, 182, 1-16 (2020); doi: 10.1016/j.cell.2020.08.012.

[1194] The systems and methods of detection can be used to identify single nucleotide variants, detection based on rRNA sequences, screening for drug resistance, monitoring microbe outbreaks, genetic perturbations, and screening of environmental samples, as described in PCT/US2018/054472 filed Oct. 22, 2018 at-[0327], incorporated herein by reference.

[1195] In certain example embodiments, the systems, devices, and methods disclosed herein may be used for biomarker detection. For example, the systems, devices and method disclosed herein may be used for SNP detection and/or genotyping. The systems, devices and methods disclosed herein may be also used for the detection of any disease state or disorder characterized by aberrant gene expression. Aberrant gene expression includes aberration in the gene expressed, location of expression and level of expression. Multiple transcripts or protein markers related to cardiovascular, immune disorders, and cancer among other diseases may be detected. In certain example embodiments, the embodiments disclosed herein may be used for cell free DNA detection of diseases that involve lysis. In certain example embodiments, the embodiments could be utilized for faster and more portable detection for pre-natal testing of cell-free DNA. The embodiments disclosed herein may be used for screening panels of different SNPs associated with, among others, different coronaviruses, evolving SARS-COV2, and other related respiratory viral infections. As described herein elsewhere, closely related genotypes/alleles or biomarkers (e.g. having only a single nucleotide difference in a given target sequence) may be distinguished by introduction of a synthetic mismatch in the nucleic acid component molecule.

[1196] In an aspect, the invention relates to a method for detecting target nucleic acids in samples, comprising: distributing a sample or set of samples into one or more individual discrete volumes, the individual discrete volumes comprising a Fanzor system according to the invention as described herein; incubating the sample or set of samples under conditions sufficient to allow binding of the one or more nucleic acid component molecules to one or more target molecules; activating the Fanzor protein via binding of the one or more nucleic acid component molecules to the one or more target molecules, wherein activating the Fanzor protein results in modification of the RNA-based masking construct such that a detectable positive signal is generated; and detecting the detectable positive signal, wherein detection of the detectable positive signal indicates a presence of one or more target molecules in the sample.

[1197] The sensitivity of the assays described herein are well suited for detection of target nucleic acids in a wide variety of biological sample types, including sample types in which the target nucleic acid is dilute or for which sample material is limited. Methods for field deployable and rapid diagnostic assays can be optimized for the type of sample material utilized and can be adapted from approaches used for other assays known in the art. See, e.g., Myhrvold et al., 2018. Biomarker screening may be carried out on a number of sample types including, but not limited to, saliva, urine, blood, feces, sputum, and cerebrospinal fluid. The embodiments disclosed herein may also be used to detect up- and/or down-regulation of genes. For example, a sample may be serially diluted such that only over-expressed genes remain above the detection limit threshold of the assay.

[1198] In one embodiment, the present invention provides steps of obtaining a sample of biological fluid (e.g., urine, blood plasma or serum, sputum, cerebral spinal fluid), and extracting the DNA or RNA. The mutant nucleotide sequence to be detected, may be a fraction of a larger molecule or can be present initially as a discrete molecule.

[1199] In embodiments, DNA is isolated from plasma/serum of a cancer patient. For comparison, DNA samples isolated from neoplastic tissue and a second sample may be isolated from non-neoplastic tissue from the same patient (control), for example, lymphocytes. The non-neoplastic tissue can be of the same type as the neoplastic tissue or from a different organ source. In one embodiment, blood samples are collected, and plasma immediately separated from the blood cells by centrifugation. Serum may be filtered and stored frozen until DNA/RNA extraction.

[1200] In an aspect, sample preparation can comprise methods as disclosed herein to circumvent other RNA extraction methods and can be used with standard amplification techniques such as RT-PCR as well as the Fanzor detection methods disclosed herein. In an aspect, the method may comprise a one-step extraction-free RNA preparation method that can be used with samples tested for coronavirus, which may be, in an aspect, a RT-qPCR testing method, a lateral flow detection method or other Fanzor detection method disclosed herein. Advantageously, the RNA extraction method can be utilized directly with other testing protocols. In an aspect, the method comprises use of a nasopharyngeal swab, nasal saline lavage, or other nasal sample (e.g., anterior nasal swab) with Quick Extract™ DNA Extraction Solution (QE09050), Lucigen, or QuickExtract Plant DNA Extraction Solution, Lucigen. In an aspect, the sample is diluted 2:1, 1:1 or 1:2 sample: DNA extraction solution. The sample: extraction mix is incubated at about 90° C. to about 98° C., preferably about 95° C. In another aspect, incubation is performed at between about 20° C. to about 90° C., about 22, 23, 24, 25, 26, 27, 28, 29, 30, 31, 32, 33, 34, 35, 36, 37, 38, 39, 40, 41, 42, 43, 44, 45, 46, 47, 48, 49, 50, 51, 52, 53, 54, 55, 56, 57, 58, 59, 60, 61, 62, 63, 64, 65, 66, 67, 68, 69, 70, 71, 72, 73, 74, 75, 76, 77, 78, 79, 80, 81, 82, 83, 84, 85 86, 87, 88, 89 or 90° C. The incubation period can be about 2, 3, 4, 5, 6, 7, 8, 9, 10, 11, 12, 13, 14, 15, 16, 17, 18, 19, 20, 21, 22, 23, 24, 25, 26, 27, 28, 29, or 30 minutes, preferably about 4 to 6 minutes, or about 5 minutes. Incubation time and temperature may vary depending on sample size and quality, and incubation time may increase if using lower temperature. Current CDC Real-Time RT-PCR Diagnostic Panel are as described at fda.gov/media/134922/download, “CDC 2019-Novel Coronavirus (2019-nCOV) Real-Time RT-PCR Diagnostic Panel.” In one embodiment, the DNA extraction solution can remain with the sample subsequent to incubation and be utilized in the next steps fo detection methods. In an aspect, the detection method is an RT-qPCR reaction, and the extraction solution is kept at a concentration of less than 10%, 9%, 8%, 7%, 6%, 5%, 4%, 3% of the reaction mixture, where the reaction mixture comprises the detection reaction reagents, sample and extraction solution.

[1201] In one embodiment, a bead is utilized with particular embodiments of the invention and may be included with the extraction solution. The bead may be used to capture, concentrate or otherwise enrich for particular material. The bead may be magnetic, and may be provided to capture nucleic acid material. In another aspect, the bead is a silica bead. Beads may be utilized in an extraction step of the methods disclosed herein. Beads can be optionally used with the methods described herein, including with the one-pot methods that allow for concentration of viral nucleic acids from large volume samples, such as saliva or swab samples to allow for a single one-pot reaction method. Concentration of desired target molecules can be increased by about 10-fold, 50-fold, 100-fold, 200-fold, 500-fold, 800-fold, 1000-fold, 1500-fold, 2000-fold, 2500-fold, 3000-fold, or more.

[1202] Magnetic beads in a PEG and salt solution are preferred in an aspect, and in embodiments bind to viral RNA and/or DNA which allows for concentration and lysis concurrently. Silica beads can be used in another aspect. Capture moieties such as oligonucleotide functionalized beads are envisioned for use. The beads may be using with the extraction reagents, allowed to incubate with a sample and the lysis/extraction buffer, thereby concentrating target molecules on the beads. Extraction can be performed as described elsewhere herein, at 22° C.-60° C., with subsequent isothermal amplification and/or Fanzor detection performed under conditions as described elsewhere herein. When used with a cartridge device detailed elsewhere herein, a magnet can be activated and the beads collected, with optional flushing of the extraction buffer and one or more washes performed. Advantageously, the beads can be used in the one-pot methods and systems without additional washings of the beads, allowing for a more efficient process without increased risks of contamination in multi-step processes. Beads can be utilized with the isothermal amplifications detailed herein, and the beads can flow into an amplification chamber of the cartridge or be maintained in the pot for the amplification step. Upon heating, nucleic acid can be released off the beads.

[1203] In certain example embodiments, target nucleic acids are detected directly from a crude or unprocessed sample, such as blood, serum, saliva, cebrospinal fluid, sputum, or urine. In certain example embodiments, the target nucleic acid is cell free DNA.

### Detection Devices

[1204] The systems, compositions, and/or components thereof described herein can be embodied on detection or diagnostic devices. A number of substrates and configurations may be used. The devices may be capable of defining multiple individual discrete volumes within the device. As used herein an “individual discrete volume” refers to a discrete space, such as a container, receptacle, or other defined volume or space that can be defined by properties that prevent and/or inhibit migration of target molecules, for example a volume or space defined by physical properties such as walls, for example the walls of a well, tube, or a surface of a droplet, which may be impermeable or semipermeable, or as defined by other means such as chemical, diffusion rate limited, electro-magnetic, or light illumination, or any combination thereof that can contain a a sample within a defined space. Individual discrete volumes may be identified by molecular tags, such as nucleic acid barcodes. By “diffusion rate limited” (for example diffusion defined volumes) is meant spaces that are only accessible to certain molecules or reactions because diffusion constraints effectively defining a space or volume as would be the case for two parallel laminar streams where diffusion will limit the migration of a target molecule from one stream to the other. By “chemical” defined volume or space is meant spaces where only certain target molecules can exist because of their chemical or molecular properties, such as size, where for example gel beads may exclude certain species from entering the beads but not others, such as by surface charge, matrix size or other physical property of the bead that can allow selection of species that may enter the interior of the bead. By “electro-magnetically” defined volume or space is meant spaces where the electro-magnetic properties of the target molecules or their supports such as charge or magnetic properties can be used to define certain regions in a space such as capturing magnetic particles within a magnetic field or directly on magnets. By “optically” defined volume is meant any region of space that may be defined by illuminating it with visible, ultraviolet, infrared, or other wavelengths of light such that only target molecules within the defined space or volume may be labeled. One advantage to the use of non-walled, or semipermeable discrete volumes is that some reagents, such as buffers, chemical activators, or other agents may be passed through the discrete volume, while other materials, such as target molecules, may be maintained in the discrete volume or space. Typically, a discrete volume will include a fluid medium, (for example, an aqueous solution, an oil, a buffer, and/or a media capable of supporting cell growth) suitable for labeling of the target molecule with the indexable nucleic acid identifier under conditions that permit labeling. Exemplary discrete volumes or spaces useful in the disclosed methods include droplets (for example, microfluidic droplets and/or emulsion droplets), hydrogel beads or other polymer structures (for example poly-ethylene glycol di-acrylate beads or agarose beads), tissue slides (for example, fixed formalin paraffin embedded tissue slides with particular regions, volumes, or spaces defined by chemical, optical, or physical means), microscope slides with regions defined by depositing reagents in ordered arrays or random patterns, tubes (such as, centrifuge tubes, microcentrifuge tubes, test tubes, cuvettes, conical tubes, and the like), bottles (such as glass bottles, plastic bottles, ceramic bottles, Erlenmeyer flasks, scintillation vials and the like), wells (such as wells in a plate), plates, pipettes, or pipette tips among others. In certain embodiments, the compartment is an aqueous droplet in a water-in-oil emulsion. In specific embodiments, any of the applications, methods, or systems described herein requiring exact or uniform volumes may employ the use of an acoustic liquid dispenser.

[1205] In some embodiments, the individual discrete volumes may be droplets.

[1206] In certain example embodiments, the device comprises a flexible material substrate on which a number of spots may be defined. Flexible substrate materials suitable for use in diagnostics and biosensing are known within the art. The flexible substrate materials may be made of plant derived fibers, such as cellulosic fibers, or may be made from flexible polymers such as flexible polyester films and other polymer types. Within each defined spot, reagents of the system described herein are applied to the individual spots. Each spot may contain the same reagents except for a different guide RNA or set of guide RNAs, or where applicable, a different detection aptamer to screen for multiple targets at once. Thus, the systems and devices herein may be able to screen samples from multiple sources (e.g., multiple clinical samples from different individuals) for the presence of the same target, or a limited number of targets, or aliquots of a single sample (or multiple samples from the same source) for the presence of multiple different targets in the sample. In certain example embodiments, the elements of the systems described herein are freeze dried onto the paper or cloth substrate. Example flexible material based substrates that may be used in certain example devices are disclosed in Pardee et al. Cell. 2016, 165 (5): 1255-66 and Pardee et al. Cell. 2014, 159 (4): 950-54. Suitable flexible material-based substrates for use with biological fluids, including blood are disclosed in International Patent Application Publication No. WO/2013/071301 entitled “Paper based diagnostic test” to Shevkoplyas et al. U.S. Patent Application Publication No. 2011/0111517 entitled “Paper-based microfluidic systems” to Siegel et al. and Shafiee et al. “Paper and Flexible Substrates as Materials for Biosensing Platforms to Detect Multiple Biotargets” Scientific Reports 5:8719 (2015). Further flexible based materials, including those suitable for use in wearable diagnostic devices are disclosed in Wang et al. “Flexible Substrate-Based Devices for Point-of-Care Diagnostics” Cell 34 (11): 909-21 (2016). Further flexible based materials may include nitrocellulose, polycarbonate, methylethyl cellulose, polyvinylidene fluoride (PVDF), polystyrene, or glass (see e.g., US20120238008). In certain embodiments, discrete volumes are separated by a hydrophobic surface, such as but not limited to wax, photoresist, or solid ink.

[1207] In some embodiments, a dosimeter or badge may be provided that serves as a sensor or indicator such that the wearer is notified of exposure to certain microbes or other agents. For example, the systems described herein may be used to detect a particular pathogen. Likewise, aptamer based embodiments disclosed above may be used to detect both polypeptide as well as other agents, such as chemical agents, to which a specific aptamer may bind. Such a device may be useful for surveillance of soldiers or other military personnel, as well as clinicians, researchers, hospital staff, and the like, in order to provide information relating to exposure to potentially dangerous agents as quickly as possible, for example for biological or chemical warfare agent detection. In other embodiments, such a surveillance badge may be used for preventing exposure to dangerous microbes or pathogens in immunocompromised patients, burn patients, patients undergoing chemotherapy, children, or elderly individuals.

[1208] In specific embodiments, each individual discrete volume further comprises one or more detection aptamers comprising a masked RNA polymerase promoter binding site or a masked primer binding site. As such, each individual discrete volume may further comprise nucleic acid amplification reagents.

[1209] In specific embodiments, the target molecule may be a target DNA and the individual discrete volumes further comprise a primer that binds the target DNA and comprises an RNA polymerase promoter.

[1210] Samples sources that may be analyzed using the systems and devices described herein include biological samples of a subject or environmental samples. Environmental samples may include surfaces or fluids. The biological samples may include, but are not limited to, saliva, blood, plasma, sera, stool, urine, sputum, mucous, lymph, synovial fluid, spinal fluid, cerebrospinal fluid, a swab from skin or a mucosal membrane, or combination thereof. In an example embodiment, the environmental sample is taken from a solid surface, such as a surface used in the preparation of food or other sensitive compositions and materials.

[1211] In other example embodiments, the elements of the systems described herein may be place on a single use substrate, such as swab or cloth that is used to swab a surface or sample fluid. For example, the system could be used to test for the presence of a pathogen on a food by swabbing the surface of a food product, such as a fruit or vegetable. Similarly, the single use substrate may be used to swab other surfaces for detection of certain microbes or agents, such as for use in security screening. Single use substrates may also have applications in forensics, where the CRISPR systems are designed to detect, for example identifying DNA SNPs that may be used to identify a suspect, or certain tissue or cell markers to determine the type of biological matter present in a sample. Likewise, the single use substrate could be used to collect a sample from a patient-such as a saliva sample from the mouth- or a swab of the skin. In other embodiments, a sample or swab may be taken of a meat product on order to detect the presence of absence of contaminants on or within the meat product.

[1212] Near-real-time microbial diagnostics are needed for food, clinical, industrial, and other environmental settings (see e.g., Lu TK, Bowers J, and Koeris M S., Trends Biotechnol. 2013 June; 31 (6): 325-7). In certain embodiments, the present invention is used for rapid detection of foodborne pathogens using guide RNAs specific to a pathogen (e.g., Campylobacter jejuni, Clostridium perfringens, Salmonella spp., Escherichia coli, Bacillus cereus, Listeria monocytogenes, Shigella spp., Staphylococcus aureus, Staphylococcal enteritis, Streptococcus, Vibrio cholerae, Vibrio parahaemolyticus, Vibrio vulnificus, Yersinia enterocolitica and Yersinia pseudotuberculosis, Brucella spp., Corynebacterium ulcerans, Coxiella burnetii, or Plesiomonas shigelloides).

[1213] In certain embodiments, the device is or comprises a flow strip. For instance, a lateral flow strip allows for detection by color. The reporter is modified to have a first molecule (such as for instance FITC) attached to the 5′ end and a second molecule (such as for instance biotin) attached to the 3′ end (or vice versa). The lateral flow strip is designed to have two capture lines with anti-first molecule (e.g., anti-FITC) antibodies hybridized at the first line and anti-second molecule (e.g. anti-biotin) antibodies at the second downstream line. As the reaction flows down the strip, uncleaved reporter will bind to anti-first molecule antibodies at the first capture line, while cleaved reporters will liberate the second molecule and allow second molecule binding at the second capture line. Second molecule sandwich antibodies, for instance conjugated to nanoparticles, such as gold nanoparticles, will bind any second molecule at the first or second line and result in a strong readout/signal (e.g., color). As more reporter is cleaved, more signal will accumulate at the second capture line and less signal will appear at the first line. In certain aspects, the invention relates to the use of a follow strip as described herein for detecting nucleic acids or polypeptides. In certain aspects, the invention relates to a method for detecting nucleic acids or polypeptides with a flow strip as defined herein, e.g., (lateral) flow tests or (lateral) flow immunochromatographic assays.

[1214] The embodiments disclosed herein are directed to lateral flow detection devices that comprise Fanzor systems. The device may comprise a lateral flow substrate for detecting a Fanzor collateral reaction. Substrates suitable for use in lateral flow assays are known in the art. These may include but are not necessarily limited to membranes or pads made of cellulose and/or glass fiber, polyesters, nitrocellulose, or absorbent pads (J Saudi Chem Soc 19 (6): 689-705; 2015). The Fanzor system, i.e., one or more Fanzor systems and corresponding reporter constructs are added to the lateral flow substrate at a defined reagent portion of the lateral flow substrate, typically on one end of the lateral flow substrate. Reporting constructs used within the context of the present invention comprise a first molecule and a second molecule linked by a DNA linker. The lateral flow substrate further comprises a sample portion. The sample portion may be equivalent to, continuous with, or adjacent to the reagent portion. The lateral flow strip further comprises a first capture line, typically a horizontal line running across the device, but other configurations are possible. The first capture region is proximate to and on the same end of the lateral flow substrate as the sample loading portion. A first binding agent that specifically binds the first molecule of the reporter construct is fixed or otherwise immobilized to the first capture region. The second capture region is located towards the opposite end of the lateral flow substrate from the first binding region. A second binding agent is fixed or otherwise immobilized at the second capture region. The second binding agent specifically binds the second molecule of the reporter construct, or the second binding agent may bind a detectable ligand. For example, the detectable ligand may be a particle, such as a colloidal particle, that when it aggregates can be detected visually. The particle may be modified with an antibody that specifically binds the second molecule on the reporter construct. If the reporter construct is not cleaved, it will facilitate accumulation of the detectable ligand at the first binding region. If the reporter construct is cleaved the detectable ligand is released to flow to the second binding region. In such an embodiment, the second binding agent is an agent capable of specifically or non-specifically binding the detectable ligand on the antibody on the detectable ligand. Examples of suitable binding agents for such an embodiment include, but are not limited to, protein A and protein G.

[1215] Lateral support substrates may be located within a housing (see for example, “Rapid Lateral Flow Test Strips” Merck Millipore 2013). The housing may comprise at least one opening for loading samples and a second single opening or separate openings that allow for reading of detectable signal generated at the first and second capture regions.

[1216] The Fanzor system may be freeze-dried to the lateral flow substrate and packaged as a ready to use device, or the Fanzor system may be added to the reagent portion of the lateral flow substrate at the time of using the device. Samples to be screened are loaded at the sample loading portion of the lateral flow substrate. The samples must be liquid samples or samples dissolved in an appropriate solvent, usually aqueous. The liquid sample reconstitutes the Fanzor reagents such that a Fanzor reaction can occur. The liquid sample begins to flow from the sample portion of the substrate towards the first and second capture regions. Intact reporter construct is bound at the first capture region by binding between the first binding agent and the first molecule. Likewise, the detection agent will begin to collect at the first binding region by binding to the second molecule on the intact reporter construct. If target molecule(s) are present in the sample, the Fanzor collateral effect is activated. As activated Fanzor comes into contact with the bound reporter construct, the reporter constructs are cleaved, releasing the second molecule to flow further down the lateral flow substrate towards the second binding region. The released second molecule is then captured at the second capture region by binding to the second binding agent, where additional detection agent may also accumulate by binding to the second molecule. Accordingly, if the target molecule(s) is not present in the sample, a detectable signal will appear at the first capture region, and if the target molecule(s) is present in the sample, a detectable signal will appear at the location of the second capture region.

[1217] Specific binding-integrating molecules comprise any members of binding pairs that can be used in the present invention. Such binding pairs are known to those skilled in the art and include, but are not limited to, antibody-antigen pairs, enzyme-substrate pairs, receptor-ligand pairs, and streptavidin-biotin. In addition to such known binding pairs, novel binding pairs may be specifically designed. A characteristic of binding pairs is the binding between the two members of the binding pair.

[1218] Oligonucleotide Linkers having molecules on either end may comprise DNA if the Fanzor has DNA collateral activity. Oligonucleotide linkers may be single stranded or double stranded, and in certain embodiments, they could contain both RNA and DNA regions. Oligonucleotide linkers may be of varying lengths, such as 5-10 nucleotides, 10-20 nucleotides, 20-50 nucleotides, or more.

[1219] In some embodiments, the polypeptide identifier elements include affinity tags, such as hemagglutinin (HA) tags, Myc tags, FLAG tags, V5 tags, chitin binding protein (CBP) tags, maltose-binding protein (MBP) tags, GST tags, poly-His tags, and fluorescent proteins (for example, green fluorescent protein (GFP), yellow fluorescent protein (YFP), cyan fluorescent protein (CFP), dsRed, mCherry, Kaede, Kindling, and derivatives thereof, FLAG tags, Myc tags, AU1 tags, T7 tags, OLLAS tags, Glu-Glu tags, VSV tags, or a combination thereof. Other Affinity tags are well known in the art. Such labels can be detected and/or isolated using methods known in the art (for example, by using specific binding agents, such as antibodies, that recognize a particular affinity tag). Such specific binding agents (for example, antibodies) can further contain, for example, detectable labels, such as isotope labels and/or nucleic acid barcodes such as those described herein.

[1220] In certain example embodiments, a lateral flow device comprises a lateral flow substrate comprising a first end for application of a sample. The first region is loaded with a detectable ligand, such as those disclosed herein, for example a gold nanoparticle. The gold nanoparticle may be modified with a first antibody, such as an anti-FITC antibody. The first region also comprises a detection construct. In one example embodiment, a DNA detection construct and a Fanzor system as disclosed herein. In one example embodiment, and for purposes of further illustration, the DNA construct may comprise a FAM molecule on a first end of the detection construction and a biotin on a second end of the detection construct. Upstream of the flow of solution from the first end of the lateral flow substrate is a first test band. The test band may comprise a biotin ligand. Accordingly, when the DNA detection construct is present it its initial state, i.e. in the absence of target, the FAM molecule on the first end will bind the anti-FITC antibody on the gold nanoparticle, and the biotin on the second end of the DNA construct will bind the biotin ligand allowing for the detectable ligand to accumulate at the first test, generating a detectable signal. Generation of a detectable signal at the first band indicate the absence of the target ligand. In the presence of target, the Fanzor complex forms and the Fanzor is activated resulting in cleavage of the DNA detection construct. In the absence of intact DNA detection construct the colloidal gold will flow past the second strip. The lateral flow device may comprise a second band, upstream of the first band. The second band may comprise a molecule capable of binding the antibody-labeled colloidal gold molecule, for example an anti-rabbit antibody capable of binding a rabbit anti-FTIC antibody on the colloidal gold. Therefore, in the presence of one or more targets, the detectable ligand will accumulate at the second band, indicating the presence of the one or more targets in the sample.

[1221] In certain example embodiments, the device is a microfluidic device that generates and/or merges different droplets (i.e., individual discrete volumes). For example, a first set of droplets may be formed containing samples to be screened and a second set of droplets formed containing the elements of the systems described herein. The first and second set of droplets are then merged, and then diagnostic methods as described herein are carried out on the merged droplet set. Microfluidic devices disclosed herein may be silicone-based chips and may be fabricated using a variety of techniques, including, but not limited to, hot embossing, molding of elastomers, injection molding, LIGA, soft lithography, silicon fabrication and related thin film processing techniques. Suitable materials for fabricating the microfluidic devices include, but are not limited to, cyclic olefin copolymer (COC), polycarbonate, poly (dimethylsiloxane) (PDMS), and poly (methylacrylate) (PMMA). In one embodiment, soft lithography in PDMS may be used to prepare the microfluidic devices. For example, a mold may be made using photolithography which defines the location of flow channels, valves, and filters within a substrate. The substrate material is poured into a mold and allowed to set to create a stamp. The stamp is then sealed to a solid support, such as but not limited to, glass. Due to the hydrophobic nature of some polymers, such as PDMS, which absorbs some proteins and may inhibit certain biological processes, a passivating agent may be necessary (Schoffner et al. Nucleic Acids Research, 1996, 24:375-379). Suitable passivating agents are known in the art and include, but are not limited to, silanes, parylene, n-Dodecyl-b-D-matoside (DDM), pluronic, Tween-20, other similar surfactants, polyethylene glycol (PEG), albumin, collagen, and other similar proteins and peptides.

[1222] In certain example embodiments, the system and/or device may be adapted for conversion to a flow-cytometry readout in or allow to all of sensitive and quantitative measurements of millions of cells in a single experiment and improve upon existing flow-based methods, such as the PrimeFlow assay. In certain example embodiments, cells may be cast in droplets containing unpolymerized gel monomer, which can then be cast into single-cell droplets suitable for analysis by flow cytometry. A detection construct comprising a fluorescent detectable label may be cast into the droplet comprising unpolymerized gel monomer. Upon polymerization of the gel monomer to form a bead within a droplet. Because gel polymerization is through free-radical formation, the fluorescent reporter becomes covalently bound to the gel. The detection construct may be further modified to comprise a linker, such as an amine. A quencher may be added post-gel formation and will bind via the linker to the reporter construct. Thus, the quencher is not bound to the gel and is free to diffuse away when the reporter is cleaved by the Fanzor. Amplification of signal in droplet may be achieved by coupling the detection construct to a hybridization chain reaction (HCR initiator) amplification. DNA/RNA hybrid hairpins may be incorporated into the gel which may comprise a hairpin loop that has a RNase sensitive domain. By protecting a strand displacement toehold within a hairpin loop that has a RNase sensitive domain, HCR initiators may be selectively deprotected following cleavage of the hairpin loop by the Fanzor system. Following deprotection of HCR initiators via toehold mediated strand displacement, fluorescent HCR monomers may be washed into the gel to enable signal amplification where the initiators are deprotected.

[1223] An example of microfluidic device that may be used in the context of the invention is described in Hour et al. “Direct Detection and drug-resistance profiling of bacteremias using inertial microfluidics” Lap Chip. 15 (10): 2297-2307 (2016).

[1224] In systems described herein, may further be incorporated into wearable medical devices that assess biological samples, such as biological fluids, of a subject outside the clinic setting and report the outcome of the assay remotely to a central server accessible by a medical care professional. The device may include the ability to self-sample blood, such as the devices disclosed in U.S. Patent Application Publication No. 2015/0342509 entitled “Needle-free Blood Draw to Peeters et al., U.S. Patent Application Publication No. 2015/0065821 entitled “Nanoparticle Phoresis” to Andrew Conrad.

[1225] In some embodiments, the individual discrete volumes are microwells.

[1226] In certain example embodiments, the device may comprise individual wells, such as microplate wells. The size of the microplate wells may be the size of standard 6, 24, 96, 384, 1536, 3456, or 9600 sized wells. In certain example embodiments, the elements of the systems described herein may be freeze dried and applied to the surface of the well prior to distribution and use.

[1227] The devices disclosed herein may further comprise inlet and outlet ports, or openings, which in turn may be connected to valves, tubes, channels, chambers, and syringes and/or pumps for the introduction and extraction of fluids into and from the device. The devices may be connected to fluid flow actuators that allow directional movement of fluids within the microfluidic device. Example actuators include, but are not limited to, syringe pumps, mechanically actuated recirculating pumps, electroosmotic pumps, bulbs, bellows, diaphragms, or bubbles intended to force movement of fluids. In certain example embodiments, the devices are connected to controllers with programmable valves that work together to move fluids through the device. In certain example embodiments, the devices are connected to the controllers discussed in further detail below. The devices may be connected to flow actuators, controllers, and sample loading devices by tubing that terminates in metal pins for insertion into inlet ports on the device.

[1228] As shown herein the elements of the system are stable when freeze dried, therefore embodiments that do not require a supporting device are also contemplated, i.e., the system may be applied to any surface or fluid that will support the reactions disclosed herein and allow for detection of a positive detectable signal from that surface or solution. In addition to freeze-drying, the systems may also be stably stored and utilized in a pelletized form. Polymers useful in forming suitable pelletized forms are known in the art.

[1229] In some embodiments, the individual discrete volumes are defined on a solid substrate. In some embodiments, the individual discrete volumes are spots defined on a substrate. In some embodiments, the substrate may be a flexible materials substrate, for example, including, but not limited to, a paper substrate, a fabric substrate, or a flexible polymer-based substrate. In specific embodiments, the flexible materials substrate is a paper substrate or a flexible polymer based substrate.

[1230] In certain embodiments, the Fanzor is bound to each discrete volume in the device. Each discrete volume may comprise a different ωRNA specific for a different target molecule. In certain embodiments, a sample is exposed to a solid substrate comprising more than one discrete volume each comprising a ωRNA specific for a target molecule. Not being bound by a theory, each ωRNA will capture its target molecule from the sample and the sample does not need to be divided into separate assays. Thus, a valuable sample may be preserved. The effector protein may be a fusion protein comprising an affinity tag. Affinity tags are well known in the art (e.g., HA tag, Myc tag, Flag tag, His tag, biotin). The effector protein may be linked to a biotin molecule and the discrete volumes may comprise streptavidin. In other embodiments, the CRISPR effector protein is bound by an antibody specific for the effector protein. Methods of binding a CRISPR enzyme has been described previously (see, e.g., US20140356867A1).

[1231] The devices disclosed herein may also include elements of point of care (POC) devices known in the art for analyzing samples by other methods. See, for example St John and Price, “Existing and Emerging Technologies for Point-of-Care Testing” (Clin Biochem Rev. 2014 August; 35 (3): 155-167).

[1232] The present invention may be used with a wireless lab-on-chip (LOC) diagnostic sensor system (see e.g., U.S. Pat. No. 9,470,699 “Diagnostic radio frequency identification sensors and applications thereof”). In certain embodiments, the present invention is performed in a LOC controlled by a wireless device (e.g., a cell phone, a personal digital assistant (PDA), a tablet) and results are reported to said device.

[1233] Radio frequency identification (RFID) tag systems include an RFID tag that transmits data for reception by an RFID reader (also referred to as an interrogator). In a typical RFID system, individual objects (e.g., store merchandise) are equipped with a relatively small tag that contains a transponder. The transponder has a memory chip that is given a unique electronic product code. The RFID reader emits a signal activating the transponder within the tag through the use of a communication protocol. Accordingly, the RFID reader is capable of reading and writing data to the tag. Additionally, the RFID tag reader processes the data according to the RFID tag system application. Currently, there are passive and active type RFID tags. The passive type RFID tag does not contain an internal power source, but is powered by radio frequency signals received from the RFID reader. Alternatively, the active type RFID tag contains an internal power source that enables the active type RFID tag to possess greater transmission ranges and memory capacity. The use of a passive versus an active tag is dependent upon the particular application.

[1234] Lab-on-the chip technology is well described in the scientific literature and consists of multiple microfluidic channels, input or chemical wells. Reactions in wells can be measured using radio frequency identification (RFID) tag technology since conductive leads from RFID electronic chip can be linked directly to each of the test wells. An antenna can be printed or mounted in another layer of the electronic chip or directly on the back of the device. Furthermore, the leads, the antenna and the electronic chip can be embedded into the LOC chip, thereby preventing shorting of the electrodes or electronics. Since LOC allows complex sample separation and analyses, this technology allows LOC tests to be done independently of a complex or expensive reader. Rather a simple wireless device such as a cell phone or a PDA can be used. In one embodiment, the wireless device also controls the separation and control of the microfluidics channels for more complex LOC analyses. In one embodiment, a LED and other electronic measuring or sensing devices are included in the LOC-RFID chip. Not being bound by a theory, this technology is disposable and allows complex tests that require separation and mixing to be performed outside of a laboratory.

[1235] In preferred embodiments, the LOC may be a microfluidic device. The LOC may be a passive chip, wherein the chip is powered and controlled through a wireless device. In certain embodiments, the LOC includes a microfluidic channel for holding reagents and a channel for introducing a sample. In certain embodiments, a signal from the wireless device delivers power to the LOC and activates mixing of the sample and assay reagents. Specifically, in the case of the present invention, the system may include a masking agent, CRISPR effector protein, and guide RNAs specific for a target molecule. Upon activation of the LOC, the microfluidic device may mix the sample and assay reagents. Upon mixing, a sensor detects a signal and transmits the results to the wireless device. In certain embodiments, the unmasking agent is a conductive RNA molecule. The conductive RNA molecule may be attached to the conductive material. Conductive molecules can be conductive nanoparticles, conductive proteins, metal particles that are attached to the protein or latex or other beads that are conductive. In certain embodiments, if DNA or RNA is used then the conductive molecules can be attached directly to the matching DNA or RNA strands. The release of the conductive molecules may be detected across a sensor. The assay may be a one step process.

[1236] Since the electrical conductivity of the surface area can be measured precisely quantitative results are possible on the disposable wireless RFID electro-assays. Furthermore, the test area can be very small allowing for more tests to be done in a given area and therefore resulting in cost savings. In certain embodiments, separate sensors each associated with a different CRISPR effector protein and guide RNA immobilized to a sensor are used to detect multiple target molecules. Not being bound by a theory, activation of different sensors may be distinguished by the wireless device.

[1237] In addition to the conductive methods described herein, other methods may be used that rely on RFID or Bluetooth as the basic low cost communication and power platform for a disposable RFID assay. For example, optical means may be used to assess the presence and level of a given target molecule. In certain embodiments, an optical sensor detects unmasking of a fluorescent masking agent.

[1238] In certain embodiments, the device of the present invention may include handheld portable devices for diagnostic reading of an assay (see e.g., Vashist et al., Commercial Smartphone-Based Devices and Smart Applications for Personalized Healthcare Monitoring and Management, Diagnostics 2014, 4 (3), 104-128; mReader from Mobile Assay; and Holomic Rapid Diagnostic Test Reader).

[1239] As noted herein, certain embodiments allow detection via colorimetric change which has certain attendant benefits when embodiments are utilized in POC situations and or in resource poor environments where access to more complex detection equipment to readout the signal may be limited. However, portable embodiments disclosed herein may also be coupled with hand-held spectrophotometers that enable detection of signals outside the visible range. An example of a hand-held spectrophotometer device that may be used in combination with the present invention is described in Das et al. “Ultra-portable, wireless smartphone spectrophotometer for rapid, non-destructive testing of fruit ripeness.” Nature Scientific Reports. 2016, 6:32504, DOI: 10.1038/srep32504. Finally, in certain embodiments utilizing quantum dot-based masking constructs, use of a hand-held UV light, or other suitable device, may be successfully used to detect a signal owing to the near complete quantum yield provided by quantum dots.

### Further Exemplary Device Embodiments

[1240] In one embodiment, the detection assay can be provided on a cartridge or chip. In an aspect, the cartridge can comprise one or more ampoules and one or more wells that are communicatively coupled, allowing for the transfer, exchange or movement of reagents and sample with or without the use of beads through the chambers of the cartridge and facilitating detection assays utilizing systems/devices for facilitating the detection assay on the cartridge.

### Cartridge

[1241] The cartridge, also referred to herein as a chip, according to the present invention comprises a series of components of ampoules and chambers that are communicatively coupled with one or more other components on the cartridge. The coupling is typically a fluidic communication, for example, via channels. The cartridge may comprise a membrane that seals one or more of the chambers and/or ampoules. In an aspect, the membrane allows for storage of reagents, buffers and other solid or fluid components which cover and seal the cartridge. The membrane can be configured to be punctured, pierced or otherwise released from sealing or covering one or more components of the cartridge by a means for releasing reagents.

[1242] As noted above, certain embodiments enable the use of nucleic acid binding beads to concentrate target nucleic acid but that do not require elution of the isolated nucleic acid. Thus, in certain example embodiments, the cartridge may further comprise an activatable magnet, such as an electro-magnet,. A means for activating the magnet may be located on the device, or the means for supplying the magnet or activating the magnet on the cartridge may be provided by a second device, such as those disclosed in further detail below.

### Ampoules

[1243] The ampoules, also referred to as blisters, allow for storage and release of reagents throughout the cartridge. Ampoules can include liquid or solid reagents, for example, lysis reagents in one ampoule and reaction reagents in another ampoule. The reagents can be as described elsewhere herein and can be adapted for the use in the cartridge. The ampoule may be sealed by a film that allows for the bursting, puncture or other release of the contents of the ampoules. See, e.g., Becker, H. & Gärtner, C. Microfluidics-enabled diagnostic systems: markets, challenges, and examples. In Microchip Diagnostics: Methods and Protocols (eds Taly, V. et al.) (Springer, New York, 2017); Czurratis et al., doi: 10.1088/0960-1317/25/4/045002. Considerations for ampoules can include as discussed in, for example, Smith, S., et al., Blister pouches for effective reagent storage on microfluidic chips for blood cell counting. Microfluid Nanofluid 20, 163 (2016). DOI: 10.1007/s10404-016-1830-2. In an aspect, the seal is a frangible seal formed of a composite-layer film that is assembled to the cartridge main body. While referred to herein as an ampoule, the ampoule may comprise a cavity on a chip which comprises a sealed film that is opened by the release means.

### Chambers

[1244] The chambers on the chip may located and sized for fluidic communication via channels or other communication means with ampoules and/or other chambers on the chip.

### Means for Reading the Results of the Assay

[1245] A means for reading the results of the assay can be provided in the system. The means for reading the results of the assay will depend in part on the type of detectable signal generated by the assay. In particular embodiments, the assay generates a detectable fluorescent or color readout. In these instances, the means for reading the results of the assay will be an optic means, for example a single channel or multi-channel optical means such as a fluorimeter, colorimeter or other spectroscopic sensor.

[1246] A combination of means for reading the results of the assay can be utilized, and may include readings such as turbidity, temperature, magnetic, radio, or electrical properties and or optical properties, including scattering, polarization effects, etc.

[1247] The system may further comprise a user interface for programming the device and/or readout of the results of the assay. The user interface may comprise an LED screen. The system can be further configured for a USB port that can allow for docking of four or more devices.

[1248] In an aspect, the system comprises a means for activating a magnet that is disposed within or on the cartridge.

### Lateral Flow Devices

[1249] In one embodiment, the detection assay can be provided on a lateral flow device, see, e.g., International Publication WO 2019/071051, incorporated herein by reference for exemplary lateral flow devices. The lateral flow device can be adapted to detect one or more coronaviruses and/or other viruses in combination of the coronavirus. The lateral flow device may comprise a flexible substrate, such as a paper substrate or a flexible polymer-based substrate, which can include freeze-dried reagents for detection assays with a visual readout of the assay results. See, WO 2019/071051 at [0145]-[0151] and Example 2, specifically incorporated herein by reference. In an aspect, lyophilized reagents can include preferred excipients that aid in rate of reaction, specificity, or other variable, for example, trehalose, histidine, and/or glycine. In one embodiment, a coronavirus assay can be utilized with isothermal amplification reagents, allowing amplification without complex instrumentation that may be unavailable in the field. Accordingly, the assay can be adapted for field diagnostics, including use of visual readout on a lateral flow device, rapid, sensitive detection and can be deployed for early and direct detection. Colorimetric detection can be utilized and may be particularly suited for field deployable applications, as described in International Application PCT/US2019/015726, published as WO2019/148206. In particular, colorimetric detection can be as described in WO2019/148206 at FIGS. 102, 105, 107-111 and [00306]-[00324], incorporated herein by reference and may be utilized with the Fanzor systems.

[1250] In one embodiment, the invention provides a lateral flow device comprising a substrate comprising a first end and a second end. The first end may comprise a sample loading portion, a first region comprising a detectable ligand, two or more Fanzor systems, two or more detection constructs, and one or more first capture regions, each comprising a first binding agent. The substrate may also comprise two or more second capture regions between the first region of the first end and the second end, each second capture region comprising a different binding agent. Each of the two or more Fanzor systems may comprise a Fanzor protein and one or more nucleic acid component molecules, each nucleic acid component molecule sequence configured to bind one or more target molecules.

[1251] The device may comprise a lateral flow substrate for detecting a reaction between a Fanzor polypeptide and a target molecule triggering collateral, non-specific cleavage of detection construct. Substrates suitable for use in lateral flow assays are known in the art. These may include, but are not necessarily limited to, membranes or pads made of cellulose and/or glass fiber, polyesters, nitrocellulose, or absorbent pads (J Saudi Chem Soc 19 (6): 689-705; 2015), and other embodiments further described herein. The detection system, i.e., one or more Fanzor systems and corresponding reporter constructs are added to the lateral flow substrate at a defined reagent portion of the lateral flow substrate, typically on one end of the lateral flow substrate. Reporting constructs used within the context of the present invention can comprise a first molecule and a second molecule linked by an RNA or DNA linker. The lateral flow substrate further comprises a sample portion. The sample portion may be equivalent to, continuous with, or adjacent to the reagent portion. In an aspect, the lateral flow substrate can be contained within a further device. In an aspect, the lateral flow substrate can be utilized for visual readout of a detectable signal in one-pot reactions, e.g., wherein steps of extracting, amplifying and detecting are performed in an individual discrete volume.

### Sample Considerations for Lateral Flow Devices

[1252] When utilizing the detection systems with a lateral flow substrate, samples to be screened are loaded at the sample loading portion of the lateral flow substrate. The samples must be liquid samples or samples dissolved in an appropriate solvent, usually aqueous. The liquid sample reconstitutes the detection reagents such that a detection reaction can occur. The liquid sample begins to flow from the sample portion of the substrate towards the first and second capture regions.

[1253] In particular embodiments, the methods and systems can be utilized for direct detection from patient samples. In an aspect, the methods and systems can further allow for direct detection from patient samples with a visual readout to further facilitate field-deployability. In an aspect, a field depoloyable version can include, for example the lateral flow devices and systems as described herein, and/or colorimetric detection. The methods and systems can be utilized to distinguish multiple viral species and strains and identify clinically relevant mutations, important with viral outbreaks such as the coronavirus outbreak in Wuhan (2019-nCOV). In an aspect, the sample is from a nasophyringeal swab or a saliva sample. See., e.g., Wyllie et al., “Saliva is more sensitive for SARS-COV-2 detection in COVID-19 patients than nasopharyngeal swabs,” DOI: 10.1101/2020.04.16.20067835.

### Lateral Flow Substrate

[1254] In certain example embodiments, a lateral flow device comprises a lateral flow substrate on which detection can be performed. Substrates suitable for use in lateral flow assays are known in the art. These may include, but are not necessarily limited to, membranes or pads made of cellulose and/or glass fiber, polyesters, nitrocellulose, or absorbent pads (J Saudi Chem Soc 19 (6): 689-705; 2015).

[1255] Lateral support substrates comprise a first and second end, and one or more capture regions that each comprise binding agents. The first end may comprise a sample loading portion, a first region comprising a detectable ligand, two or more Fanzor systems, two or more detection constructs, and one or more first capture regions, each comprising a first binding agent. The substrate may also comprise two or more second capture regions between the first region of the first end and the second end, each second capture region comprising a different binding agent. Each of the two or more Fanzor systems may comprise a Fanzor protein and one or more nucleic acid component molecules, each nucleic acid component configured to bind one or more target molecules. The lateral flow substrates may be configured to detect a reaction wherein collateral, non-specific cleavage is triggered upon binding and cleavage of a target molecule in the reaction by the Fanzor protein.

[1256] Lateral support substrates may be located within a housing (see for example, “Rapid Lateral Flow Test Strips” Merck Millipore 2013). The housing may comprise at least one opening for loading samples and a second single opening or separate openings that allow for reading of detectable signal generated at the first and second capture regions.

[1257] The embodiments disclosed herein can be prepared in freeze-dried format for convenient distribution and point-of-care (POC) applications. Such embodiments are useful in multiple scenarios in human health including, for example, viral detection, bacterial strain typing, sensitive genotyping, and detection of disease-associated cell free DNA. Accordingly, the lateral substrate comprising one or more of the elements of the system, including detectable ligands, Fanzor systems, detection constructs and binding agents may be freeze-dried to the lateral flow substrate and packaged as a ready to use device. Alternatively, all or a portion of the elements of the system may be added to the reagent portion of the lateral flow substrate at the time of using the device.

### First End and Second End of the Substrate

[1258] The substrate of the lateral flow device comprises a first and second end. The Fanzor system, i.e., one or more Fanzor systems and corresponding reporter constructs are added to the lateral flow substrate at a defined reagent portion of the lateral flow substrate, typically on a first end of the lateral flow substrate. Reporting constructs used within the context of the present invention comprise a first molecule and a second molecule linked by an RNA or DNA linker. The lateral flow substrate further comprises a sample portion. The sample portion may be equivalent to, continuous with, or adjacent to the reagent portion.

[1259] In certain example embodiments, the first end comprises a first region. The first region comprises a detectable ligand, two or more Fanzor systems, two or more detection constructs, and one or more first capture regions, each comprising a first binding agent.

### Capture Regions

[1260] The lateral flow substrate can comprise one or more capture regions. In embodiments the first end of the lateral flow substrate comprises one or more first capture regions, with two or more second capture regions between the first region of the first end of the substrate and the second end of the substrate. The capture regions may be provided as a capture line, typically a horizontal line running across the device, but other configurations are possible. The first capture region is proximate to and on the same end of the lateral flow substrate as the sample loading portion.

### Binding Agents

[1261] Specific binding-integrating molecules comprise any members of binding pairs that can be used in the present invention. Such binding pairs are known to those skilled in the art and include, but are not limited to, antibody-antigen pairs, enzyme-substrate pairs, receptor-ligand pairs, and streptavidin-biotin. In addition to such known binding pairs, novel binding pairs may be specifically designed. A characteristic of binding pairs is the binding between the two members of the binding pair.

[1262] A first binding agent that specifically binds the first molecule of the reporter construct is fixed or otherwise immobilized to the first capture region. The second capture region is located towards the opposite end of the lateral flow substrate from the first capture region. A second binding agent is fixed or otherwise immobilized at the second capture region. The second binding agent specifically binds the second molecule of the reporter construct, or the second binding agent may bind a detectable ligand. For example, the detectable ligand may be a particle, such as a colloidal particle, that when it aggregates can be detected visually, and generates a detectable positive signal. The particle may be modified with an antibody that specifically binds the second molecule on the reporter construct. If the reporter construct is not cleaved, it will facilitate accumulation of the detectable ligand at the first binding region. If the reporter construct is cleaved the detectable ligand is released to flow to the second binding region. In such an embodiment, the second binding region comprises a second binding agent capable of specifically or non-specifically binding the detectable ligand on the antibody of the detectable ligand. Binding agents can be, for example, antibodies, that recognize a particular affinity tag. Such binding agents can further contain, for example, detectable labels, such as isotope labels and/or nucleic acid barcodes. A barcode is a short sequence of nucleotides (for example, DNA, RNA, or combinations thereof) that is used as an identifier. A nucleic acid barcode may have a length of 4-100 nucleotides and be either single or double-stranded. Methods for identifying cells with barcodes are known in the art. Accordingly, nucleic acid component molecules of the Fanzor systems described herein may be used to detect the barcode.

### Detectable Ligands

[1263] The first region is loaded with a detectable ligand, such as those disclosed herein, for example a gold nanoparticle. The detectable ligand may be a particle, such as a colloidal particle, that when it aggregates can be detected visually. The particle may be modified with an antibody that specifically binds the second molecule on the reporter construct. If the reporter construct is not cleaved, it will facilitate accumulation of the detectable ligand at the first binding region. If the reporter construct is cleaved the detectable ligand is released to flow to the second binding region. In such an embodiment, the second binding agent is an agent capable of specifically or non-specifically binding the detectable ligand on the antibody on the detectable ligand. Examples of suitable binding agents for such an embodiment include, but are not limited to, protein A and protein G. In some examples, the detectable ligand is a gold nanoparticle, which may be modified with a first antibody, such as an anti-FITC antibody.

### Lateral Flow Detection Constructs

[1264] The first region also comprises a detection construct. In one example embodiment, a RNA detection construct and a Fanzor system (a Fanzor protein and one or more nucleic acid component molecules configured to bind to one or more target sequences) as disclosed herein. In one example embodiment, and for purposes of further illustration, the RNA construct may comprise a FAM molecule on a first end of the detection construction and a biotin on a second end of the detection construct. Upstream of the flow of solution from the first end of the lateral flow substrate is a first test band. The test band may comprise a biotin ligand. Accordingly, when the RNA detection construct is present it its initial state, i.e., in the absence of target, the FAM molecule on the first end will bind the anti-FITC antibody on the gold nanoparticle, and the biotin on the second end of the RNA construct will bind the biotin ligand allowing for the detectable ligand to accumulate at the first test, generating a detectable signal. Generation of a detectable signal at the first band indicates the absence of the target ligand. In the presence of target, the Fanzor complex forms and the Fanzor protein is activated resulting in cleavage of the detection construct. In the absence of intact RNA detection construct the colloidal gold will flow past the second strip. The lateral flow device may comprise a second band, upstream of the first band. The second band may comprise a molecule capable of binding the antibody-labeled colloidal gold molecule, for example an anti-rabbit antibody capable of binding a rabbit anti-FITC antibody on the colloidal gold. Therefore, in the presence of one or more targets, the detectable ligand will accumulate at the second band, indicating the presence of the one or more targets in the sample.

[1265] In one embodiment, the first end of the lateral flow device comprises two detection constructs and each of the two detection constructs comprises an RNA or DNA oligonucleotide, comprising a first molecule on a first end and a second molecule on a second end. The first molecule and the second molecule may be linked by an RNA or DNA linker.

[1266] In one embodiment, the first molecule on the first end of the first detection construct may be FAM and the second molecule on the second end of the first detection construct may be biotin, or vice versa. In one embodiment, the first molecule on the first end of the second detection construct may be FAM and the second molecule on the second end of the second detection construct may be Digoxigenin (DIG), or vice versa.

[1267] In one embodiment, the first end may comprise three detection constructs, wherein each of the three detection constructs comprises an RNA or DNA oligonucleotide, comprising a first molecule on a first end and a second molecule on a second end. In specific embodiments, the first and second molecules on the detection constructs comprise Tye 665 and Alexa 488; Tye 665 and FAM, and Tye 665 and Digoxigenin (DIG), respectively.

[1268] In one embodiment, the first end of the lateral flow device comprises two or more Fanzor systems, also referred to as a Fanzor system. In one embodiment, such a Fanzor system may include a Fanzor protein, and one or more nucleic acid component molecules configured to bind to one or more target sequences.

### Methods of Fanzor Composition and System Optimization

[1269] The methods of the present invention can involve optimization of selected parameters or variables associated with the composition, system, and/or its functionality, as described herein further elsewhere. Optimization of the composition, system, in the methods as described herein may depend on the target(s), such as the therapeutic target or therapeutic targets, the mode or type of composition, system, modulation, such as composition, system, based therapeutic target(s) modulation, modification, or manipulation, as well as the delivery of the composition, system, components. One or more targets may be selected, depending on the genotypic and/or phenotypic outcome. For instance, one or more therapeutic targets may be selected, depending on (genetic) disease etiology or the desired therapeutic outcome. The (therapeutic) target(s) may be a single gene, locus, or other genomic site, or may be multiple genes, loci or other genomic sites. As is known in the art, a single gene, locus, or other genomic site may be targeted more than once, such as by use of multiple nucleic acid components, or nucleic acid component scaffold and multiple reprogrammable spacers.

[1270] The activity of the composition and/or system, such as Fanzor polypeptide-based therapy or therapeutics may involve target disruption, such as target mutation, such as leading to gene knockout. The activity of the composition and/or system, such as Fanzor polypeptide-based therapy or therapeutics may involve replacement of particular target sites, such as leading to target correction. Fanzor polypeptide based therapy or therapeutics may involve removal of particular target sites, such as leading to target deletion. The activity of the composition and/or system, such as Fanzor polypeptide-based therapy or therapeutics may involve modulation of target site functionality, such as target site activity or accessibility, leading for instance to (transcriptional and/or epigenetic) gene or genomic region activation or gene or genomic region silencing. The skilled person will understand that modulation of target site functionality may involve Fanzor polypeptide mutation (such as for instance generation of a catalytically inactive Fanzor polypeptide) and/or functionalization (such as for instance fusion of the Fanzor polypeptide with a heterologous functional domain, such as a transcriptional activator or repressor), as described herein elsewhere.

[1271] Accordingly, in an aspect, the invention relates to a method as described herein, comprising selection of one or more (therapeutic) target, selecting one or more functionality of the composition and/or system, and optimization of selected parameters or variables associated with the composition and/or its functionality. In a related aspect, the invention relates to a method as described herein, comprising (a) selecting one or more (therapeutic) target loci, (b) selecting one or more composition functionalities, (c) optionally selecting one or more modes of delivery, and preparing, developing, or designing a composition herein selected based on steps (a)-(c).

[1272] In one embodiment, the functionality of the composition and/or system comprises genomic mutation. In one embodiment, the functionality of the composition and/or system comprises single genomic mutation. In one embodiment, the functionality of the composition and/or system functionality comprises multiple genomic mutation. In one embodiment, the functionality of the composition and/or system comprises gene knockout. In one embodiment, the functionality of the composition and/or system comprises single gene knockout. In one embodiment, the functionality of the composition and/or system comprises multiple gene knockout. In one embodiment, the functionality of the composition and/or system comprises gene correction. In one embodiment, the functionality of the composition and/or system comprises single gene correction. In one embodiment, the functionality of the composition and/or system comprises multiple gene correction. In one embodiment, the functionality of the composition and/or system comprises genomic region correction. In one embodiment, the functionality of the composition and/or system comprises single genomic region correction. In one embodiment, the functionality of the composition and/or system comprises multiple genomic region correction. In one embodiment, the functionality of the composition and/or system comprises gene deletion. In one embodiment, the functionality of the composition and/or system comprises single gene deletion. In one embodiment, the functionality of the composition and/or system comprises multiple gene deletion. In one embodiment, the functionality of the composition and/or system comprises genomic region deletion. In one embodiment, the functionality of the composition and/or system comprises single genomic region deletion. In one embodiment, the functionality of the composition and/or system comprises multiple genomic region deletion. In one embodiment, the functionality of the composition and/or system comprises modulation of gene or genomic region functionality. In one embodiment, the functionality of the composition and/or system comprises modulation of single gene or genomic region functionality. In one embodiment, the functionality of the composition and/or system comprises modulation of multiple gene or genomic region functionality. In one embodiment, the functionality of the composition and/or system comprises gene or genomic region functionality, such as gene or genomic region activity. In one embodiment, the functionality of the composition and/or system comprises single gene or genomic region functionality, such as gene or genomic region activity. In one embodiment, the functionality of the composition and/or system comprises multiple gene or genomic region functionality, such as gene or genomic region activity. In one embodiment, the functionality of the composition and/or system comprises modulation gene activity or accessibility optionally leading to transcriptional and/or epigenetic gene or genomic region activation or gene or genomic region silencing. In one embodiment, the functionality of the composition and/or system comprises modulation single gene activity or accessibility optionally leading to transcriptional and/or epigenetic gene or genomic region activation or gene or genomic region silencing. In one embodiment, the functionality of the composition and/or system comprises modulation multiple gene activity or accessibility optionally leading to transcriptional and/or epigenetic gene or genomic region activation or gene or genomic region silencing.

[1273] Optimization of selected parameters or variables in the methods as described herein may result in optimized or improved the system, such as Fanzor polypeptide-based therapy or therapeutic, specificity, efficacy, and/or safety. In one embodiment, one or more of the following parameters or variables are taken into account, are selected, or are optimized in the methods of the invention as described herein: Fanzor polypeptide allosteric interactions, Fanzor polypeptide functional domains and functional domain interactions, Fanzor polypeptide specificity, nucleic acid component specificity, composition specificity, TAM restrictiveness, TAM type (natural or modified), TAM nucleotide content, TAM length, Fanzor polypeptide activity, nucleic acid component activity, Fanzor polypeptide/nucleic acid component molecule complex activity, target cleavage efficiency, target site selection, target sequence length, ability of effector protein to access regions of high chromatin accessibility, degree of uniform enzyme activity across genomic targets, epigenetic tolerance, mismatch/budge tolerance, Fanzor polypeptide stability, Fanzor polypeptide mRNA stability, nucleic acid component molecule stability, Fanzor polypeptide complex stability, Fanzor polypeptide protein or mRNA immunogenicity or toxicity, nucleic acid component molecule immunogenicity or toxicity, Fanzor polypeptide immunogenicity or toxicity, Fanzor polypeptide or mRNA dose or titer, nucleic acid component molecule dose or titer, dose or titer, Fanzor polypeptide protein size, Fanzor polypeptide expression level, nucleic acid component molecule expression level, Fanzor polypeptide expression level, Fanzor polypeptide spatiotemporal expression, nucleic acid component molecule spatiotemporal expression, Fanzor polypeptide/nucleic acid component spatiotemporal expression.

[1274] By means of example, and without limitation, parameter or variable optimization may be achieved as follows. Fanzor polypeptide specificity may be optimized by selecting the most specific Fanzor polypeptide, e.g., Fanzor. This may be achieved for instance by selecting the most specific Fanzor polypeptide orthologue or by specific Fanzor polypeptide mutations which increase specificity. nucleic acid component specificity may be optimized by selecting the most specific nucleic acid component. This can be achieved for instance by selecting nucleic acid component having low homology, i.e., at least one or preferably more, such as at least 2, or preferably at least 3, mismatches to off-target sites. The specificity may be optimized by increasing Fanzor polypeptide specificity and/or nucleic acid component specificity as above.

[1275] Target length or target sequence length may be optimized, for instance, by selecting the appropriate Fanzor polypeptide, such as the appropriate Fanzor polypeptide recognizing a desired target or target sequence nucleotide length. Alternatively, or in addition, the target (sequence) length may be optimized by providing a target having a length deviating from the target (sequence) length typically associated with the Fanzor polypeptide, such as the naturally occurring Fanzor polypeptide. The Fanzor polypeptide or target (sequence) length may be naturally occurring or may for instance be optimized based on Fanzor polypeptide mutants having an altered target (sequence) length recognition, or target (sequence) length recognition repertoire. For instance, increasing or decreasing target (sequence) length may influence target recognition and/or off-target recognition. Fanzor polypeptide activity may be optimized by selecting the most active Fanzor polypeptide. This may be achieved for instance by selecting the most active Fanzor polypeptide ortholog or by specific Fanzor polypeptide mutations which increase activity. The ability of the Fanzor polypeptide protein to access regions of high chromatin accessibility, may be optimized by selecting the appropriate Fanzor polypeptide or mutant thereof, and can consider the size of the Fanzor polypeptide, charge, or other dimensional variables etc. The degree of uniform Fanzor polypeptide activity may be optimized by selecting the appropriate Fanzor polypeptide or mutant thereof, and can consider Fanzor polypeptide specificity and/or activity, TAM specificity, target length, mismatch tolerance, epigenetic tolerance, Fanzor polypeptide and/or nucleic acid component stability and/or half-life, Fanzor polypeptide and/or nucleic acid component immunogenicity and/or toxicity, etc. nucleic acid component activity may be optimized by selecting the most active nucleic acid component. In one embodiment, this can be achieved by increasing nucleic acid component stability through RNA modification. compositions activity may be optimized by increasing Fanzor polypeptide activity and/or nucleic acid component activity as above.

[1276] The target site selection may be optimized by selecting the optimal position of the target site within a gene, locus or other genomic region. The target site selection may be optimized by optimizing target location comprises selecting a target sequence with a gene, locus, or other genomic region having low variability. This may be achieved for instance by selecting a target site in an early and/or conserved exon or domain (i.e., having low variability, such as polymorphisms, within a population).

[1277] In one embodiment, optimizing target (sequence) length comprises selecting a target sequence within one or more target loci between 5 and 25 nucleotides. In one embodiment, a target sequence is 20 nucleotides.

[1278] In one embodiment, optimizing target specificity comprises selecting targets loci that minimize off-target candidates.

[1279] In one embodiment, the target site may be selected by minimization of off-target effects (e.g., off-targets qualified as having 1-5, 1-4, or preferably 1-3 mismatches compared to target, preferably also considering variability within a population. Fanzor polypeptide stability may be optimized by selecting Fanzor polypeptide having appropriate half-life, such as preferably a short half-life while still capable of maintaining sufficient activity. In one embodiment, this can be achieved by selecting an appropriate Fanzor polypeptide orthologue having a specific half-life or by specific Fanzor polypeptide mutations or modifications which affect half-life or stability, such as inclusion (e.g., fusion) of stabilizing or destabilizing domains or sequences. Fanzor polypeptide mRNA stability may be optimized by increasing or decreasing Fanzor polypeptide mRNA stability. In one embodiment, this can be achieved by increasing or Fanzor polypeptide mRNA stability through mRNA modification. nucleic acid component stability may be optimized by increasing or decreasing nucleic acid component stability. In one embodiment, this can be achieved by increasing or decreasing nucleic acid component stability through RNA modification. The stability may be optimized by increasing or decreasing Fanzor polypeptide stability and/or nucleic acid component molecule stability as above. Fanzor polypeptide protein or mRNA immunogenicity or toxicity may be optimized by decreasing Fanzor polypeptide or mRNA immunogenicity or toxicity. In one embodiment, this can be achieved by mRNA or protein modifications. Similarly, in case of DNA based expression systems, DNA immunogenicity or toxicity may be decreased. nucleic acid component immunogenicity or toxicity may be optimized by decreasing nucleic acid component immunogenicity or toxicity. In one embodiment, this can be achieved by nucleic acid component modifications. Similarly, in case of DNA based expression systems, DNA immunogenicity or toxicity may be decreased. The immunogenicity or toxicity may be optimized by decreasing Fanzor polypeptide immunogenicity or toxicity and/or nucleic acid component immunogenicity or toxicity as above, or by selecting the least immunogenic or toxic Fanzor polypeptide/nucleic acid component combination. Similarly, in case of DNA based expression systems, DNA immunogenicity or toxicity may be decreased. Fanzor polypeptide protein or mRNA dose or titer may be optimized by selecting dosage or titer to minimize toxicity and/or maximize specificity and/or efficacy. nucleic acid component dose or titer may be optimized by selecting dosage or titer to minimize toxicity and/or maximize specificity and/or efficacy. The composition dose or titer may be optimized by selecting dosage or titer to minimize toxicity and/or maximize specificity and/or efficacy. The Fanzor polypeptide size may be optimized by selecting minimal protein size to increase efficiency of delivery, in particular for virus mediated delivery. Fanzor polypeptide, nucleic acid component, or complex thereof expression level may be optimized by limiting (or extending) the duration of expression and/or limiting (or increasing) expression level. This may be achieved for instance by using self-inactivating compositions, systems,, such as including a self-targeting (e.g., Fanzor polypeptide targeting) nucleic acid component molecule, by using viral vectors having limited expression duration, by using appropriate promoters for low (or high) expression levels, by combining different delivery methods for individual Fanzor system components, such as virus mediated delivery of Fanzor polypeptide encoding nucleic acid combined with non-virus mediated delivery of nucleic acid component, or virus mediated delivery of nucleic acid component combined with non-virus mediated delivery of Fanzor polypeptide or mRNA. Fanzor polypeptide, nucleic acid component, or Fanzor complex spatiotemporal expression may be optimized by appropriate choice of conditional and/or inducible expression systems, including controllable Fanzor polypeptide activity optionally a destabilized Fanzor polypeptide and/or a split Fanzor polypeptide, and/or cell- or tissue-specific expression systems.

[1280] In an aspect, the invention relates to a method as described herein, comprising selection of one or more (therapeutic) target, selecting the functionality of the composition and/or system, selecting composition mode of delivery, selecting composition delivery vehicle or expression system, and optimization of selected parameters or variables associated with the composition and/or its functionality, optionally wherein the parameters or variables are one or more selected from Fanzor polypeptide specificity, nucleic acid component specificity, Fanzor complex specificity, Fanzor polypeptide activity, nucleic acid component molecule activity, Fanzor polypeptide/nucleic acid component complex activity, target cleavage efficiency, target site selection, target sequence length, ability of effector protein to access regions of high chromatin accessibility, degree of uniform enzyme activity across genomic targets, epigenetic tolerance, mismatch/budge tolerance, Fanzor polypeptide stability, Fanzor polypeptide mRNA stability, nucleic acid component stability, Fanzor complex stability, Fanzor polypeptide protein or mRNA immunogenicity or toxicity, nucleic acid component immunogenicity or toxicity, Fanzor polypeptide/nucleic acid component complex immunogenicity or toxicity, Fanzor polypeptide protein or mRNA dose or titer, nucleic acid component dose or titer, Fanzor complex dose or titer, Fanzor polypeptide protein size, Fanzor polypeptide expression level, nucleic acid component expression level, Fanzor polypeptide/nucleic acid component molecule complex expression level, Fanzor polypeptide spatiotemporal expression, nucleic acid component spatiotemporal expression, Fanzor polypeptide/nucleic acid component complex spatiotemporal expression.

[1281] It will be understood that the parameters or variables to be optimized as well as the nature of optimization may depend on the (therapeutic) target, the functionality of the composition and/or system, the system mode of delivery, and/or the composition delivery vehicle or expression system.

[1282] In an aspect, the invention relates to a method as described herein, comprising optimization of nucleic acid component specificity at the population level. Preferably, said optimization of nucleic acid component specificity comprises minimizing nucleic acid component target site sequence variation across a population and/or minimizing nucleic acid component off-target incidence across a population.

[1283] In one embodiment, optimization can result in selection of a Fanzor polypeptide that is naturally occurring or is modified. In one embodiment, optimization can result in selection of a Fanzor polypeptide that has nuclease, nickase, deaminase, transposase, and/or has one or more effector functionalities deactivated or eliminated. In one embodiment, optimizing a TAMspecificity can include selecting a Fanzor polypeptide with a modified TAMspecificity. In one embodiment, optimizing can include selecting a Fanzor polypeptide having a minimal size. In one embodiment, optimizing effector protein stability comprises selecting an effector protein having a short half-life while maintaining sufficient activity, such as by selecting an appropriate Fanzor polypeptide orthologue having a specific half-life or stability. In one embodiment, optimizing immunogenicity or toxicity comprises minimizing effector protein immunogenicity or toxicity by protein modifications. In one embodiment, optimizing functional specific comprises selecting a protein effector with reduced tolerance of mismatches and/or bulges between the nucleic acid component molecule and one or more target loci.

[1284] In one embodiment, optimizing efficacy comprises optimizing overall efficiency, epigenetic tolerance, or both. In one embodiment, maximizing overall efficiency comprises selecting an effector protein with uniform enzyme activity across target loci with varying chromatin complexity, selecting an effector protein with enzyme activity limited to areas of open chromatin accessibility. In one embodiment, chromatin accessibility is measured using one or more of ATAC-seq, or a DNA-proximity ligation assay. In one embodiment, optimizing epigenetic tolerance comprises optimizing methylation tolerance, epigenetic mark competition, or both. In one embodiment, optimizing methylation tolerance comprises selecting an effector protein that modify methylated DNA. In one embodiment, optimizing epigenetic tolerance comprises selecting an effector protein unable to modify silenced regions of a chromosome, selecting an effector protein able to modify silenced regions of a chromosome, or selecting target loci not enriched for epigenetic markers

[1285] In one embodiment, selecting an optimized nucleic acid component molecule comprises optimizing stability, immunogenicity, or both, or other associated parameters or variables as described herein elsewhere.

[1286] In one embodiment, optimizing nucleic acid component molecule stability and/or nucleic acid component molecule immunogenicity comprises RNA modification, or other nucleic acid component molecule associated parameters or variables as described herein elsewhere. In one embodiment, the modification comprises removing 1-3 nucleotides form the 3′ end of a target complementarity region of the nucleic acid component molecule. In one embodiment, modification comprises an extended nucleic acid component molecule and/or trans RNA/DNA element that create stable structures in the nucleic acid component molecule that compete with nucleic acid component molecule base pairing at a target of off-target loci, or extended complimentary nucleotides between the nucleic acid component molecule and target sequence, or both.

[1287] In one embodiment, the mode of delivery comprises delivering nucleic acid component molecule and/or Fanzor polypeptide, delivering nucleic acid component molecule and/or Fanzor polypeptide mRNA, or delivery nucleic acid component molecule and/or Fanzor polypeptide as a DNA based expression system. In one embodiment, the mode of delivery further comprises selecting a delivery vehicle and/or expression systems from the group consisting of liposomes, lipid particles, nanoparticles, biolistics, or viral-based expression/delivery systems. In one embodiment, expression is spatiotemporal expression is optimized by choice of conditional and/or inducible expression systems, including controllable Fanzor polypeptide activity optionally a destabilized Fanzor polypeptide and/or a split Fanzor polypeptide, and/or cell- or tissue-specific expression system.

[1288] The methods as described herein may further involve selection of the mode of delivery. In one embodiment, nucleic acid component and/or Fanzor polypeptide are or are to be delivered. In one embodiment, nucleic acid component and/or Fanzor polypeptide mRNA are or are to be delivered. In one embodiment, nucleic acid component and/or Fanzor polypeptide provided in a DNA-based expression system or are to be delivered. In one embodiment, delivery of the individual system components comprises a combination of the above modes of delivery. In one embodiment, delivery comprises delivering nucleic acid component and/or Fanzor polypeptide protein, delivering nucleic acid component and/or Fanzor polypeptide mRNA, or delivering nucleic acid component and/or Fanzor polypeptide as a DNA based expression system.

[1289] The methods as described herein may further involve selection of the composition delivery vehicle and/or expression system. Delivery vehicles and expression systems are described herein elsewhere. By means of example, delivery vehicles of nucleic acids and/or proteins include nanoparticles, liposomes, etc. Delivery vehicles for DNA, such as DNA-based expression systems include for instance biolistics, viral based vector systems (e.g. adenoviral, AAV, lentiviral), etc. the skilled person will understand that selection of the mode of delivery, as well as delivery vehicle or expression system may depend on for instance the cell or tissues to be targeted. In one embodiment, the delivery vehicle and/or expression system for delivering the compositions, systems, or components thereof comprises liposomes, lipid particles, nanoparticles, biolistics, or viral-based expression/delivery systems.

### Kits

[1290] In one aspect, the invention provides kits containing any one or more of the elements disclosed in the above methods and compositions. In one aspect, the invention provides a kit comprising one or more of the components described herein. In one embodiment, the kit comprises the compositions herein and instructions for using the kit. In one embodiment, the kit comprises a vector system and instructions for using the kit. In one embodiment, the kit comprises a delivery system and instructions for using the kit. In one embodiment, the kit comprises a vector system and instructions for using the kit. Elements may be provided individually or in combinations, and may be provided in any suitable container, such as a vial, a bottle, or a tube. The kits may include the nucleic acid component and optionally an unbound protector strand as described herein. The kits may include the nucleic acid component with a protector strand bound to at least partially to a reprogrammable spacer portion of the nucleic acid component sequence (i.e., nucleic acid component). Thus, the kits may include the nucleic acid component in the form of a partially double stranded nucleotide sequence as described here. In one embodiment, the kit includes instructions in one or more languages, for example in more than one language. The instructions may be specific to the applications and methods described herein.

[1291] In one embodiment, a kit comprises one or more reagents for use in a process utilizing one or more of the elements described herein. Reagents may be provided in any suitable container. For example, a kit may provide one or more reaction or storage buffers. Reagents may be provided in a form that is usable in a particular assay, or in a form that requires addition of one or more other components before use (e.g., in concentrate or lyophilized form). A buffer can be any buffer, including but not limited to a sodium carbonate buffer, a sodium bicarbonate buffer, a borate buffer, a Tris buffer, a MOPS buffer, a HEPES buffer, and combinations thereof. In one embodiment, the buffer is alkaline. In one embodiment, the buffer has a pH from about 7 to about 10. In one embodiment, the kit comprises one or more oligonucleotides corresponding to a nucleic acid component scaffold, reprogrammable sequence for insertion into a vector so as to operably link the nucleic acid component sequence and a regulatory element. In one embodiment, the kit comprises a homologous recombination template polynucleotide. In one embodiment, the kit comprises one or more of the vectors and/or one or more of the polynucleotides described herein. The kit may advantageously allow to provide all elements of the systems of the invention.

[1292] Further embodiments are illustrated in the following Examples which are given for illustrative purposes only and are not intended to limit the scope of the invention.

### EXAMPLES

### Example 1

[1293] Gene editing is a powerful method for deleting, inserting, or modifying DNA sequences. Since it was first developed, there has been enormous excitement about the potential for gene editing as a therapeutic to treat genetic disorders at their root. High efficiency manipulation of genomic sequences could streamline the development of novel and highly impactful treatments for genetic diseases, such as cancers, autoimmune disorders, and neurological disorders [1, 2, 3, 4].

[1294] In the past few decades, several approaches to gene editing have been developed, such as transcription activator-like effector nucleases (TALENs) and zinc-finger nucleases (ZFNs) [5, 6]. However, these systems are difficult and time-consuming to retarget to specific sequences in the genome because they are entirely protein based [7]. In 2013, Cong et al. and Mali et al. introduced CRISPR-Cas (clustered regularly interspaced short palindromic re-peats and CRISPR-associated protein) as a new class of tool for human genome engineering [8, 9]. CRISPR-Cas systems contain an RNA guided endonuclease which cleaves DNA sequences complementary to the RNA guide. This feature in particular makes CRISPR-Cas a powerful gene editing system: it can be retargeted simply by changing the gRNA (guide-RNA, ˜20nt) [10]. There are many different types of CRISPR-Cas systems in nature, but the two most commonly used ones for genome editing are CRISPR-Cas9 and CRISPR-Cas12, both of which use an RNA-guided single protein effector [11]. Cas9 and Cas12 have been further engineered to expand their utility beyond DNA cleavage. Using dCas (catalytically inactivated Cas variants) fused with various effector proteins allows the dCas system to achieve a range of RNA-guided functions including gene repression and activation, epigenome modulation, and base editing (the exchange of specific DNA bases for another one) [12, 13].

[1295] The robustness and reprogrammability of Cas9 and Cas12 have made them a powerful molecular biology tool, but there is a major bottleneck in their translation to the clinic [14]. Namely, the large size of these proteins (and particularly dCas-based constructs like base editors) renders them unsuitable for use with the most promising gene therapy delivery vectors, adeno-associated virus (AAV) vectors [15]. AAV vectors are derived from a non-enveloped eukaryotic virus and have proven to be one of the safest delivery methods for gene therapies due to their low immunogenicity and tissue specificity [16]. However, the packaging capacity of AAV is limited. Cas9 and gRNA together are ˜4.2 kb in size, whereas AAV can hold a maximum of ˜4.5-5 kb of genomic material. This does not leave enough left-over space to fit the required regulatory elements, such as promoters, to ensure Cas9 and the guide RNA are appropriately expressed.

[1296] Although it is possible to design minimal Cas9-based therapeutics, most genetic diseases cannot be treated with Cas9 itself: Cas9 typically generates loss-of-function mutations, which will rarely be beneficial for treating disease [17]. Rather, additional components are needed, such as donor DNA templates in situations where gene insertion is required to treat a genetic disease or base-editing constructs in situations where a point mutation needs to be corrected. These constructs are usually very large, precluding their efficient delivery [18, 19]. Thus, only a small fraction of genetic diseases are currently treatable with gene editing. Indeed, most ongoing clinical trials using CRISPR-Cas technology aim to treat diseases where editing can be performed ex vivo (such as blood disorders) or genetic diseases where loss of function can be therapeutic (such as LCA10) [20, 21].

[1297] One possible solution to this challenge is to engineer or identify much smaller Cas-like proteins that, even when fused to other proteins to make base editing constructs, can be packaged into AAV. As part of this effort to find smaller CRISPR systems, Altae-Tran et al. took a computational approach to search for proteins with a similar domain architecture as Cas9 and Cas12. They identified 3 highly abundant transposon-encoded nucleases, IscB, IsrB, and TnpB, in prokaryotic genomes [22]. Collectively, these transposon-encoded nucleases are known as obligate mobile element-guided activity (OMEGA) systems. Bacterial insertion sequences (IS) of the IS200/IS605 family can encode TnpA transposases along with an accessory protein, TnpB (FIG. 3A). This TnpB protein is the likely ancestor of Cas12, but it is substantially smaller (400 amino acids (aa) vs 1300 aa in Cas12). Small RNA sequencing revealed a non-coding RNA (ncRNA, 150 nt long) directly downstream of the tnpB gene, similar to the gRNA used by Cas12. This ncRNA, termed an ωRNA, includes the sequence information of the end of the IS (scaffold region) and a short DNA stretch next to the IS (guide region, ˜20 nt). The ωRNA interacts with TnpB through its scaffold region, and brings the protein to the target site (complementary to the guide region), which is then cleaved by TnpB. Both IscB and TnpB have been shown to work in human cells, providing the starting point for development of more compact gene editing tools [22, 23].

[1298] In addition to IscB, IsrB, and TnpB, which, like CRISPR-Cas, are all found in prokaryotes, Altae-Tran et al. also found one eukaryotic OMEGA system, termed Fanzor (FIG. 3B). As Fanzor is often associated with a variety of transposases in transposable elements, the authors predicted that Fanzor may be an accessory protein for the transposable elements and works as a methyltransferase to regulate their transposition. However, it is not known if Fanzor uses an ωRNA analogously to other OMEGA systems nor is the biological function of Fanzor known. Nevertheless, the existence of a eukaryotic OMEGA system is a compelling candidate for development as a gene editing tool.

[1299] To understand Fanzor's mechanism of action and engineer it for genome editing, Applicant first selected a candidate ortholog to study based on computationally mining. Applicant then ex-perimentally determined that Fanzor is associated with an ωRNA, which is located in the downstream region of the locus, similar to TnpB. Preliminary results showed that Fanzor can induce double-strand breaks (DSBs) in an oRNA-guided manner in the genome of human cell lines (unpublished data), but the efficiency of DSBs observed was too low (<1%) for therapeutic applications. To boost activity in human cells, Applicant took a two-pronged approach, engineering both the ωRNA and the Fanzor protein, creating an optimized system with an enhanced oRNA guide and point mutants predicted to increase the affinity between the protein and nucleic acids. This optimized Fanzor-ωRNA complex is a prime candidate for further development as the platform for larger gene editing constructs, such as base editors, leading to efficient, compact gene editing tools that can be packaged in AAV, resulting in the next generation of gene editing therapeutics.

### Methods

### 2. 1 Cloning

[1300] Plasmids used in this study were cloned using general cloning methodologies including Gibson assembly with NEBuilder HiFi DNA Assembly Master Mix (New England Biolabs, E2621L) and golden gate assembly with a variety of type IIS restriction enzymes.

### Stb13

[1301] Escherichia coli strain (Thermo Fisher, C737303) was used for DNA cloning. The sequences of cloned constructs were confirmed by whole plasmid sequencing following Tn5 tagmentation after mini-prep of plasmids with QIAprep reagents (QIAGEN, 27106).

2.2 RNA Scaffold Prediction and pU6 guideRNA Expression Vector Construction

[1302] After screening Fanzor proteins for activity and ribonucleoprotein complex formation with ωRNA, one ortholog was selected for downstream engineering. The Fanzor ωRNA secondary structure was predicted by mFold [26]. The RNA-seq analysis for Fanzor ωRNA shows a second RNA species in addition to a major prominent variant, and 4 possible variants were tested for their ability to support human genome targeting. Each scaffold region of the ωRNA variants was cloned under the U6 promoter with two inverted BbsI type IIS restriction sites behind the U6 promoter. Guides were cloned into the scaffolds by golden gate assembly as two annealed complementary oligonucleotides. FIG. 4 shows an experimental workflow of small RNA-seq of ωRNA to identify ncRNA. RNA was pulled down using purified Fanzor protein. Small RNAs were then isolated from this pull-down, randomly fragmented, subjected to adaptor ligation, and amplified by PCR. NGS was then used to sequence the RNA reads, which were then mapped to the Fanzor locus.

### 2.3 Fanzor Mammalian Expression Vector Construction

[1303] Human-codon optimized Fanzor was cloned into two types of plasmids: one containing N-terminal NLS and HA tag (pMJ145), and the other containing C-terminal HA and NLS

[1304] tag (pMJ149). Fanzor mutants were constructed using site-directed mutagenesis with KLD Enzyme Mix (NEB, M0554S) as follows: 1 ng of each template (either pMJ145 or pMJ149) plasmid DNA was resuspended with 1.25 μl forward and reverse primers (final concentration: 0.5 uM). The mixture was amplified with 12.5 μl of Q5 HotStart High-Fidelity 2X Master Mix (NEB, M0492L) under the following thermal cycling conditions: 1 cycle, 98° C., 30 seconds; 25 cycles, 98° C., 10 seconds, 65°, 20 seconds, 72° C. 180 seconds; 1 cycle, 72° C., 300 seconds; 4° C. hold. 1 μl of the PCR product (FIG. 12A-12D and FIG. 13A-13B) was resuspended with 2.5 μl of 2X KLD Reaction Buffer, 0.5 μl of 10× KLD Enzyme Mix, and 1 μl of nuclease-free water. After incubation at room temperature for 30 minutes, 1 μl of the KLD mix from the previous reaction was mixed into Stb13 competent cells, and then spread onto an ampicillin selection plate and incubated overnight at 37° C.

### 2.4 Mammalian Cell Culture and Transfection

[1305] Mammalian cell culture experiments were performed as previously described [22]. All transfection experiments were performed in the HEK293FT cell line (Thermo Fisher, R70007) grown in Dulbecco's modified Eagle medium with high glucose, sodium pyruvate and Gluta-MAX (Thermo Fisher, 35050061), additionally supplemented with 10% fetal bovine serum (VWR Seradigm, 89510-194). Transfections were performed with Lipofectamine 3000 (Thermo Fisher, L3000015) in 96-well plates unless otherwise noted. Cells were plated at approximately 2.0 ×\hat{ }4 cells per well 16-20 hours before transfection. For each well on the plate, transfection plasmids (100 ng) were combined with OptiMEM Reduced Serum Medium (Thermo Fisher, 31985062) to a total of 5 μl and mixed with 0.2 μl of P3000 reagent. Separately, 5 μl of OptiMEM was combined with 0.3 μl of Lipofectamine 3000 reagent. Plasmid and Lipofectamine solutions were then combined, incubated at room temperature for 10 minutes, and pipetted onto cells.

### 2.5 Western Blotting

[1306] This analysis was previously described by Saito et al [26]. 2.0 ×10\hat{ }5 of HEK293FT cells were seeded in 12-well plates a day before transfection, and were transfected with a Fanzor (800 ng) and ωRNA expression vector (200 ng). After incubation at 37° C. for 2 days, cells were washed with ice-cold PBS and lysed in lysis buffer (50 mM Tris, pH 8.0, 150 mM NaCl, 1 mM EDTA, 0.1% TritonX-100) with Complete EDTA-free protease inhibitors (Roche 04693159001) for analysis. Samples were boiled for 10 minutes in NuPAGE Sample Buffer (Invitrogen NP0008) with 50 mM dithiothreitol and separated with 4-12% NuPAGE gels (Invitrogen NP0322). Proteins were transferred onto PVDF membranes (Thermo Fisher Scientific IB24001), probed with a primary antibody for either HA tag [HA.C5] (ab18181) or a-tubulin (clone DM1A) (Sigma, T9026) or Histone H3 (D1H2) (Cell Signaling Technology 4499) for 1 hour and ECL Mouse IgG, HRP-linked whole antibody (GE Healthcare, NA931V, lot: 12227046) for 1 hour under 5% BOLT-QuickBlocker (G-Biosciences 786-011) in TBS blocking conditions and detected with ECL Western blotting reagent (Thermo Fisher Scientific 32209). FIG. 5 shows an experimental workflow of Western blotting to confirm Fanzor protein expression in HEK293FT cells. Cells are lysed by nonionic detergent containing buffer, and insoluble fractions including cellular debris were separated by table top centrifugation. Extracted proteins are then subjected to SDS-PAGE. After gel electrophoresis, proteins are transferred to PVDF membranes. These membranes are then incubated with primary antibody specific to epitope-tag attached to Fanzor. After blocking, a secondary antibody (labeled with horseradish peroxidase for chemiluminescence detection) is added to bind to the primary antibody. Chemiluminescence imaging is then used to visualize Fanzor protein expression.

### 2.6 Immunofluorescence

[1307] This analysis was previously described by Saito et al. [27]. 2.0 ×10A5 of HEK293FT cells were seeded on a Poly-D-Lysine/Laminin coated coverglass (BD354087) in 12-well plates a day before transfection, and transfected with a Fanzor (800 ng) and ωRNA expression vector (200 ng). After incubation at 37° C. for 2 days, cells on the coverglass were washed with PBS, then fixed with 4% paraformaldehyde. After permeabilization with 0.5% TritonX-100 in PBS, the cells were incubated with a primary antibody for HA tag [HA.C5] (ab18181) and GAPDH (14C10) (Cell Signaling Technology, 2118) at 4° C. overnight. Then, cells were further incubated with Alexa Fluor 488 Goat anti-Mouse IgG (H+L) Secondary Antibody (Invitrogen, A11001) and Alexa Fluor 568 Goat anti-Rabbit IgG (H+L) Secondary Antibody (invitrogen, A11036) in 10% goat serum (Sigma G9023-10ML) blocking buffer, and mounted with ProLong Gold Antifade Reagent with DAPI (Cell Signaling Technology 8961). Images were captured by STELLARIS 5 confocal microscope platforms (Leica), and processed by ImageJ.

### 2.7 Human Genome Cleavage Assay

[1308] The activity of Fanzor proteins on the human genome was tested as previously described [22]. Briefly, 2.0 ×10A4 of HEK293FT cells in 96-well plates were co-transfected with combinations of Fanzor (80 ng) and ωRNA expression plasmid (20 ng). After 3 days of incubation at 37° C., the cells were resuspended in 40 μL QuickExtract DNA Extraction Solution (Lucigen, QE09050) and cycled at 65° C. for 15 minutes, 68° C. for 15 minutes, then 95° C. for 10 minutes to lyse cells. 2 μL of lysate was used as the template for each 12.5 μl-PCR reaction. Target sites were amplified with NEBNext High-Fidelity 2× PCR Master Mix (NEB, M0541L) under the following thermal cycling conditions: 1 cycle, 98° C., 30 seconds; 15 cycles, 98° C., 10 seconds, 65° C., 20 seconds, 72° C., 30 seconds; 1 cycle, 72° C., 30 seconds; 4° C. hold. 1 μL of this first PCR product was used for the template for each 10 μl-second PCR reaction: 1 cycle, 98° C., 30 seconds; 15 cycles, 98° C., 10 seconds, 63° C., 20 seconds, 72° C., 30 seconds; 1 cycle, 72° C., 30 seconds; 4° C. hold (total 30 cycles for first and second PCR reactions). Amplicons were sequenced using a MiSeq Reagent Kit v2, 300-cycle (Illumina, MS-102-2002). Indel efficiency was quantified using the CRISPResso2 pipeline [28]. FIG. 6 shows an experimental workflow for assessing Fanzor-mediated cleavage on the human genome. ωRNA expression vector targeting a locus on the human genome and Fanzor protein expression vectors are co-transfected into HEK293FT cells using lipofectamine. After incubation, cells are lysed to make the DNA accessible for sequencing. NGS is used to quantify indels, which are insertions or deletions, at the targeted locus.

### Results

### 3.1 Comparison of Cas12, TnpB, Fanzor

[1309] The computational identification of Fanzor as a eukaryotic relative of CRISPR-Cas12 and the OMEGA TnpB system revealed similarities in the domain architecture of these effector proteins (FIG. 7A). As a first step toward engineering Fanzor for use as a gene editing tool, Applicant sought to understand how that domain architecture relates to the mechanism of Fanzor by comparing the structures of these three proteins. One key question we were interested in answering was whether Fanzor, like Cas12 and TnpB, is similarly shaped to interact with an RNA guide and target DNA, as no obvious ωRNA was computationally identified for Fanzor in the original study [22]. Applicant compared experimentally solved Cas12a protein complexes with a gRNA [29] and target DNA structure to structural models of ISDra2 TnpB and Fanzor obtained using Alphafold2 [30]. Although Fanzor is significantly smaller than Cas12a, the core shape is very similar, including the REC (light purple) and bridge helix (magenta) domains (FIG. 7B). In Cas12a, the bridge helix domain interacts with the gRNA. This suggests that Fanzor may interact with an RNA guide in a similar manner as Cas12a. One major distinction between Cas12a and TnpB is the size of the RNA guide. In the case of Cas12a, the RNA guide (derived from the CRISPR RNA) is approximately 44 nt long [31], whereas TnpB uses an RNA guide (derived from the ωRNA) that is 150-200 nt long [22]. This difference highlights the trade-off between protein size and RNA guide length. Together, these results suggest that Fanzor does interact with an RNA guide, and that is likely closer in length to TnpB's than Cas12a's RNA guide.

### 3.2 Reconstitution of Fanzor in Human Cells

[1310] Based on structural comparisons, Applicant was encouraged to look for a non-coding RNA that Fanzor specifically binds to. To do this, Fanzor protein (hereafter called FZID16) was purified, and associated RNA species were sequenced, revealing an 88-90 nt-long ωRNA species downstream of the Fanzor ORF (FIG. 8A). The Fanzor protein is frequently located in a putative transposable element flanked by inverted terminal repeats [24], and this minimal ωRNA is derived from the right transposon end (RE) sequence and contains a flanking extension of 16nt at its 3′ end. This is similar to the TnpB ωRNA structure, in which the 3′ flanking extension guides TnpB to target DNA sites. Analogously, in vitro experiments by the Zhang lab showed that in the presence of this minimal ωRNA in which the 3′ extension was reprogrammed to a target of interest, purified FZID16 protein can cut a DNA substrate. TnpB, like its CRISPR relative Cas12a, requires a short sequence motif, called a transposon-associated motif (TAM) (or PAM in the case of Cas12a) for target recognition. In in vitro experiments, Fanzor was found to generate a DSB 20-21 bp downstream of the TAM (FIG. 8B). Based on this preliminary result, Applicant next sought to reconstitute Fanzor in human cells using the minimal ωRNA.

[1311] Because FZID16 is a fungal protein, Applicant first optimized the coding sequence for expression in human cells. Applicant also added a nuclear localization signal (NLS) to the gene to ensure its appropriate subcellular localization. To test if FZID16 is expressed in human cells, plasmids encoding human codon optimized NLS-tagged (either at the N-terminus or C-terminus) FZID16 were transfected into HEK293T human cell lines. To see whether ωRNA expression enhances the stability of the Fanzor protein, Applicant also tested co-expressing these FZID16 with the minimal oRNA species under a U6 promoter (pMJ162). Two days after transfection, whole cell lysates of transfected cells were subjected to immunoblotting. In parallel, the sub-cellular localization of the proteins in HEK293FT cells was assessed by immunofluorescence. Both N-terminal and C-terminal tagged FZID16 were expressed in HEK293FT cells (FIG. 8C). Applicant observed that a large part of both N-terminal and C-terminal tagged proteins are localized in cytosol, but confirmed that some are localized in nucleus (FIG. 8D).

[1312] Applicant next tested FZID16 for DNA cleavage activity on the human genome. Applicant expressed both N-terminal and C-terminal NLS tagged FZID16 proteins together and an ωRNA bearing a 30nt guide sequence targeting the human genome. Applicant screened 12 guides targeting 8 different loci: EMX1, DNMT1, CCR5, VEGFA, β2M, hROSA26, H11, and LINE1, and confirmed that FZID16 induced indels at 2 of these sites with varying efficiency up to 0.36% (FIG. 8E). This finding established a baseline genome editing activity for Fanzor systems, providing a starting point for downstream engineering.

### Optimization of the ωRNA Scaffold

[1313] Fanzor uses a comparatively larger ωRNA relative to canonical Cas endonucleases, pro-viding a unique angle to engineer the system. Applicant sought to take advantage of this opportunity by optimizing the ωRNA structure to increase the cleavage activity of Fanzor. To engineer the ωRNA, Applicant performed an RNA pull-down using purified Fanzor and then sequenced the associated small RNAs. The minimal ωRNA showed up as a large peak in the RNA-sequencing trace. However, Applicant noticed that there is another peak at −200 bp to −150 bp upstream from the end of its ORF in addition to the downstream prominent peak (FIG. 9A) This suggests that the minimal ωRNA, which does not include this region, may lack features important for robust activity in human cells. To test this hypothesis, Applicant constructed 3 ωRNA scaffold variants (pMJ169, 170 and 171) to tile across this putative extended scaffold region. A second way to optimize the ωRNA is to increase its stability in human cells. Previous work by Karvelis et al. focused on TnpB used a guide RNA that contained a hepatitis delta virus (HDV) ribozyme at the 3′ end, which protects the RNA from degradation in the cell [23]. Thus, Applicant also synthesized an additional ωRNA scaffold variant with an HDV ribozyme attached to the 3′ terminus of the minimal ωRNA (pMJ168). Applicant further added the 30-nt guide sequence targeting β2M (guide ID7; hereafter gID7, FIG. 8E) to these 4 RNA scaffold variants. These engineered guides were then transfected into human cells alongside C-terminal NLS-tagged FZID16 to assess cleavage activity.

[1314] Applicant measured indel activity at the β2M target site and found that all extended ωRNA scaffold variants with gID7 facilitated activity (FIG. 9B and FIG. 10A-10E). The ωRNA with the longest scaffold (pMJ171) generated the highest indel frequency (0.78%), increasing the baseline cleavage with minimal ωRNA (0.17%) by ˜4.6 fold. Unexpectedly, Applicant found that the addition of the HDV ribozyme at the 3′ end of the ωRNA scaffold region is not effective on Fanzor ωRNA and that it decreased indel frequency. These results indicate that Fanzor oRNA is a similar size as the one for TnpB (150-200 nt for ISDra2) [23], although there may be relevant differences in their behavior in human cells. See also Table 13 for oRNA and plasmid constructs.

TABLE 13

| lasmid | Backbone plasmid Sequence (without guide) | omegaRNA seq (without guide) |
|---|---|---|
| pMJ162 | AATTCTGTGGAATGTGTGTCAGTTAGGGTGTGGAAAGTCCCCAGGC | Gttttccgagccggttgtcgcgcggttcaatccctggtgc |
| | TCCCCAGCAGGCAGAAGTATGCAAAGCATGCATCTCAATTAGTCAG | gggtgctagtgccaatacccaccggctccgcacta |
| | CAACCAGGTGTGGAAAGTCCCCAGGCTCCCCAGCAGGCAGAAGTAT | (SEQ ID NO: 566) |
| | GCAAAGCATGCATCTCAATTAGTCAGCAACCATAGTCCCGCCCCTA | |
| | ACTCCGCCCATCCCGCCCCTAACTCCGCCCAGTTCCGCCCATTCTCC | |
| | GCCCCATGGCTGACTAATTTTTTTTATTTATGCAGAGGCCGAGGCCG | |
| | CCTCTGCCTCTGAGCTATTCCAGAAGTAGTGAGGAGGCTTTTTTGGA | |
| | GGCCTAGGCTTTTGCAAAAAGCTAACTTGTTTATTGCAGCTTATAAT | |
| | GGTTACAAATAAAGCAATAGCATCACAAATTTCACAAATAAAGCAT | |
| | TTTTTTCACTGCATTCTAGTTGTGGTTTGTCCAAACTCATCAATGTAT | |
| | CTTATCATGTCTGTATACCGTCGACCTCTAGCTAGAGCTTGGCGTAA | |
| | TCATGGTCATAGCTGTTTCCTGTGTGAAATTGTTATCCGCTCACAAT | |
| | TCCACACAACATACGAGCCGGAAGCATAAAGTGTAAAGCCTGGGGT | |
| | GCCTAATGAGTGAGCTAACTCACATTAATTGCGTTGCGCTCACTGCC | |
| | CGCTTTCCAGTCGGGAAACCTGTCGTGCCAGCTGCATTAATGAATC | |
| | GGCCAACGCGCGGGGAGAGGCGGTTTGCGTATTGGGCGCTCTTCCG | |
| | CTTCCTCGCTCACTGACTCGCTGCGCTCGGTCGTTCGGCTGCGGCGA | |
| | GCGGTATCAGCTCACTCAAAGGCGGTAATACGGTTATCCACAGAAT | |
| | CAGGGGATAACGCAGGAAAGAACATGTGAGCAAAAGGCCAGCAAA | |
| | AGGCCAGGAACCGTAAAAAGGCCGCGTTGCTGGCGTTTTTCCATAG | |
| | GCTCCGCCCCCCTGACGAGCATCACAAAAATCGACGCTCAAGTCAG | |
| | AGGTGGCGAAACCCGACAGGACTATAAAGATACCAGGCGTTTCCCC | |
| | CTGGAAGCTCCCTCGTGCGCTCTCCTGTTCCGACCCTGCCGCTTACC | |
| | GGATACCTGTCCGCCTTTCTCCCTTCGGGAAGCGTGGCGCTTTCTCA | |
| | TAGCTCACGCTGTAGGTATCTCAGTTCGGTGTAGGTCGTTCGCTCCA | |
| | AGCTGGGCTGTGTGCACGAACCCCCCGTTCAGCCCGACCGCTGCGC | |
| | CTTATCCGGTAACTATCGTCTTGAGTCCAACCCGGTAAGACACGACT | |
| | TATCGCCACTGGCAGCAGCCACTGGTAACAGGATTAGCAGAGCGAG | |
| | GTATGTAGGCGGTGCTACAGAGTTCTTGAAGTGGTGGCCTAACTAC | |
| | GGCTACACTAGAAGAACAGTATTTGGTATCTGCGCTCTGCTGAAGC | |
| | CAGTTACCTTCGGAAAAAGAGTTGGTAGCTCTTGATCCGGCAAACA | |
| | AACCACCGCTGGTAGCGGTTTTTTTGTTTGCAAGCAGCAGATTACGC | |
| | GCAGAAAAAAAGGATCTCAAGAAGATCCTTTGATCTTTTCTACGGG | |
| | GTCTGACGCTCAGTGGAACGAAAACTCACGTTAAGGGATTTTGGTC | |
| | ATGAGATTATCAAAAAGGATCTTCACCTAGATCCTTTTAAATTAAA | |
| | AATGAAGTTTTAAATCAATCTAAAGTATATATGAGTAAACTTGGTCT | |
| | GACAGTTACCAATGCTTAATCAGTGAGGCACCTATCTCAGCGATCT | |
| | GTCTATTTCGTTCATCCATAGTTGCCTGACTCCCCGTCGTGTAGATA | |
| | ACTACGATACGGGAGGGCTTACCATCTGGCCCCAGTGCTGCAATGA | |
| | TACCGCGAGACCCACGCTCACCGGCTCCAGATTTATCAGCAATAAA | |
| | CCAGCCAGCCGGAAGGGCCGAGCGCAGAAGTGGTCCTGCAACTTTA | |
| | TCCGCCTCCATCCAGTCTATTAATTGTTGCCGGGAAGCTAGAGTAAG | |
| | TAGTTCGCCAGTTAATAGTTTGCGCAACGTTGTTGCCATTGCTACAG | |
| | GCATCGTGGTGTCACGCTCGTCGTTTGGTATGGCTTCATTCAGCTCC | |
| | GGTTCCCAACGATCAAGGCGAGTTACATGATCCCCCATGTTGTGCA | |
| | AAAAAGCGGTTAGCTCCTTCGGTCCTCCGATCGTTGTCAGAAGTAA | |
| | GTTGGCCGCAGTGTTATCACTCATGGTTATGGCAGCACTGCATAATT | |
| | CTCTTACTGTCATGCCATCCGTAAGATGCTTTTCTGTGACTGGTGAG | |
| | TACTCAACCAAGTCATTCTGAGAATAGTGTATGCGGCGACCGAGTT | |
| | GCTCTTGCCCGGCGTCAATACGGGATAATACCGCGCCACATAGCAG | |
| | AACTTTAAAAGTGCTCATCATTGGAAAACGTTCTTCGGGGCGAAAA | |
| | CTCTCAAGGATCTTACCGCTGTTGAGATCCAGTTCGATGTAACCCAC | |
| | TCGTGCACCCAACTGATCTTCAGCATCTTTTACTTTCACCAGCGTTT | |
| | CTGGGTGAGCAAAAACAGGAAGGCAAAATGCCGCAAAAAAGGGAA | |
| | TAAGGGCGACACGGAAATGTTGAATACTCATACTCTTCCTTTTTCAA | |
| | TATTATTGAAGCATTTATCAGGGTTATTGTCTCATGAGCGGATACAT | |
| | ATTTGAATGTATTTAGAAAAATAAACAAATAGGGGTTCCGCGCACA | |
| | TTTCCCCGAAAAGTGCCACCTgagggcctatttcccatgattccttca | |
| | tatttgcatatacgatacaaggctgttagagagataattagaattaat | |
| | ttgactgtaaacacaaagatattagtacaaaatacgtgacgtagaaag | |
| | taataatttcttgggtagtttgcagttttaaaattatgttttaaaatg | |
| | gactatcatatgcttaccgtaacttgaaagtatttcgatttcttggct | |
| | ttatatatcttgtggaaaggacgttttccgagccggttgtcgcgcggt | |
| | tcaatccctggtgcgggtgctagtgccaatacccaccggctccgcact | |
| | aCAgtcttcTCTgaagacCATTTTTT (SEQ ID NO: 565) | |
| pMJ168 | AATTCTGTGGAATGTGTGTCAGTTAGGGTGTGGAAAGTCCCCAGGC | Gttttccgagccggttgtcgcgcggttcaatccctggtgc |
| | TCCCCAGCAGGCAGAAGTATGCAAAGCATGCATCTCAATTAGTCAG | gggtgctagtgccaatacccaccggctccgcacta |
| | CAACCAGGTGTGGAAAGTCCCCAGGCTCCCCAGCAGGCAGAAGTAT | (SEQ ID NO: 568) |
| | GCAAAGCATGCATCTCAATTAGTCAGCAACCATAGTCCCGCCCCTA | |
| | ACTCCGCCCATCCCGCCCCTAACTCCGCCCAGTTCCGCCCATTCTCC | |
| | GCCCCATGGCTGACTAATTTTTTTTATTTATGCAGAGGCCGAGGCCG | |
| | CCTCTGCCTCTGAGCTATTCCAGAAGTAGTGAGGAGGCTTTTTTGGA | |
| | GGCCTAGGCTTTTGCAAAAAGCTAACTTGTTTATTGCAGCTTATAAT | |
| | GGTTACAAATAAAGCAATAGCATCACAAATTTCACAAATAAAGCAT | |
| | TTTTTTCACTGCATTCTAGTTGTGGTTTGTCCAAACTCATCAATGTAT | |
| | CTTATCATGTCTGTATACCGTCGACCTCTAGCTAGAGCTTGGCGTAA | |
| | TCATGGTCATAGCTGTTTCCTGTGTGAAATTGTTATCCGCTCACAAT | |
| | TCCACACAACATACGAGCCGGAAGCATAAAGTGTAAAGCCTGGGGT | |
| | GCCTAATGAGTGAGCTAACTCACATTAATTGCGTTGCGCTCACTGCC | |
| | CGCTTTCCAGTCGGGAAACCTGTCGTGCCAGCTGCATTAATGAATC | |
| | GGCCAACGCGCGGGGAGAGGCGGTTTGCGTATTGGGCGCTCTTCCG | |
| | CTTCCTCGCTCACTGACTCGCTGCGCTCGGTCGTTCGGCTGCGGCGA | |
| | GCGGTATCAGCTCACTCAAAGGCGGTAATACGGTTATCCACAGAAT | |
| | CAGGGGATAACGCAGGAAAGAACATGTGAGCAAAAGGCCAGCAAA | |
| | AGGCCAGGAACCGTAAAAAGGCCGCGTTGCTGGCGTTTTTCCATAG | |
| | GCTCCGCCCCCCTGACGAGCATCACAAAAATCGACGCTCAAGTCAG | |
| | AGGTGGCGAAACCCGACAGGACTATAAAGATACCAGGCGTTTCCCC | |
| | CTGGAAGCTCCCTCGTGCGCTCTCCTGTTCCGACCCTGCCGCTTACC | |
| | GGATACCTGTCCGCCTTTCTCCCTTCGGGAAGCGTGGCGCTTTCTCA | |
| | TAGCTCACGCTGTAGGTATCTCAGTTCGGTGTAGGTCGTTCGCTCCA | |
| | AGCTGGGCTGTGTGCACGAACCCCCCGTTCAGCCCGACCGCTGCGC | |
| | CTTATCCGGTAACTATCGTCTTGAGTCCAACCCGGTAAGACACGACT | |
| | TATCGCCACTGGCAGCAGCCACTGGTAACAGGATTAGCAGAGCGAG | |
| | GTATGTAGGCGGTGCTACAGAGTTCTTGAAGTGGTGGCCTAACTAC | |
| | GGCTACACTAGAAGAACAGTATTTGGTATCTGCGCTCTGCTGAAGC | |
| | CAGTTACCTTCGGAAAAAGAGTTGGTAGCTCTTGATCCGGCAAACA | |
| | AACCACCGCTGGTAGCGGTTTTTTTGTTTGCAAGCAGCAGATTACGC | |
| | GCAGAAAAAAAGGATCTCAAGAAGATCCTTTGATCTTTTCTACGGG | |
| | GTCTGACGCTCAGTGGAACGAAAACTCACGTTAAGGGATTTTGGTC | |
| | ATGAGATTATCAAAAAGGATCTTCACCTAGATCCTTTTAAATTAAA | |
| | AATGAAGTTTTAAATCAATCTAAAGTATATATGAGTAAACTTGGTCT | |
| | GACAGTTACCAATGCTTAATCAGTGAGGCACCTATCTCAGCGATCT | |
| | GTCTATTTCGTTCATCCATAGTTGCCTGACTCCCCGTCGTGTAGATA | |
| | ACTACGATACGGGAGGGCTTACCATCTGGCCCCAGTGCTGCAATGA | |
| | TACCGCGAGACCCACGCTCACCGGCTCCAGATTTATCAGCAATAAA | |
| | CCAGCCAGCCGGAAGGGCCGAGCGCAGAAGTGGTCCTGCAACTTTA | |
| | TCCGCCTCCATCCAGTCTATTAATTGTTGCCGGGAAGCTAGAGTAAG | |
| | TAGTTCGCCAGTTAATAGTTTGCGCAACGTTGTTGCCATTGCTACAG | |
| | GCATCGTGGTGTCACGCTCGTCGTTTGGTATGGCTTCATTCAGCTCC | |
| | GGTTCCCAACGATCAAGGCGAGTTACATGATCCCCCATGTTGTGCA | |
| | AAAAAGCGGTTAGCTCCTTCGGTCCTCCGATCGTTGTCAGAAGTAA | |
| | GTTGGCCGCAGTGTTATCACTCATGGTTATGGCAGCACTGCATAATT | |
| | CTCTTACTGTCATGCCATCCGTAAGATGCTTTTCTGTGACTGGTGAG | |
| | TACTCAACCAAGTCATTCTGAGAATAGTGTATGCGGCGACCGAGTT | |
| | GCTCTTGCCCGGCGTCAATACGGGATAATACCGCGCCACATAGCAG | |
| | AACTTTAAAAGTGCTCATCATTGGAAAACGTTCTTCGGGGCGAAAA | |
| | CTCTCAAGGATCTTACCGCTGTTGAGATCCAGTTCGATGTAACCCAC | |
| | TCGTGCACCCAACTGATCTTCAGCATCTTTTACTTTCACCAGCGTTT | |
| | CTGGGTGAGCAAAAACAGGAAGGCAAAATGCCGCAAAAAAGGGAA | |
| | TAAGGGCGACACGGAAATGTTGAATACTCATACTCTTCCTTTTTCAA | |
| | TATTATTGAAGCATTTATCAGGGTTATTGTCTCATGAGCGGATACAT | |
| | ATTTGAATGTATTTAGAAAAATAAACAAATAGGGGTTCCGCGCACA | |
| | TTTCCCCGAAAAGTGCCACCTgagggcctatttcccatgattccttca | |
| | tatttgcatatacgatacaaggctgttagagagataattagaattaat | |
| | ttgactgtaaacacaaagatattagtacaaaatacgtgacgtagaaag | |
| | taataatttcttgggtagtttgcagttttaaaattatgttttaaaatg | |
| | gactatcatatgcttaccgtaacttgaaagtatttcgatttcttggct | |
| | ttatatatcttgtggaaaggacgttttccgagccggttgtcgcgcggt | |
| | tcaatccctggtgcgggtgctagtgccaatacccaccggctccgcact | |
| | aCAgtcttcTCTgaagacCAggccggcatggtcccagcctcctcgctg | |
| | gcgccggctgggcaacatgcttcggcatggcgaatgggacTTTTTT | |
| | (SEQ ID NO: 567) | |
| pMJ169 | AATTCTGTGGAATGTGTGTCAGTTAGGGTGTGGAAAGTCCCCAGGC | Agatcaatgttggatggacacggtagaccagaagtgttc |
| | TCCCCAGCAGGCAGAAGTATGCAAAGCATGCATCTCAATTAGTCAG | agcaggagtgttccagccgtagcgtagaacgtagattggt |
| | CAACCAGGTGTGGAAAGTCCCCAGGCTCCCCAGCAGGCAGAAGTAT | tagattaggttttccgagccggttgtcgcgcggttcaatcc |
| | GCAAAGCATGCATCTCAATTAGTCAGCAACCATAGTCCCGCCCCTA | ctggtgcgggtgctagtgccaatacccaccggctccgcact |
| | ACTCCGCCCATCCCGCCCCTAACTCCGCCCAGTTCCGCCCATTCTCC | a (SEQ ID NO: 570) |
| | GCCCCATGGCTGACTAATTTTTTTTATTTATGCAGAGGCCGAGGCCG | |
| | CCTCTGCCTCTGAGCTATTCCAGAAGTAGTGAGGAGGCTTTTTTGGA | |
| | GGCCTAGGCTTTTGCAAAAAGCTAACTTGTTTATTGCAGCTTATAAT | |
| | GGTTACAAATAAAGCAATAGCATCACAAATTTCACAAATAAAGCAT | |
| | TTTTTTCACTGCATTCTAGTTGTGGTTTGTCCAAACTCATCAATGTAT | |
| | CTTATCATGTCTGTATACCGTCGACCTCTAGCTAGAGCTTGGCGTAA | |
| | TCATGGTCATAGCTGTTTCCTGTGTGAAATTGTTATCCGCTCACAAT | |
| | TCCACACAACATACGAGCCGGAAGCATAAAGTGTAAAGCCTGGGGT | |
| | GCCTAATGAGTGAGCTAACTCACATTAATTGCGTTGCGCTCACTGCC | |
| | CGCTTTCCAGTCGGGAAACCTGTCGTGCCAGCTGCATTAATGAATC | |
| | GGCCAACGCGCGGGGAGAGGCGGTTTGCGTATTGGGCGCTCTTCCG | |
| | CTTCCTCGCTCACTGACTCGCTGCGCTCGGTCGTTCGGCTGCGGCGA | |
| | GCGGTATCAGCTCACTCAAAGGCGGTAATACGGTTATCCACAGAAT | |
| | CAGGGGATAACGCAGGAAAGAACATGTGAGCAAAAGGCCAGCAAA | |
| | AGGCCAGGAACCGTAAAAAGGCCGCGTTGCTGGCGTTTTTCCATAG | |
| | GCTCCGCCCCCCTGACGAGCATCACAAAAATCGACGCTCAAGTCAG | |
| | AGGTGGCGAAACCCGACAGGACTATAAAGATACCAGGCGTTTCCCC | |
| | CTGGAAGCTCCCTCGTGCGCTCTCCTGTTCCGACCCTGCCGCTTACC | |
| | GGATACCTGTCCGCCTTTCTCCCTTCGGGAAGCGTGGCGCTTTCTCA | |
| | TAGCTCACGCTGTAGGTATCTCAGTTCGGTGTAGGTCGTTCGCTCCA | |
| | AGCTGGGCTGTGTGCACGAACCCCCCGTTCAGCCCGACCGCTGCGC | |
| | CTTATCCGGTAACTATCGTCTTGAGTCCAACCCGGTAAGACACGACT | |
| | TATCGCCACTGGCAGCAGCCACTGGTAACAGGATTAGCAGAGCGAG | |
| | GTATGTAGGCGGTGCTACAGAGTTCTTGAAGTGGTGGCCTAACTAC | |
| | GGCTACACTAGAAGAACAGTATTTGGTATCTGCGCTCTGCTGAAGC | |
| | CAGTTACCTTCGGAAAAAGAGTTGGTAGCTCTTGATCCGGCAAACA | |
| | AACCACCGCTGGTAGCGGTTTTTTTGTTTGCAAGCAGCAGATTACGC | |
| | GCAGAAAAAAAGGATCTCAAGAAGATCCTTTGATCTTTTCTACGGG | |
| | GTCTGACGCTCAGTGGAACGAAAACTCACGTTAAGGGATTTTGGTC | |
| | ATGAGATTATCAAAAAGGATCTTCACCTAGATCCTTTTAAATTAAA | |
| | AATGAAGTTTTAAATCAATCTAAAGTATATATGAGTAAACTTGGTCT | |
| | GACAGTTACCAATGCTTAATCAGTGAGGCACCTATCTCAGCGATCT | |
| | GTCTATTTCGTTCATCCATAGTTGCCTGACTCCCCGTCGTGTAGATA | |
| | ACTACGATACGGGAGGGCTTACCATCTGGCCCCAGTGCTGCAATGA | |
| | TACCGCGAGACCCACGCTCACCGGCTCCAGATTTATCAGCAATAAA | |
| | CCAGCCAGCCGGAAGGGCCGAGCGCAGAAGTGGTCCTGCAACTTTA | |
| | TCCGCCTCCATCCAGTCTATTAATTGTTGCCGGGAAGCTAGAGTAAG | |
| | TAGTTCGCCAGTTAATAGTTTGCGCAACGTTGTTGCCATTGCTACAG | |
| | GCATCGTGGTGTCACGCTCGTCGTTTGGTATGGCTTCATTCAGCTCC | |
| | GGTTCCCAACGATCAAGGCGAGTTACATGATCCCCCATGTTGTGCA | |
| | AAAAAGCGGTTAGCTCCTTCGGTCCTCCGATCGTTGTCAGAAGTAA | |
| | GTTGGCCGCAGTGTTATCACTCATGGTTATGGCAGCACTGCATAATT | |
| | CTCTTACTGTCATGCCATCCGTAAGATGCTTTTCTGTGACTGGTGAG | |
| | TACTCAACCAAGTCATTCTGAGAATAGTGTATGCGGCGACCGAGTT | |
| | GCTCTTGCCCGGCGTCAATACGGGATAATACCGCGCCACATAGCAG | |
| | AACTTTAAAAGTGCTCATCATTGGAAAACGTTCTTCGGGGCGAAAA | |
| | CTCTCAAGGATCTTACCGCTGTTGAGATCCAGTTCGATGTAACCCAC | |
| | TCGTGCACCCAACTGATCTTCAGCATCTTTTACTTTCACCAGCGTTT | |
| | CTGGGTGAGCAAAAACAGGAAGGCAAAATGCCGCAAAAAAGGGAA | |
| | TAAGGGCGACACGGAAATGTTGAATACTCATACTCTTCCTTTTTCAA | |
| | TATTATTGAAGCATTTATCAGGGTTATTGTCTCATGAGCGGATACAT | |
| | ATTTGAATGTATTTAGAAAAATAAACAAATAGGGGTTCCGCGCACA | |
| | TTTCCCCGAAAAGTGCCACCTgagggcctatttcccatgattccttca | |
| | tatttgcatatacgatacaaggctgttagagagataattagaattaat | |
| | ttgactgtaaacacaaagatattagtacaaaatacgtgacgtagaaag | |
| | taataatttcttgggtagtttgcagttttaaaattatgttttaaaatg | |
| | gactatcatatgcttaccgtaacttgaaagtatttcgatttcttggct | |
| | ttatatatcttgtggaaaggacagatcaatgttggatggacacggtag | |
| | accagaagtgttcagcaggagtgttccagccgtagcgtagaacgtaga | |
| | ttggttagattaggttttccgagccggttgtcgcgcggttcaatccct | |
| | ggtgcgggtgctagtgccaatacccaccggctccgcactaCAgtcttc | |
| | TCTgaagacCATTTTTT (SEQ ID NO: 569) | |
| pMJ170 | AATTCTGTGGAATGTGTGTCAGTTAGGGTGTGGAAAGTCCCCAGGC | Cgagatatgctgtcaacctgcaacatgctattgattgtgag |
| | TCCCCAGCAGGCAGAAGTATGCAAAGCATGCATCTCAATTAGTCAG | atcaatgttggatggacacggtagaccagaagtgttcagc |
| | CAACCAGGTGTGGAAAGTCCCCAGGCTCCCCAGCAGGCAGAAGTAT | aggagtgttccagccgtagcgtagaacgtagattggttag |
| | GCAAAGCATGCATCTCAATTAGTCAGCAACCATAGTCCCGCCCCTA | attaggttttccgagccggttgtcgcgcggttcaatccctg |
| | ACTCCGCCCATCCCGCCCCTAACTCCGCCCAGTTCCGCCCATTCTCC | gtgcgggtgctagtgccaatacccaccggctccgcacta |
| | GCCCCATGGCTGACTAATTTTTTTTATTTATGCAGAGGCCGAGGCCG | (SEQ ID NO: 572) |
| | CCTCTGCCTCTGAGCTATTCCAGAAGTAGTGAGGAGGCTTTTTTGGA | |
| | GGCCTAGGCTTTTGCAAAAAGCTAACTTGTTTATTGCAGCTTATAAT | |
| | GGTTACAAATAAAGCAATAGCATCACAAATTTCACAAATAAAGCAT | |
| | TTTTTTCACTGCATTCTAGTTGTGGTTTGTCCAAACTCATCAATGTAT | |
| | CTTATCATGTCTGTATACCGTCGACCTCTAGCTAGAGCTTGGCGTAA | |
| | TCATGGTCATAGCTGTTTCCTGTGTGAAATTGTTATCCGCTCACAAT | |
| | TCCACACAACATACGAGCCGGAAGCATAAAGTGTAAAGCCTGGGGT | |
| | GCCTAATGAGTGAGCTAACTCACATTAATTGCGTTGCGCTCACTGCC | |
| | CGCTTTCCAGTCGGGAAACCTGTCGTGCCAGCTGCATTAATGAATC | |
| | GGCCAACGCGCGGGGAGAGGCGGTTTGCGTATTGGGCGCTCTTCCG | |
| | CTTCCTCGCTCACTGACTCGCTGCGCTCGGTCGTTCGGCTGCGGCGA | |
| | GCGGTATCAGCTCACTCAAAGGCGGTAATACGGTTATCCACAGAAT | |
| | CAGGGGATAACGCAGGAAAGAACATGTGAGCAAAAGGCCAGCAAA | |
| | AGGCCAGGAACCGTAAAAAGGCCGCGTTGCTGGCGTTTTTCCATAG | |
| | GCTCCGCCCCCCTGACGAGCATCACAAAAATCGACGCTCAAGTCAG | |
| | AGGTGGCGAAACCCGACAGGACTATAAAGATACCAGGCGTTTCCCC | |
| | CTGGAAGCTCCCTCGTGCGCTCTCCTGTTCCGACCCTGCCGCTTACC | |
| | GGATACCTGTCCGCCTTTCTCCCTTCGGGAAGCGTGGCGCTTTCTCA | |
| | TAGCTCACGCTGTAGGTATCTCAGTTCGGTGTAGGTCGTTCGCTCCA | |
| | AGCTGGGCTGTGTGCACGAACCCCCCGTTCAGCCCGACCGCTGCGC | |
| | CTTATCCGGTAACTATCGTCTTGAGTCCAACCCGGTAAGACACGACT | |
| | TATCGCCACTGGCAGCAGCCACTGGTAACAGGATTAGCAGAGCGAG | |
| | GTATGTAGGCGGTGCTACAGAGTTCTTGAAGTGGTGGCCTAACTAC | |
| | GGCTACACTAGAAGAACAGTATTTGGTATCTGCGCTCTGCTGAAGC | |
| | CAGTTACCTTCGGAAAAAGAGTTGGTAGCTCTTGATCCGGCAAACA | |
| | AACCACCGCTGGTAGCGGTTTTTTTGTTTGCAAGCAGCAGATTACGC | |
| | GCAGAAAAAAAGGATCTCAAGAAGATCCTTTGATCTTTTCTACGGG | |
| | GTCTGACGCTCAGTGGAACGAAAACTCACGTTAAGGGATTTTGGTC | |
| | ATGAGATTATCAAAAAGGATCTTCACCTAGATCCTTTTAAATTAAA | |
| | AATGAAGTTTTAAATCAATCTAAAGTATATATGAGTAAACTTGGTCT | |
| | GACAGTTACCAATGCTTAATCAGTGAGGCACCTATCTCAGCGATCT | |
| | GTCTATTTCGTTCATCCATAGTTGCCTGACTCCCCGTCGTGTAGATA | |
| | ACTACGATACGGGAGGGCTTACCATCTGGCCCCAGTGCTGCAATGA | |
| | TACCGCGAGACCCACGCTCACCGGCTCCAGATTTATCAGCAATAAA | |
| | CCAGCCAGCCGGAAGGGCCGAGCGCAGAAGTGGTCCTGCAACTTTA | |
| | TCCGCCTCCATCCAGTCTATTAATTGTTGCCGGGAAGCTAGAGTAAG | |
| | TAGTTCGCCAGTTAATAGTTTGCGCAACGTTGTTGCCATTGCTACAG | |
| | GCATCGTGGTGTCACGCTCGTCGTTTGGTATGGCTTCATTCAGCTCC | |
| | GGTTCCCAACGATCAAGGCGAGTTACATGATCCCCCATGTTGTGCA | |
| | AAAAAGCGGTTAGCTCCTTCGGTCCTCCGATCGTTGTCAGAAGTAA | |
| | GTTGGCCGCAGTGTTATCACTCATGGTTATGGCAGCACTGCATAATT | |
| | CTCTTACTGTCATGCCATCCGTAAGATGCTTTTCTGTGACTGGTGAG | |
| | TACTCAACCAAGTCATTCTGAGAATAGTGTATGCGGCGACCGAGTT | |
| | GCTCTTGCCCGGCGTCAATACGGGATAATACCGCGCCACATAGCAG | |
| | AACTTTAAAAGTGCTCATCATTGGAAAACGTTCTTCGGGGCGAAAA | |
| | CTCTCAAGGATCTTACCGCTGTTGAGATCCAGTTCGATGTAACCCAC | |
| | TCGTGCACCCAACTGATCTTCAGCATCTTTTACTTTCACCAGCGTTT | |
| | CTGGGTGAGCAAAAACAGGAAGGCAAAATGCCGCAAAAAAGGGAA | |
| | TAAGGGCGACACGGAAATGTTGAATACTCATACTCTTCCTTTTTCAA | |
| | TATTATTGAAGCATTTATCAGGGTTATTGTCTCATGAGCGGATACAT | |
| | ATTTGAATGTATTTAGAAAAATAAACAAATAGGGGTTCCGCGCACA | |
| | TTTCCCCGAAAAGTGCCACCTgagggcctatttcccatgattccttca | |
| | tatttgcatatacgatacaaggctgttagagagataattagaattaat | |
| | ttgactgtaaacacaaagatattagtacaaaatacgtgacgtagaaag | |
| | taataatttcttgggtagtttgcagttttaaaattatgttttaaaatg | |
| | gactatcatatgcttaccgtaacttgaaagtatttcgatttcttggct | |
| | ttatatatcttgtggaaaggaccgagatatgctgtcaacctgcaacat | |
| | gctattgattgtgagatcaatgttggatggacacggtagaccagaagt | |
| | gttcagcaggagtgttccagccgtagcgtagaacgtagattggttaga | |
| | ttaggttttccgagccggttgtcgcgcggttcaatccctggtgcgggt | |
| | gctagtgccaatacccaccggctccgcactaCAgtcttcTCTgaaga | |
| | cCATTTTTT (SEQ ID NO: 571) | |
| pMJ171 | AATTCTGTGGAATGTGTGTCAGTTAGGGTGTGGAAAGTCCCCAGGC | Gtccacggactgctgggttgtaccaaccctaactgtttgca |
| | TCCCCAGCAGGCAGAAGTATGCAAAGCATGCATCTCAATTAGTCAG | gcaagcctggacatcgggaatgcgctactggaatcgaga |
| | CAACCAGGTGTGGAAAGTCCCCAGGCTCCCCAGCAGGCAGAAGTAT | tatgctgtcaacctgcaacatgctattgattgtgagatcaa |
| | GCAAAGCATGCATCTCAATTAGTCAGCAACCATAGTCCCGCCCCTA | tgttggatggacacggtagaccagaagtgttcagcaggag |
| | ACTCCGCCCATCCCGCCCCTAACTCCGCCCAGTTCCGCCCATTCTCC | tgttccagccgtagcgtagaacgtagattggttagattagg |
| | GCCCCATGGCTGACTAATTTTTTTTATTTATGCAGAGGCCGAGGCCG | ttttccgagccggttgtcgcgcggttcaatccctggtgcgg |
| | CCTCTGCCTCTGAGCTATTCCAGAAGTAGTGAGGAGGCTTTTTTGGA | gtgctagtgccaatacccaccggctccgcacta (SEQ |
| | GGCCTAGGCTTTTGCAAAAAGCTAACTTGTTTATTGCAGCTTATAAT | ID NO: 574) |
| | GGTTACAAATAAAGCAATAGCATCACAAATTTCACAAATAAAGCAT | |
| | TTTTTTCACTGCATTCTAGTTGTGGTTTGTCCAAACTCATCAATGTAT | |
| | CTTATCATGTCTGTATACCGTCGACCTCTAGCTAGAGCTTGGCGTAA | |
| | TCATGGTCATAGCTGTTTCCTGTGTGAAATTGTTATCCGCTCACAAT | |
| | TCCACACAACATACGAGCCGGAAGCATAAAGTGTAAAGCCTGGGGT | |
| | GCCTAATGAGTGAGCTAACTCACATTAATTGCGTTGCGCTCACTGCC | |
| | CGCTTTCCAGTCGGGAAACCTGTCGTGCCAGCTGCATTAATGAATC | |
| | GGCCAACGCGCGGGGAGAGGCGGTTTGCGTATTGGGCGCTCTTCCG | |
| | CTTCCTCGCTCACTGACTCGCTGCGCTCGGTCGTTCGGCTGCGGCGA | |
| | GCGGTATCAGCTCACTCAAAGGCGGTAATACGGTTATCCACAGAAT | |
| | CAGGGGATAACGCAGGAAAGAACATGTGAGCAAAAGGCCAGCAAA | |
| | AGGCCAGGAACCGTAAAAAGGCCGCGTTGCTGGCGTTTTTCCATAG | |
| | GCTCCGCCCCCCTGACGAGCATCACAAAAATCGACGCTCAAGTCAG | |
| | AGGTGGCGAAACCCGACAGGACTATAAAGATACCAGGCGTTTCCCC | |
| | CTGGAAGCTCCCTCGTGCGCTCTCCTGTTCCGACCCTGCCGCTTACC | |
| | GGATACCTGTCCGCCTTTCTCCCTTCGGGAAGCGTGGCGCTTTCTCA | |
| | TAGCTCACGCTGTAGGTATCTCAGTTCGGTGTAGGTCGTTCGCTCCA | |
| | AGCTGGGCTGTGTGCACGAACCCCCCGTTCAGCCCGACCGCTGCGC | |
| | CTTATCCGGTAACTATCGTCTTGAGTCCAACCCGGTAAGACACGACT | |
| | TATCGCCACTGGCAGCAGCCACTGGTAACAGGATTAGCAGAGCGAG | |
| | GTATGTAGGCGGTGCTACAGAGTTCTTGAAGTGGTGGCCTAACTAC | |
| | GGCTACACTAGAAGAACAGTATTTGGTATCTGCGCTCTGCTGAAGC | |
| | CAGTTACCTTCGGAAAAAGAGTTGGTAGCTCTTGATCCGGCAAACA | |
| | AACCACCGCTGGTAGCGGTTTTTTTGTTTGCAAGCAGCAGATTACGC | |
| | GCAGAAAAAAAGGATCTCAAGAAGATCCTTTGATCTTTTCTACGGG | |
| | GTCTGACGCTCAGTGGAACGAAAACTCACGTTAAGGGATTTTGGTC | |
| | ATGAGATTATCAAAAAGGATCTTCACCTAGATCCTTTTAAATTAAA | |
| | AATGAAGTTTTAAATCAATCTAAAGTATATATGAGTAAACTTGGTCT | |
| | GACAGTTACCAATGCTTAATCAGTGAGGCACCTATCTCAGCGATCT | |
| | GTCTATTTCGTTCATCCATAGTTGCCTGACTCCCCGTCGTGTAGATA | |
| | ACTACGATACGGGAGGGCTTACCATCTGGCCCCAGTGCTGCAATGA | |
| | TACCGCGAGACCCACGCTCACCGGCTCCAGATTTATCAGCAATAAA | |
| | CCAGCCAGCCGGAAGGGCCGAGCGCAGAAGTGGTCCTGCAACTTTA | |
| | TCCGCCTCCATCCAGTCTATTAATTGTTGCCGGGAAGCTAGAGTAAG | |
| | TAGTTCGCCAGTTAATAGTTTGCGCAACGTTGTTGCCATTGCTACAG | |
| | GCATCGTGGTGTCACGCTCGTCGTTTGGTATGGCTTCATTCAGCTCC | |
| | GGTTCCCAACGATCAAGGCGAGTTACATGATCCCCCATGTTGTGCA | |
| | AAAAAGCGGTTAGCTCCTTCGGTCCTCCGATCGTTGTCAGAAGTAA | |
| | GTTGGCCGCAGTGTTATCACTCATGGTTATGGCAGCACTGCATAATT | |
| | CTCTTACTGTCATGCCATCCGTAAGATGCTTTTCTGTGACTGGTGAG | |
| | TACTCAACCAAGTCATTCTGAGAATAGTGTATGCGGCGACCGAGTT | |
| | GCTCTTGCCCGGCGTCAATACGGGATAATACCGCGCCACATAGCAG | |
| | AACTTTAAAAGTGCTCATCATTGGAAAACGTTCTTCGGGGCGAAAA | |
| | CTCTCAAGGATCTTACCGCTGTTGAGATCCAGTTCGATGTAACCCAC | |
| | TCGTGCACCCAACTGATCTTCAGCATCTTTTACTTTCACCAGCGTTT | |
| | CTGGGTGAGCAAAAACAGGAAGGCAAAATGCCGCAAAAAAGGGAA | |
| | TAAGGGCGACACGGAAATGTTGAATACTCATACTCTTCCTTTTTCAA | |
| | TATTATTGAAGCATTTATCAGGGTTATTGTCTCATGAGCGGATACAT | |
| | ATTTGAATGTATTTAGAAAAATAAACAAATAGGGGTTCCGCGCACA | |
| | TTTCCCCGAAAAGTGCCACCTgagggcctatttcccatgattccttca | |
| | tatttgcatatacgatacaaggctgttagagagataattagaattaat | |
| | ttgactgtaaacacaaagatattagtacaaaatacgtgacgtagaaag | |
| | taataatttcttgggtagtttgcagttttaaaattatgttttaaaatg | |
| | gactatcatatgcttaccgtaacttgaaagtatttcgatttcttggct | |
| | ttatatatcttgtggaaaggacgtccacggactgctgggttgtaccaa | |
| | ccctaactgtttgcagcaagcctggacatcgggaatgcgctactggaa | |
| | tcgagatatgctgtcaacctgcaacatgctattgattgtgagatcaat | |
| | gttggatggacacggtagaccagaagtgttcagcaggagtgttccagc | |
| | cgtagcgtagaacgtagattggttagattaggttttccgagccggttg | |
| | tcgcgcggttcaatccctggtgcgggtgctagtgccaatacccaccgg | |
| | ctccgcactaCAgtcttcTCTgaagacCATTTTTT (SEQ ID | |
| | NO: 573) | |
| pMJ204 | AATTCTGTGGAATGTGTGTCAGTTAGGGTGTGGAAAGTCCCCAGGC | Gagtttgtggagaaaaaattcaaaacacgacctcattcaa |
| | TCCCCAGCAGGCAGAAGTATGCAAAGCATGCATCTCAATTAGTCAG | gaccttggcgccgtcgtgaaggcaagattgaaaaagtcc |
| | CAACCAGGTGTGGAAAGTCCCCAGGCTCCCCAGCAGGCAGAAGTAT | acggactgctgggttgtaccaaccctaactgtttgcagcaa |
| | GCAAAGCATGCATCTCAATTAGTCAGCAACCATAGTCCCGCCCCTA | gcctggacatcgggaatgcgctactggaatcgagatatgc |
| | ACTCCGCCCATCCCGCCCCTAACTCCGCCCAGTTCCGCCCATTCTCC | tgtcaacctgcaacatgctattgattgtgagatcaatgttg |
| | GCCCCATGGCTGACTAATTTTTTTTATTTATGCAGAGGCCGAGGCCG | gatggacacggtagaccagaagtgttcagcaggagtgttcc |
| | CCTCTGCCTCTGAGCTATTCCAGAAGTAGTGAGGAGGCTTTTTTGGA | agccgtagcgtagaacgtagattggttagattaggttttcc |
| | GGCCTAGGCTTTTGCAAAAAGCTAACTTGTTTATTGCAGCTTATAAT | gagccggttgtcgcgcggttcaatccctggtgcgggtgct |
| | GGTTACAAATAAAGCAATAGCATCACAAATTTCACAAATAAAGCAT | agtgccaatacccaccggctccgcacta (SEQ ID |
| | TTTTTTCACTGCATTCTAGTTGTGGTTTGTCCAAACTCATCAATGTAT | NO: 576) |
| | CTTATCATGTCTGTATACCGTCGACCTCTAGCTAGAGCTTGGCGTAA | |
| | TCATGGTCATAGCTGTTTCCTGTGTGAAATTGTTATCCGCTCACAAT | |
| | TCCACACAACATACGAGCCGGAAGCATAAAGTGTAAAGCCTGGGGT | |
| | GCCTAATGAGTGAGCTAACTCACATTAATTGCGTTGCGCTCACTGCC | |
| | CGCTTTCCAGTCGGGAAACCTGTCGTGCCAGCTGCATTAATGAATC | |
| | GGCCAACGCGCGGGGAGAGGCGGTTTGCGTATTGGGCGCTCTTCCG | |
| | CTTCCTCGCTCACTGACTCGCTGCGCTCGGTCGTTCGGCTGCGGCGA | |
| | GCGGTATCAGCTCACTCAAAGGCGGTAATACGGTTATCCACAGAAT | |
| | CAGGGGATAACGCAGGAAAGAACATGTGAGCAAAAGGCCAGCAAA | |
| | AGGCCAGGAACCGTAAAAAGGCCGCGTTGCTGGCGTTTTTCCATAG | |
| | GCTCCGCCCCCCTGACGAGCATCACAAAAATCGACGCTCAAGTCAG | |
| | AGGTGGCGAAACCCGACAGGACTATAAAGATACCAGGCGTTTCCCC | |
| | CTGGAAGCTCCCTCGTGCGCTCTCCTGTTCCGACCCTGCCGCTTACC | |
| | GGATACCTGTCCGCCTTTCTCCCTTCGGGAAGCGTGGCGCTTTCTCA | |
| | TAGCTCACGCTGTAGGTATCTCAGTTCGGTGTAGGTCGTTCGCTCCA | |
| | AGCTGGGCTGTGTGCACGAACCCCCCGTTCAGCCCGACCGCTGCGC | |
| | CTTATCCGGTAACTATCGTCTTGAGTCCAACCCGGTAAGACACGACT | |
| | TATCGCCACTGGCAGCAGCCACTGGTAACAGGATTAGCAGAGCGAG | |
| | GTATGTAGGCGGTGCTACAGAGTTCTTGAAGTGGTGGCCTAACTAC | |
| | GGCTACACTAGAAGAACAGTATTTGGTATCTGCGCTCTGCTGAAGC | |
| | CAGTTACCTTCGGAAAAAGAGTTGGTAGCTCTTGATCCGGCAAACA | |
| | AACCACCGCTGGTAGCGGTTTTTTTGTTTGCAAGCAGCAGATTACGC | |
| | GCAGAAAAAAAGGATCTCAAGAAGATCCTTTGATCTTTTCTACGGG | |
| | GTCTGACGCTCAGTGGAACGAAAACTCACGTTAAGGGATTTTGGTC | |
| | ATGAGATTATCAAAAAGGATCTTCACCTAGATCCTTTTAAATTAAA | |
| | AATGAAGTTTTAAATCAATCTAAAGTATATATGAGTAAACTTGGTCT | |
| | GACAGTTACCAATGCTTAATCAGTGAGGCACCTATCTCAGCGATCT | |
| | GTCTATTTCGTTCATCCATAGTTGCCTGACTCCCCGTCGTGTAGATA | |
| | ACTACGATACGGGAGGGCTTACCATCTGGCCCCAGTGCTGCAATGA | |
| | TACCGCGAGACCCACGCTCACCGGCTCCAGATTTATCAGCAATAAA | |
| | CCAGCCAGCCGGAAGGGCCGAGCGCAGAAGTGGTCCTGCAACTTTA | |
| | TCCGCCTCCATCCAGTCTATTAATTGTTGCCGGGAAGCTAGAGTAAG | |
| | TAGTTCGCCAGTTAATAGTTTGCGCAACGTTGTTGCCATTGCTACAG | |
| | GCATCGTGGTGTCACGCTCGTCGTTTGGTATGGCTTCATTCAGCTCC | |
| | GGTTCCCAACGATCAAGGCGAGTTACATGATCCCCCATGTTGTGCA | |
| | AAAAAGCGGTTAGCTCCTTCGGTCCTCCGATCGTTGTCAGAAGTAA | |
| | GTTGGCCGCAGTGTTATCACTCATGGTTATGGCAGCACTGCATAATT | |
| | CTCTTACTGTCATGCCATCCGTAAGATGCTTTTCTGTGACTGGTGAG | |
| | TACTCAACCAAGTCATTCTGAGAATAGTGTATGCGGCGACCGAGTT | |
| | GCTCTTGCCCGGCGTCAATACGGGATAATACCGCGCCACATAGCAG | |
| | AACTTTAAAAGTGCTCATCATTGGAAAACGTTCTTCGGGGCGAAAA | |
| | CTCTCAAGGATCTTACCGCTGTTGAGATCCAGTTCGATGTAACCCAC | |
| | TCGTGCACCCAACTGATCTTCAGCATCTTTTACTTTCACCAGCGTTT | |
| | CTGGGTGAGCAAAAACAGGAAGGCAAAATGCCGCAAAAAAGGGAA | |
| | TAAGGGCGACACGGAAATGTTGAATACTCATACTCTTCCTTTTTCAA | |
| | TATTATTGAAGCATTTATCAGGGTTATTGTCTCATGAGCGGATACAT | |
| | ATTTGAATGTATTTAGAAAAATAAACAAATAGGGGTTCCGCGCACA | |
| | TTTCCCCGAAAAGTGCCACCTgagggcctatttcccatgattccttca | |
| | tatttgcatatacgatacaaggctgttagagagataattagaattaat | |
| | ttgactgtaaacacaaagatattagtacaaaatacgtgacgtagaaag | |
| | taataatttcttgggtagtttgcagttttaaaattatgttttaaaatg | |
| | gactatcatatgcttaccgtaacttgaaagtatttcgatttcttgGCT | |
| | TTATATATCTTGTGGAAAGGACgagtttgtggagaaaaaattcaaaac | |
| | acgacctcattcaagaccttggcgccgtcgtgaaggcaagattgaaaa | |
| | agtccacggactgctgggttgtaccaaccctaactgtttgcagcaagc | |
| | ctggacatcgggaatgcgctactggaatcgagatatgctgtcaacctg | |
| | caacatgctattgattgtgagatcaatgttggatggacacggtagacc | |
| | agaagtgttcagcaggagtgttccagccgtagcgtagaacgtagattg | |
| | gttagattaggttttccgagccggttgtcgcgcggttcaatccctggt | |
| | gcgggtgctagtgccaatacccaccggctccgcactaCAgtcttcTCT | |
| | gaagacCATTTTTT (SEQ ID NO: 575) | |
| pMJ205 | AATTCTGTGGAATGTGTGTCAGTTAGGGTGTGGAAAGTCCCCAGGC | Aagcgcaaccgcattgattgtttccttctcgacgagtacaa |
| | TCCCCAGCAGGCAGAAGTATGCAAAGCATGCATCTCAATTAGTCAG | gacctcatctgtttgccctcgctgttcctcatctgagttt |
| | CAACCAGGTGTGGAAAGTCCCCAGGCTCCCCAGCAGGCAGAAGTAT | gtggagaaaaaattcaaaacacgacctcattcaagacctt |
| | GCAAAGCATGCATCTCAATTAGTCAGCAACCATAGTCCCGCCCCTA | ggcgccgtcgtgaaggcaagattgaaaaagtccacggactg |
| | ACTCCGCCCATCCCGCCCCTAACTCCGCCCAGTTCCGCCCATTCTCC | ctgggttgtaccaaccctaactgtttgcagcaagcctggac |
| | GCCCCATGGCTGACTAATTTTTTTTATTTATGCAGAGGCCGAGGCCG | atcgggaatgcgctactggaatcgagatatgctgtcaacct |
| | CCTCTGCCTCTGAGCTATTCCAGAAGTAGTGAGGAGGCTTTTTTGGA | gcaacatgctattgattgtgagatcaatgttggatggacac |
| | GGCCTAGGCTTTTGCAAAAAGCTAACTTGTTTATTGCAGCTTATAAT | ggtagaccagaagtgttcagcaggagtgttccagccgta |
| | GGTTACAAATAAAGCAATAGCATCACAAATTTCACAAATAAAGCAT | gcgtagaacgtagattggttagattaggttttccgagccgg |
| | TTTTTTCACTGCATTCTAGTTGTGGTTTGTCCAAACTCATCAATGTAT | ttgtcgcgcggttcaatccctggtgcgggtgctagtgccaa |
| | CTTATCATGTCTGTATACCGTCGACCTCTAGCTAGAGCTTGGCGTAA | tacccaccggctccgcacta (SEQ ID NO: 578) |
| | TCATGGTCATAGCTGTTTCCTGTGTGAAATTGTTATCCGCTCACAAT | |
| | TCCACACAACATACGAGCCGGAAGCATAAAGTGTAAAGCCTGGGGT | |
| | GCCTAATGAGTGAGCTAACTCACATTAATTGCGTTGCGCTCACTGCC | |
| | CGCTTTCCAGTCGGGAAACCTGTCGTGCCAGCTGCATTAATGAATC | |
| | GGCCAACGCGCGGGGAGAGGCGGTTTGCGTATTGGGCGCTCTTCCG | |
| | CTTCCTCGCTCACTGACTCGCTGCGCTCGGTCGTTCGGCTGCGGCGA | |
| | GCGGTATCAGCTCACTCAAAGGCGGTAATACGGTTATCCACAGAAT | |
| | CAGGGGATAACGCAGGAAAGAACATGTGAGCAAAAGGCCAGCAAA | |
| | AGGCCAGGAACCGTAAAAAGGCCGCGTTGCTGGCGTTTTTCCATAG | |
| | GCTCCGCCCCCCTGACGAGCATCACAAAAATCGACGCTCAAGTCAG | |
| | AGGTGGCGAAACCCGACAGGACTATAAAGATACCAGGCGTTTCCCC | |
| | CTGGAAGCTCCCTCGTGCGCTCTCCTGTTCCGACCCTGCCGCTTACC | |
| | GGATACCTGTCCGCCTTTCTCCCTTCGGGAAGCGTGGCGCTTTCTCA | |
| | TAGCTCACGCTGTAGGTATCTCAGTTCGGTGTAGGTCGTTCGCTCCA | |
| | AGCTGGGCTGTGTGCACGAACCCCCCGTTCAGCCCGACCGCTGCGC | |
| | CTTATCCGGTAACTATCGTCTTGAGTCCAACCCGGTAAGACACGACT | |
| | TATCGCCACTGGCAGCAGCCACTGGTAACAGGATTAGCAGAGCGAG | |
| | GTATGTAGGCGGTGCTACAGAGTTCTTGAAGTGGTGGCCTAACTAC | |
| | GGCTACACTAGAAGAACAGTATTTGGTATCTGCGCTCTGCTGAAGC | |
| | CAGTTACCTTCGGAAAAAGAGTTGGTAGCTCTTGATCCGGCAAACA | |
| | AACCACCGCTGGTAGCGGTTTTTTTGTTTGCAAGCAGCAGATTACGC | |
| | GCAGAAAAAAAGGATCTCAAGAAGATCCTTTGATCTTTTCTACGGG | |
| | GTCTGACGCTCAGTGGAACGAAAACTCACGTTAAGGGATTTTGGTC | |
| | ATGAGATTATCAAAAAGGATCTTCACCTAGATCCTTTTAAATTAAA | |
| | AATGAAGTTTTAAATCAATCTAAAGTATATATGAGTAAACTTGGTCT | |
| | GACAGTTACCAATGCTTAATCAGTGAGGCACCTATCTCAGCGATCT | |
| | GTCTATTTCGTTCATCCATAGTTGCCTGACTCCCCGTCGTGTAGATA | |
| | ACTACGATACGGGAGGGCTTACCATCTGGCCCCAGTGCTGCAATGA | |
| | TACCGCGAGACCCACGCTCACCGGCTCCAGATTTATCAGCAATAAA | |
| | CCAGCCAGCCGGAAGGGCCGAGCGCAGAAGTGGTCCTGCAACTTTA | |
| | TCCGCCTCCATCCAGTCTATTAATTGTTGCCGGGAAGCTAGAGTAAG | |
| | TAGTTCGCCAGTTAATAGTTTGCGCAACGTTGTTGCCATTGCTACAG | |
| | GCATCGTGGTGTCACGCTCGTCGTTTGGTATGGCTTCATTCAGCTCC | |
| | GGTTCCCAACGATCAAGGCGAGTTACATGATCCCCCATGTTGTGCA | |
| | AAAAAGCGGTTAGCTCCTTCGGTCCTCCGATCGTTGTCAGAAGTAA | |
| | GTTGGCCGCAGTGTTATCACTCATGGTTATGGCAGCACTGCATAATT | |
| | CTCTTACTGTCATGCCATCCGTAAGATGCTTTTCTGTGACTGGTGAG | |
| | TACTCAACCAAGTCATTCTGAGAATAGTGTATGCGGCGACCGAGTT | |
| | GCTCTTGCCCGGCGTCAATACGGGATAATACCGCGCCACATAGCAG | |
| | AACTTTAAAAGTGCTCATCATTGGAAAACGTTCTTCGGGGCGAAAA | |
| | CTCTCAAGGATCTTACCGCTGTTGAGATCCAGTTCGATGTAACCCAC | |
| | TCGTGCACCCAACTGATCTTCAGCATCTTTTACTTTCACCAGCGTTT | |
| | CTGGGTGAGCAAAAACAGGAAGGCAAAATGCCGCAAAAAAGGGAA | |
| | TAAGGGCGACACGGAAATGTTGAATACTCATACTCTTCCTTTTTCAA | |
| | TATTATTGAAGCATTTATCAGGGTTATTGTCTCATGAGCGGATACAT | |
| | ATTTGAATGTATTTAGAAAAATAAACAAATAGGGGTTCCGCGCACA | |
| | TTTCCCCGAAAAGTGCCACCTgagggcctatttcccatgattccttca | |
| | tatttgcatatacgatacaaggctgttagagagataattagaattaat | |
| | ttgactgtaaacacaaagatattagtacaaaatacgtgacgtagaaag | |
| | taataatttcttgggtagtttgcagttttaaaattatgttttaaaatg | |
| | gactatcatatgcttaccgtaacttgaaagtatttcgatttcttgGCT | |
| | TTATATATCTTGTGGAAAGGACaagcgcaaccgcattgattgtttcct | |
| | tctcgacgagtacaagacctcatctgtttgccctcgctgttcctcatc | |
| | tgagtttgtggagaaaaaattcaaaacacgacctcattcaagaccttg | |
| | gcgccgtcgtgaaggcaagattgaaaaagtccacggactgctgggttg | |
| | taccaaccctaactgtttgcagcaagcctggacatcgggaatgcgcta | |
| | ctggaatcgagatatgctgtcaacctgcaacatgctattgattgtgag | |
| | atcaatgttggatggacacggtagaccagaagtgttcagcaggagtgt | |
| | tccagccgtagcgtagaacgtagattggttagattaggttttccgagc | |
| | cggttgtcgcgcggttcaatccctggtgcgggtgctagtgccaatacc | |
| | caccggctccgcactaCAgtcttcTCTgaagacCATTTTTT (SEQ | |
| | ID NO: 577) | |
| pMJ206 | AATTCTGTGGAATGTGTGTCAGTTAGGGTGTGGAAAGTCCCCAGGC | Ggtgattggagcgacgctggtcgaactgcgagatttcag |
| | TCCCCAGCAGGCAGAAGTATGCAAAGCATGCATCTCAATTAGTCAG | acctcatcaaagacaaaaggctggcgcaccctctttaagc |
| | CAACCAGGTGTGGAAAGTCCCCAGGCTCCCCAGCAGGCAGAAGTAT | gcaaccgcattgattgtttccttctcgacgagtacaagacc |
| | GCAAAGCATGCATCTCAATTAGTCAGCAACCATAGTCCCGCCCCTA | tcatctgtttgccctcgctgttcctcatctgagtttgtgga |
| | ACTCCGCCCATCCCGCCCCTAACTCCGCCCAGTTCCGCCCATTCTCC | gaaaaaattcaaaacacgacctcattcaagaccttggcgcc |
| | GCCCCATGGCTGACTAATTTTTTTTATTTATGCAGAGGCCGAGGCCG | gtcgtgaaggcaagattgaaaaagtccacggactgctgggt |
| | CCTCTGCCTCTGAGCTATTCCAGAAGTAGTGAGGAGGCTTTTTTGGA | tgtaccaaccctaactgtttgcagcaagcctggacatcggg |
| | GGCCTAGGCTTTTGCAAAAAGCTAACTTGTTTATTGCAGCTTATAAT | aatgcgctactggaatcgagatatgctgtcaacctgcaac |
| | GGTTACAAATAAAGCAATAGCATCACAAATTTCACAAATAAAGCAT | atgctattgattgtgagatcaatgttggatggacacggtag |
| | TTTTTTCACTGCATTCTAGTTGTGGTTTGTCCAAACTCATCAATGTAT | accagaagtgttcagcaggagtgttccagccgtagcgtag |
| | CTTATCATGTCTGTATACCGTCGACCTCTAGCTAGAGCTTGGCGTAA | aacgtagattggttagattaggttttccgagccggttgtcg |
| | TCATGGTCATAGCTGTTTCCTGTGTGAAATTGTTATCCGCTCACAAT | cgcggttcaatccctggtgcgggtgctagtgccaataccca |
| | TCCACACAACATACGAGCCGGAAGCATAAAGTGTAAAGCCTGGGGT | ccggctccgcacta (SEQ ID NO: 580) |
| | GCCTAATGAGTGAGCTAACTCACATTAATTGCGTTGCGCTCACTGCC | |
| | CGCTTTCCAGTCGGGAAACCTGTCGTGCCAGCTGCATTAATGAATC | |
| | GGCCAACGCGCGGGGAGAGGCGGTTTGCGTATTGGGCGCTCTTCCG | |
| | CTTCCTCGCTCACTGACTCGCTGCGCTCGGTCGTTCGGCTGCGGCGA | |
| | GCGGTATCAGCTCACTCAAAGGCGGTAATACGGTTATCCACAGAAT | |
| | CAGGGGATAACGCAGGAAAGAACATGTGAGCAAAAGGCCAGCAAA | |
| | AGGCCAGGAACCGTAAAAAGGCCGCGTTGCTGGCGTTTTTCCATAG | |
| | GCTCCGCCCCCCTGACGAGCATCACAAAAATCGACGCTCAAGTCAG | |
| | AGGTGGCGAAACCCGACAGGACTATAAAGATACCAGGCGTTTCCCC | |
| | CTGGAAGCTCCCTCGTGCGCTCTCCTGTTCCGACCCTGCCGCTTACC | |
| | GGATACCTGTCCGCCTTTCTCCCTTCGGGAAGCGTGGCGCTTTCTCA | |
| | TAGCTCACGCTGTAGGTATCTCAGTTCGGTGTAGGTCGTTCGCTCCA | |
| | AGCTGGGCTGTGTGCACGAACCCCCCGTTCAGCCCGACCGCTGCGC | |
| | CTTATCCGGTAACTATCGTCTTGAGTCCAACCCGGTAAGACACGACT | |
| | TATCGCCACTGGCAGCAGCCACTGGTAACAGGATTAGCAGAGCGAG | |
| | GTATGTAGGCGGTGCTACAGAGTTCTTGAAGTGGTGGCCTAACTAC | |
| | GGCTACACTAGAAGAACAGTATTTGGTATCTGCGCTCTGCTGAAGC | |
| | CAGTTACCTTCGGAAAAAGAGTTGGTAGCTCTTGATCCGGCAAACA | |
| | AACCACCGCTGGTAGCGGTTTTTTTGTTTGCAAGCAGCAGATTACGC | |
| | GCAGAAAAAAAGGATCTCAAGAAGATCCTTTGATCTTTTCTACGGG | |
| | GTCTGACGCTCAGTGGAACGAAAACTCACGTTAAGGGATTTTGGTC | |
| | ATGAGATTATCAAAAAGGATCTTCACCTAGATCCTTTTAAATTAAA | |
| | AATGAAGTTTTAAATCAATCTAAAGTATATATGAGTAAACTTGGTCT | |
| | GACAGTTACCAATGCTTAATCAGTGAGGCACCTATCTCAGCGATCT | |
| | GTCTATTTCGTTCATCCATAGTTGCCTGACTCCCCGTCGTGTAGATA | |
| | ACTACGATACGGGAGGGCTTACCATCTGGCCCCAGTGCTGCAATGA | |
| | TACCGCGAGACCCACGCTCACCGGCTCCAGATTTATCAGCAATAAA | |
| | CCAGCCAGCCGGAAGGGCCGAGCGCAGAAGTGGTCCTGCAACTTTA | |
| | TCCGCCTCCATCCAGTCTATTAATTGTTGCCGGGAAGCTAGAGTAAG | |
| | TAGTTCGCCAGTTAATAGTTTGCGCAACGTTGTTGCCATTGCTACAG | |
| | GCATCGTGGTGTCACGCTCGTCGTTTGGTATGGCTTCATTCAGCTCC | |
| | GGTTCCCAACGATCAAGGCGAGTTACATGATCCCCCATGTTGTGCA | |
| | AAAAAGCGGTTAGCTCCTTCGGTCCTCCGATCGTTGTCAGAAGTAA | |
| | GTTGGCCGCAGTGTTATCACTCATGGTTATGGCAGCACTGCATAATT | |
| | CTCTTACTGTCATGCCATCCGTAAGATGCTTTTCTGTGACTGGTGAG | |
| | TACTCAACCAAGTCATTCTGAGAATAGTGTATGCGGCGACCGAGTT | |
| | GCTCTTGCCCGGCGTCAATACGGGATAATACCGCGCCACATAGCAG | |
| | AACTTTAAAAGTGCTCATCATTGGAAAACGTTCTTCGGGGCGAAAA | |
| | CTCTCAAGGATCTTACCGCTGTTGAGATCCAGTTCGATGTAACCCAC | |
| | TCGTGCACCCAACTGATCTTCAGCATCTTTTACTTTCACCAGCGTTT | |
| | CTGGGTGAGCAAAAACAGGAAGGCAAAATGCCGCAAAAAAGGGAA | |
| | TAAGGGCGACACGGAAATGTTGAATACTCATACTCTTCCTTTTTCAA | |
| | TATTATTGAAGCATTTATCAGGGTTATTGTCTCATGAGCGGATACAT | |
| | ATTTGAATGTATTTAGAAAAATAAACAAATAGGGGTTCCGCGCACA | |
| | TTTCCCCGAAAAGTGCCACCTgagggcctatttcccatgattccttca | |
| | tatttgcatatacgatacaaggctgttagagagataattagaattaat | |
| | ttgactgtaaacacaaagatattagtacaaaatacgtgacgtagaaag | |
| | taataatttcttgggtagtttgcagttttaaaattatgttttaaaatg | |
| | gactatcatatgcttaccgtaacttgaaagtatttcgatttcttgGCT | |
| | TTATATATCTTGTGGAAAGGACggtgattggagcgacgctggtcgaac | |
| | tgcgagatttcagacctcatcaaagacaaaaggctggcgcaccctctt | |
| | taagcgcaaccgcattgattgtttccttctcgacgagtacaagacctc | |
| | atctgtttgccctcgctgttcctcatctgagtttgtggagaaaaaatt | |
| | caaaacacgacctcattcaagaccttggcgccgtcgtgaaggcaagat | |
| | tgaaaaagtccacggactgctgggttgtaccaaccctaactgtttgca | |
| | gcaagcctggacatcgggaatgcgctactggaatcgagatatgctgtc | |
| | aacctgcaacatgctattgattgtgagatcaatgttggatggacacgg | |
| | tagaccagaagtgttcagcaggagtgttccagccgtagcgtagaacg | |
| | tagattggttagattaggttttccgagccggttgtcgcgcggttcaa | |
| | tccctggtgcgggtgctagtgccaatacccaccggctccgcactaCAg | |
| | tcttcTCTgaagacCATTTTTT (SEQ ID NO: 579) | |

### 3.4 Rational Mutagenesis of Fanzor

[1315] Applicant hypothesized that the low activity of Fanzor on the human genome may be due to weak interactions between the Fanzor protein and either the ωRNA or the target DNA. To test this, Applicant introduced positively charged residues (Lys/Arg/His) in the FZID16 protein to enhance such interactions. Using AlphaFold2, Applicant predicted the 3D structure of the FZID16 protein and identified a “pocket” site between the RuvC (gray) and Nuc domain (green) where double-stranded cleavage occurs (FIG. 10A) [30]. Applicant reasoned that the target DNA may sit in this pocket. Therefore, to increase the strength of the target DNA binding to the protein at this site, Applicant mutated FZID16 residues near the catalytic pocket site to arginine, a positively charged residue that attracts the negatively charged DNA backbone. Applicant cloned these FZID16 mutants into the same two expression vectors (N-terminal or C-terminal NLS). Applicant co-transfected HEK293FT cells with plasmids expressing FZID16 mutants and the ωRNA with the optimal scaffold, pMJ171, and then assayed indels at the targeted locus to assess the relative efficiency of these protein variants. Applicant found that the FZID16 variants showed little difference compared to wildtype, and perhaps even slightly less activity (FIG. 10B). See Table 6 for specific FZD16 mutations in the FZD16 variants in relation to FIG. 10B. Applicant also observed that C-terminal tagged constructs gave the highest levels of activity which is consistent with the cellular expression results (FIG. 8C).

[1316] Applicant next sought to test if increasing the affinity of Fanzor for the ωRNA would enhance activity. However, as the structure of this complex is not known, and therefore the specific amino acids that interact with the ωRNA are unknown, Applicant used a different approach to nominate candidate sites for mutation. Applicant compared the sequence of FZID16 to that of other orthologs, searching for positively charged conserved residues (Lys/Arg/His) among the other orthologs that are not conserved in FZID16 (FIG. 10C). Applicant reasoned that such residues would not be detrimental for protein function based on their conservation and that they would increase the strength of the interaction between the protein and nucleic acids through salt bridge formation. Applicant therefore introduced point mutations at 32 selected sites that met Applicant's criteria (FIG. 10D) by site-directed mutagenesis of both N-terminal HA-NLS and C-terminal NLS-HA tagged FZID16 constructs. Each mutant was expressed in HEK293FT cells with an extended ωRNA scaffold variant (from pMJ171) with gID7, and indel activity was measured at the β2M target site (FIG. 10E, Table 7) Applicant found that several of these point mutants exhibited higher activity than wildtype, in particular, resides in domains likely to interact with the ωRNA (e.g., K-Mut3 (mutation in REC), R-Mut3 (WED), R-Mut4 (WED), R-Mut5 (Bridge Helix), and H-Mut5 (REC)) led to higher indel rates. FIG. 11 shows further ωRNA variants evaluated for indel activity. These results show that rational protein engineering can improve Fanzor activity in human cells.

TABLE 5
Annotations for FIG. 12A-12D and 13A-13B

| Gel Lane | Sample Name | Experiment Aim |
|---|---|---|
| 1 | N-terminal NLS Pocket- | pMJ145 |
| | Mut1 | |
| 2 | N-terminal NLS Pocket- | pMJ145 |
| | Mut2 | |
| 3 | N-terminal NLS Pocket- | pMJ145 |
| | Mut3 | |
| 4 | N-terminal NLS Pocket- | pMJ145 |
| | Mut2 (by different | |
| | primers) | |
| 5 | N-terminal NLS Pocket- | pMJ145 |
| | Mut5 | |
| 6 | No target amplification; | pMJ145 |
| | primer design was | |
| | wrong. | |
| 7 | N-terminal NLS Pocket- | pMJ145 |
| | Mut7 | |
| 8 | N-terminal NLS Pocket- | pMJ145 |
| | Mut1 (by different | |
| | primers) | |
| 9 | No target amplification; | pMJ145 |
| | primer design was | |
| | wrong. | |
| 10 | N-terminal NLS Pocket- | pMJ145 |
| | Mut10 | |
| 11 | N-terminal NLS Pocket- | pMJ145 |
| | Mut11 | |
| 12 | N-terminal NLS Pocket- | pMJ145 |
| | Mut12 | |
| 13 | C-terminal NLS Pocket- | pMJ149 |
| | Mut1 | |
| 14 | C-terminal NLS Pocket- | pMJ149 |
| | Mut2 | |
| 15 | C-terminal NLS Pocket- | pMJ149 |
| | Mut3 | |
| 16 | C-terminal NLS Pocket- | pMJ149 |
| | Mut2 (by different | |
| | primers) | |
| 17 | C-terminal NLS Pocket- | pMJ149 |
| | Mut5 | |
| 18 | No target amplification; | pMJ149 |
| | primer design was | |
| | wrong. | |
| 19 | C-terminal NLS Pocket- | pMJ149 |
| | Mut7 | |
| 20 | C-terminal NLS Pocket- | pMJ149 |
| | Mut1 (by different | |
| | primers) | |
| 21 | No target amplification; | pMJ149 |
| | primer design was | |
| | wrong. | |
| 22 | C-terminal NLS Pocket- | pMJ149 |
| | Mut10 | |
| 23 | C-terminal NLS Pocket- | pMJ149 |
| | Mut11 | |
| 24 | C-terminal NLS Pocket- | pMJ149 |
| | Mut12 | |
| 25 | N-terminal NLS K- | pMJ145 |
| | Mut1 | |
| 26 | N-terminal NLS K- | pMJ145 |
| | Mut2 | |
| 27 | N-terminal NLS K- | pMJ145 |
| | Mut3 | |
| 28 | N-terminal NLS K- | pMJ145 |
| | Mut4 | |
| 29 | N-terminal NLS K- | pMJ145 |
| | Mut5 | |
| 30 | N-terminal NLS K- | pMJ145 |
| | Mut6 | |
| 31 | N-terminal NLS K- | pMJ145 |
| | Mut7 | |
| 32 | N-terminal NLS K- | pMJ145 |
| | Mut8 | |
| 33 | N-terminal NLS K- | pMJ145 |
| | Mut9 | |
| 34 | N-terminal NLS K- | pMJ145 |
| | Mut10 | |
| 35 | N-terminal NLS R- | pMJ145 |
| | Mut1 | |
| 36 | N-terminal NLS R- | pMJ145 |
| | Mut2 | |
| 37 | N-terminal NLS R- | pMJ145 |
| | Mut3 | |
| 38 | N-terminal NLS R- | pMJ145 |
| | Mut4 | |
| 39 | N-terminal NLS R- | pMJ145 |
| | Mut5 | |
| 40 | N-terminal NLS H- | pMJ145 |
| | Mut1 | |
| 41 | N-terminal NLS H- | pMJ145 |
| | Mut2 | |
| 42 | N-terminal NLS H- | pMJ145 |
| | Mut3 | |
| 43 | N-terminal NLS H- | pMJ145 |
| | Mut4 | |
| 44 | N-terminal NLS H- | pMJ145 |
| | Mut5 | |
| 45 | N-terminal NLS H- | pMJ145 |
| | Mut6 | |
| 46 | N-terminal NLS H- | pMJ145 |
| | Mut7 | |
| 47 | N-terminal NLS H- | pMJ145 |
| | Mut8 | |
| 48 | N-terminal NLS H- | pMJ145 |
| | Mut9 | |
| 49 | N-terminal NLS H- | pMJ145 |
| | Mut10 | |
| 50 | N-terminal NLS H- | pMJ145 |
| | Mut11 | |
| 51 | N-terminal NLS H- | pMJ145 |
| | Mut12 | |
| 52 | N-terminal NLS H- | pMJ145 |
| | Mut13 | |
| 53 | N-terminal NLS H- | pMJ145 |
| | Mut14 | |
| 54 | N-terminal NLS H- | pMJ145 |
| | Mut15 | |
| 55 | N-terminal NLS H- | pMJ145 |
| | Mut16 | |
| 56 | N-terminal NLS H- | pMJ145 |
| | Mut17 | |
| 57 | C-terminal NLS K- | pMJ149 |
| | Mut1 | |
| 58 | C-terminal NLS K- | pMJ149 |
| | Mut2 | |
| 59 | C-terminal NLS K- | pMJ149 |
| | Mut3 | |
| 60 | C-terminal NLS K- | pMJ149 |
| | Mut4 | |
| 61 | C-terminal NLS K- | pMJ149 |
| | Mut5 | |
| 62 | C-terminal NLS K- | pMJ149 |
| | Mut6 | |
| 63 | C-terminal NLS K- | pMJ149 |
| | Mut7 | |
| 64 | C-terminal NLS K- | pMJ149 |
| | Mut8 | |
| 65 | C-terminal NLS K- | pMJ149 |
| | Mut9 | |
| 66 | C-terminal NLS K- | pMJ149 |
| | Mut10 | |
| 67 | C-terminal NLS R- | pMJ149 |
| | Mut1 | |
| 68 | C-terminal NLS R- | pMJ149 |
| | Mut2 | |
| 69 | C-terminal NLS R- | pMJ149 |
| | Mut3 | |
| 70 | C-terminal NLS R- | pMJ149 |
| | Mut4 | |
| 71 | C-terminal NLS R- | pMJ149 |
| | Mut5 | |
| 72 | C-terminal NLS H- | pMJ149 |
| | Mut1 | |
| 73 | C-terminal NLS H- | pMJ149 |
| | Mut2 | |
| 74 | C-terminal NLS H- | pMJ149 |
| | Mut3 | |
| 75 | C-terminal NLS H- | pMJ149 |
| | Mut4 | |
| 76 | C-terminal NLS H- | pMJ149 |
| | Mut5 | |
| 77 | C-terminal NLS H- | pMJ149 |
| | Mut6 | |
| 78 | C-terminal NLS H- | pMJ149 |
| | Mut7 | |
| 79 | C-terminal NLS H- | pMJ149 |
| | Mut8 | |
| 80 | C-terminal NLS H- | pMJ149 |
| | Mut9 | |
| 81 | C-terminal NLS H- | pMJ149 |
| | Mut10 | |
| 82 | C-terminal NLS H- | pMJ149 |
| | Mut11 | |
| 83 | C-terminal NLS H- | pMJ149 |
| | Mut12 | |
| 84 | C-terminal NLS H- | pMJ149 |
| | Mut13 | |
| 85 | C-terminal NLS H- | pMJ149 |
| | Mut14 | |
| 86 | C-terminal NLS H- | pMJ149 |
| | Mut15 | |
| 87 | C-terminal NLS H- | pMJ149 |
| | Mut16 | |
| 88 | C-terminal NLS H- | pMJ149 |
| | Mut17 | |

TABLE 6
FZD16 Variant mutations

| | Mutation in FZID16 with respect to |
|---|---|
| ID in FIG. 10B | reference FZD16 sequence |
| Pocket-Mut1 | I382R/D383R |
| Pocket-Mut2 | F537S |
| Pocket-Mut3 | L538R |
| Pocket-Mut5 | S545R |
| Pocket-Mut7 | V381R/I382R |
| Pocket-Mut8 | I382R/D383R |
| Pocket-Mut9 | S609R |
| Pocket-Mut10 | K523R |
| Pocket-Mut11 | V629R |
| Pocket-Mut12 | W103R |

TABLE 7
FZID16 Variant Mutations

| | Mutation in FZID16 with respect to |
|---|---|
| ID in FIG. 10E | reference FZD16 sequence |
| K-Mut1 | G127K |
| K-Mut2 | D229K |
| K-Mut3 | Q255K |
| K-Mut4 | I280K |
| K-Mut5 | N355K |
| K-Mut6 | N368K |
| K-Mut7 | N396K |
| K-Mut8 | V409K |
| K-Mut9 | E425K |
| K-Mut10 | E426K |
| R-Mut1 | Q168R |
| R-Mut2 | Q259R |
| R-Mut3 | C310R |
| R-Mut4 | C318R |
| R-Mut5 | A417R |
| H-Mut1 | R39H |
| H-Mut2 | Q116H |
| H-Mut3 | Q168H |
| H-Mut4 | R187H |
| H-Mut5 | Y256H |
| H-Mut6 | Q259H |
| H-Mut7 | R267H |
| H-Mut8 | R305H |
| H-Mut9 | C318H |
| H-Mut10 | R348H |
| H-Mut11 | R387H |
| H-Mut12 | R401H |
| H-Mut13 | R455H |
| H-Mut14 | R460H |
| H-Mut15 | R493H |
| H-Mut16 | Y542H |
| H-Mut17 | R550H |

### DISCUSSION

[1317] A critical bottleneck to expanding the utility of therapeutic gene editing is the development of compact gene editing tools that can be efficiently delivered with currently approved delivery modalities, like AAV. Here, Applicant provides evidence that the eukaryotic OMEGA system Fanzor is an ideal candidate to meet this need. Applicant establishes that Fanzor can be used to edit the genome of human cells and present two approaches for engineering this system to boost activity, considering both the ωRNA and the protein itself. Together, these optimizations substantially increase activity over the baseline editing level and demonstrate the potential for Fanzor as a compact gene editing tool.

[1318] Applicant selected an initial ortholog for development, FZID16, and began by characterizing its expression level and localization in human cells by Western blotting and immunofluorescence, respectively. Applicant found that C-terminal NLS tagged FZID16 is expressed more highly than N-terminal tagged FZID16. Although Applicant used typical SV40-derived NLS for FZID16, the immunofluorescence results revealed that both proteins are still localized mainly in the cytosol, suggesting that for future optimizations, a stronger bipartite NLS or putting an NLS on both the N-terminus and C-terminus at the same time may be tested to increase nuclear localization. However, Applicant also have to consider the position of NLS tag carefully as Applicant observed differences in activity between N- and C-NLS tagged point mutants (FIG. 10E). Future structural analysis of the Fanzor-ωRNA complex would help to optimize NLS tag design.

[1319] Compared to the gRNAs used by Cas systems, the Fanzor ωRNA is substantially larger, providing us with an opportunity to engineer this component of the system. Like Cas9, Applicant observed differences in requires sequences of the gRNA for activity in human cells compared to in vitro experiments [8]. Applicant found that by extending the 5′ boundary of the ωRNA, Applicant were able to improve cleavage activity on the human genome by ˜3 fold. Applicant also explored whether addition of an HDV self-cleaving ribozyme at the 3′ end of the ωRNA, which has been reported to increase activity of TnpB in human cells [23], produced a similar effect with Fanzor. However, this decreased indel frequency. Nevertheless, it would be interesting to see whether using different self-cleaving ribozymes (such as hammerhead and hairpin) could result in increased activity.

[1320] Additionally, Applicant generated a number of Fanzor proteins variants that contained positively charged amino acid residues predicted to increase the affinity between the protein and nucleic acids. Although introducing these residues near the catalytic pocket did not significantly change indel frequencies relative to the wild-type protein, when positively charged residues were introduced at sites that contain such residues in other Fanzor orthologs, Applicant observed a ˜10 fold increase in activity. Among the 32 candidate point mutants at conserved sites, the two that led to the highest increases in activity were in the REC and WED domain, supporting Applicant's hypothesis that altering the protein to increase affinity for nucleic acids is a viable strategy for increasing activity. As with the NLS tag optimizations, determination of the Fanzor structure in complex with the guide RNA (and target DNA) would nominate additional candidate residues to mutate.

[1321] For future Fanzor protein modifications, Applicant could use directed evolution to increase indel activity, a strategy that has been used to optimize other proteins for genome editing [32]. Applicant could perform a screen in E. coli that uses a selection-based method to isolate Fanzor mutants that exhibit high activity. In this screening process, Applicant would introduce a plasmid containing a lethal gene targeted by the ωRNA and a library of Fanzor variants. This would allow us to select only those Fanzor mutants that can cleave the lethal gene. Applicant would then isolate and sequence the plasmids from surviving E. coli to identify Fanzor variant candidates to test in human cells.

[1322] The small size of Fanzor makes it an ideal platform to build out base editing constructs, and a key next step will be to create fusions between Fanzor and other proteins, such as deaminases, to generate a suite of compact genome editing tools. Finally, it will also be important to assess the immunogenicity of Fanzor in a mouse model as a first step toward translating this powerful new tool to the clinic.

### CONCLUSION

[1323] Although other eukaryotic RNA-guided systems exist, Fanzor represents the first example of such a eukaryotic system that exhibits specific guide loading, restricting its activity to guide-encoded targets. This built-in specificity, its compact size, and its eukaryotic origins all contribute to its suitability for use in therapeutic applications. Here, Applicant demonstrate that Fanzor can induce cleavage at targeted loci in the human genome. Applicant were also able to engineer the system to boost efficiency. Using a two-pronged approach, Applicant mutated both components of the Fanzor system: ωRNA and the Fanzor protein itself. Establishing the correct boundaries of ωRNA and installing Fanzor mutations that promote DNA-binding affinity increased baseline indel activity by 10 fold. Fanzor's compact size opens up a new realm of possibilities for in vivo clinical therapies. In particular, Fanzor's small size makes it ideally suited to use in base editing constructs, which have the potential to treat a large number of genetic diseases.

[1324] Applicant used Fanzor to begin solving a major challenge in gene therapy: the development of compact genome editing tools that can be delivered with existing delivery modalities. Fanzor is a eukaryotic relative of the powerful CRISPR-Cas systems. Like CRISPR-Cas, Fanzor is an RNA-guided system, which Applicant shows can be reprogrammed to cleave targeted locations in the human genome. To develop Fanzor toward clinical use, Applicant engineered both the RNA guide and protein component of this system, arriving at an engineered system with dramatically enhanced activity. This study unlocks the potential of this unusual new system as a therapy to treat thousands of genetic diseases.

### REFERENCES FOR EXAMPLE 1

[1325] [1] D. Cyranoski. Crispr gene-editing tested in a person for the first time. Nature, 539 (7630), 2016.
[1326] [2] H. Frangoul, D. Altshuler, M. D. Cappellini, Y.-S. Chen, J. Domm, B. K. Eustace, J. Foell, J. de la Fuente, S. Grupp, R. Handgretinger, et al. Crispr-cas9 gene editing for sickle cell disease and -thalassemia. New England Journal of Medicine, 384 (3): 252 {260, 2021.
[1327] [3] L. Xu, J. Wang, Y. Liu, L. Xie, B. Su, D. Mou, L. Wang, T. Liu, X. Wang, B. Zhang, et al. Crispr-edited stem cells in a patient with hiv and acute lymphocytic leukemia. New England Journal of Medicine, 381 (13): 1240 {1247, 2019.
[1328] [4] F. J. Bustos, E. Ampuero, N. Jury, R. Aguilar, F. Falahi, J. Toledo, J. Ahumada, J. Lata, P. Cubillos, B. Henr quez, et al. Epigenetic editing of the dlg4/psd95 gene improves cognition in aged and alzheimer's disease mice. Brain, 140 (12): 3252 {3268, 2017.
[1329] [5] R. Moore, A. Chandrahas, and L. Bleris. Transcription activator-like e_ectors: a toolkit for synthetic biology. ACS synthetic biology, 3 (10): 708 {716, 2014.
[1330] [6] D. Carroll. Progress and prospects: zinc-nger nucleases as gene therapy agents. Gene therapy, 15 (22): 1463 {1468, 2008.
[1331] [7] N. E. Sanjana, L. Cong, Y. Zhou, M. M. Cunni, G. Feng, and F. Zhang. A transcription activator-like e_ector toolbox for genome engineering. Nature protocols, 7 (1): 171 {192, 2012.
[1332] [8] L. Cong, F. A. Ran, D. Cox, S. Lin, R. Barretto, N. Habib, P. D. Hsu, X. Wu, W. Jiang, L. A. Marra_ni, et al. Multiplex genome engineering using crispr/cas systems. Science, 339 (6121): 819 {823, 2013.
[1333] [9] P. Mali, L. Yang, K. M. Esvelt, J. Aach, M. Guell, J. E. DiCarlo, J. E. Norville, and G. M. Church. Rna-guided human genome engineering via cas9. Science, 339 (6121): 823 {826, 2013.
[1334] [10] F. Ran, P. D. Hsu, J. Wright, V. Agarwala, D. A. Scott, and F. Zhang. Genome engineering using the crispr-cas9 system. Nature protocols, 8 (11): 2281 {2308, 2013.
[1335] [11] K. S. Makarova, Y. I. Wolf, J. Iranzo, S. A. Shmakov, O. S. Alkhnbashi, S. J. Brouns, E. Charpentier, D. Cheng, D. H. Haft, P. Horvath, et al. Evolutionary classi_cation of crispr {cas systems: a burst of class 2 and derived variants. Nature Reviews Microbiology, 18 (2): 67 {83, 2020.
[1336] [12] T. A. Kazi and S. R. Biswas. Crispr/dcas system as the modulator of gene expression. Progress in Molecular Biology and Translational Science, 178: 99 {122, 2021.
[1337] [13] A. Eid, S. Alshareef, and M. M. Mahfouz. Crispr base editors: genome editing without double-stranded breaks. Biochemical Journal, 475 (11): 1955 {1964, 2018.
[1338] [14] P. D. Hsu, E. S. Lander, and F. Zhang. Development and applications of crispr-cas9 for genome engineering. Cell, 157 (6): 1262 {1278, 2014.
[1339] [15] F. Uddin, C. M. Rudin, and T. Sen. Crispr gene therapy: applications, limitations, and implications for the future. Frontiers in oncology, 10:1387, 2020.
[1340] [16] M. F. Naso, B. Tomkowicz, W. L. Perry, and W. R. Strohl. Adeno-associated virus (aav) as a vector for gene therapy. BioDrugs, 31 (4): 317 {334, 2017.
[1341] [17] J.-q. Liu and T. Li. Crispr-cas9-mediated loss-of-function screens. Frontiers in Life Science, 12 (1): 1 {13, 2019.
[1342] [18] T. S. Nambiar, P. Billon, G. Diedenhofen, S. B. Hayward, A. Taglialatela, K. Cai, J.-W. Huang, G. Leuzzi, R. Cuella-Martin, A. Palacios, et al. Stimulation of crispr-mediated homology-directed repair by an engineered rad18 variant. Nature communications, 10 (1): 1 {13, 2019.
[1343] [19] A. Lapinaite, G. J. Knott, C. M. Palumbo, E. Lin-Shiao, M. F. Richter, K. T. Zhao, P. A. Beal, D. R. Liu, and J. A. Doudna. Dna capture by a crispr-cas9 {guided adenine base editor. Science, 369 (6503): 566 {571, 2020.
[1344] [20] S. Demirci, A. Leonard, J. J. Haro-Mora, N. Uchida, and J. F. Tisdale. Crispr/cas9 for sickle cell disease: applications, future possibilities, and challenges. Cell Biology and Translational Medicine, Volume 5, pages 37 {52, 2019.
[1345] [21] D. H. Jo, D. W. Song, C. S. Cho, U. G. Kim, K. J. Lee, K. Lee, S. W. Park, D. Kim, J. H. Kim, J.-S. Kim, et al. Crispr-cas9 {mediated therapeutic editing of rpe⁶⁵ ameliorates the disease phenotypes in a mouse model of leber congenital amaurosis. Science advances, 5 (10): eaax 1210, 2019.
[1346] [22] H. Altae-Tran, S. Kannan, F. E. Demircioglu, R. Oshiro, S. P. Nety, L. J. Mckay, M. Dlaki_c, W. P. Inskeep, K. S. Makarova, R. K. Macrae, et al. The widespread is200/is605 transposon family encodes diverse programmable rna-guided endonucleases. Science, 374 (6563): 57 {65, 2021.
[1347] [23] T. Karvelis, G. Druteika, G. Bigelyte, K. Budre, R. Zedaveinyte, A. Silanskas, D. Kazlauskas, C. Venclovas, and V. Siksnys. Transposon-associated tnpb is a programmable rna-guided dna endonuclease. Nature, 599 (7886): 692 {696, 2021.
[1348] [24] W. Bao and J. Jurka. Homologues of bacterial tnpb is605 are widespread in diverse eukaryotic transposable elements. Mobile DNA, 4 (1): 1 {16, 2013.
[1349] [25] J. L. Schmid-Burgk, L. Gao, D. Li, Z. Gardner, J. Strecker, B. Lash, and F. Zhang. Highly parallel pro_ling of cas9 variant speci_city. Molecular cell, 78 (4): 794 {800, 2020.
[1350] [26] M. Zuker. Mfold web server for nucleic acid folding and hybridization prediction. Nucleic acids research, 31 (13): 3406 {3415, 2003.
[1351] [27] M. Saito, D. Hess, J. Eglinger, A. W. Fritsch, M. Kreysing, B. T. Weinert, C. Choudhary, and P. Matthias. Acetylation of intrinsically disordered regions regulates phase separation. Nature chemical biology, 15 (1): 51 {61, 2019.
[1352] [28] K. Clement, H. Rees, M. C. Canver, J. M. Gehrke, R. Farouni, J. Y. Hsu, M. A. Cole, D. R. Liu, J. K. Joung, D. E. Bauer, et al. Crispresso2 provides accurate and rapid genome editing sequence analysis. Nature biotechnology, 37 (3): 224 {226, 2019.
[1353] [29] T. Yamano, H. Nishimasu, B. Zetsche, H. Hirano, I. M. Slaymaker, Y. Li, I. Fedorova, T. Nakane, K. S. Makarova, E. V. Koonin, et al. Crystal structure of cpfl in complex with guide rna and target dna. Cell, 165 (4): 949 {962, 2016.
[1354] [30] J. Jumper, R. Evans, A. Pritzel, T. Green, M. Figurnov, O. Ronneberger, K. Tunyasuvunakool, R. Bates, A. Z_dek, A. Potapenko, et al. Highly accurate protein structure prediction with alphafold. Nature, 596 (7873): 583 {589, 2021.
[1355] [31] B. Zetsche, J. S. Gootenberg, O. O. Abudayyeh, I. M. Slaymaker, K. S. Makarova, P. Essletzbichler, S. E. Volz, J. Joung, J. Van Der Oost, A. Regev, et al. Cpf1 is a single rna-guided endonuclease of a class 2 crispr-cas system. Cell, 163 (3): 759 {771, 2015.
[1356] [32] J. K. Lee, E. Jeong, J. Lee, M. Jung, E. Shin, Y.-h. Kim, K. Lee, I. Jung, D. Kim, S. Kim, et al. Directed evolution of crispr-cas9 to increase its specificity. Nature communications, 9 (1): 1 {10, 2018.

### Example 2

[1357] FIG. 14 shows the identification of eukaryotic TnpB-like proteins. 11 loci are confirmed (named Spu locus v1-v11). There was no intron. They are well structured by AlphaFold prediction. There are clear transposon ends and ncRNA region was clearly identifiable.

[1358] FIG. 15A-15B shows that Spizellomyces punctatus (ATCC48900; Spu) expresses ncRNA from downstream of a Fanzor open reading frame (ORF).

[1359] FIG. 16A-16C shows an experimental strategy and results for a Fanzor RNP pull down assay in yeast and RNAseq analysis. RNP pull down assay with yeast worked for ncRNA identification for Spu.

[1360] FIG. 17 shows a strategy for a Fanzor RNP pooled pull down assay. The exemplary strategy shown demonstrates 12 contigs in 1 transformation for 1L of yeast culture.

[1361] FIG. 18A-18B shows results for additional candidates with no introns (a single ORF in the transposon). FIG. 18A shows results from Torulaspora delbrueckii. FIG. 18B shows results for Naegleria lovaniensis.

[1362] FIG. 19A-19B shows results for additional candidates with no introns (2-4 ORFs in the transposon. A catalytic DDE was conserved.

[1363] FIG. 20 shows contigs tested in yeast using the methods described herein.

[1364] FIG. 21 shows an Spu RNP from yeast and RNAseq results. 87-88 nt at analogous position was always observed.

[1365] FIG. 22A-22B shows a T. del. RNP from yeast and RNAseq results. No ncRNA was identified from other yeast species Ashbya gossypii or Eremothecium cymbalariae DBVPG #7215.

[1366] FIG. 23A-23C hows Nlov Fanzor RNP from yeast and RNAseq results.

[1367] FIG. 24A-24B shows Mimiviridae Fanzor RNP from yeast and RNAseq results.

[1368] FIG. 25A-25B shows results from an in vitro clevage/TAM screen with Fanzor-RNP from yeast.

[1369] FIG. 26 shows results demonstrating that Spu Fanzor is active in human cells. In particular, at least the Fanzor Applicant refers to as FZID16 was observed to be active in human cells. Applicant has identified that this Spu has several Fanzor copies in the genome with sequences that vary slightly from one another.

[1370] Tables 8-9 show Fanzor plasmids used in Examples 1 and 2.

TABLE 8
Fanzor plasmids for Examples 1 and 2.

| Plasmid | |
|---|---|
| Name | Sequence |
| pMJ145 | cgttacataacttacggtaaatggcccgcctggctgaccgcccaacgacccccgcccattgacgtcaataatgacgtatgttcccatagtaacgccaatagggactttccattgacgt |
| pCMV- | caatgggtggagtatttacggtaaactgcccacttggcagtacatcaagtgtatcatatgccaagtacgccccctattgacgtcaatgacggtaaatggcccgcctggcattatgccca |
| HA-NLS- | gtacatgaccttatgggactttcctacttggcagtacatctacgtattagtcatcgctattaccatggtgatgcggttttggcagtacatcaatgggcgtggatagcggtttgactcacgg |
| Hs_FZID16 | ggatttccaagtctccaccccattgacgtcaatgggagtttgttttggcaccaaaatcaacgggactttccaaaatgtcgtaacaactccgccccattgacgcaaatgggggtaggc |
| | gtgtacggtgggaggtctatataagcagagctggtttagtgaaccgtcagatccgctagcgctaccggactcagatcgccaccATGTACCCCTACGACGTGCCA |
| | GACTACGCCCCTAAGAAGAAGAGAAAAGTCGGCGGCTCTGGCGGCGGAGGATCTGGCGGAGGTGGAAGCGG |
| | AGGACCGCCTAAGAAGAAGCAGAAGCTGGAACGGCTGAAGAAACTGGACAAGCCCACACTGCACACCTGTA |
| | ACAAGACCAGCTTCGCCAAGGCCTTCCTGCCTAACGAGACATACCGGCAGCGGCTGCTGGACTATATCGCCA |
| | TCATTCACCAGCTGGCCGACCACGCCTCTCACGCCCTGAAGTTTTACATCCTGAGCACCTCCACCAGCAGCTT |
| | CCCTGTGGTGCACGAGGATACCATCGAGGCCATCCTGTACCTGCTGAACAAGGGCGAAGCCTGGCATCCCAG |
| | AAAAGAGGCCAAGAAGGCCTGGCGGGATTGCCTGCTGCCTTACGTGCAGAGATACTGCCAGATCGTGGGCTT |
| | CATTCACCCCAACCTGAGAGGCGAGCAGCAGAGCATCAACTACCTGACCGTGTCCATGATGACCAACCTGAA |
| | AGTGAACGTGCAAGAGCACTTCATGCAGATGCTGCTGCGGTACATCAATCTGCGCTTCGACGTGAAGGGCCA |
| | GAAGCAGAGACTGCCTCCTAAGAGCGACGCCCGCAAGGCCTTTTTCACCCGGCTGAGATACCTGAAGTCCGT |
| | GTTCCTGTTCGACGTGGTGCCCGAGCTGGAATTCCTGGACGATCTGACCCCTCTGGAAAGCGAGGTGCTGGA |
| | AGAGATCTGGTCCCTGGACCTGCCTTTTCTGCCCAACGATCCTCTGGCCTACGCCATCGTGGCCGATCCTATG |
| | AGCTTCTTCCCAGCCTACTGCAAGCTGAGCGGCCTGTACGAGCAGTACGGCTTCCAGCGGTTTAGCGCCATTC |
| | CTCTGCGGAGAAGCCTGATCCAGTCTCACGTGCGGATCGACACCATCATCCTGTATCAGCACATCCTGTGCAT |
| | CACCAGACGGGACGCCGAGACAGTGGAAAAGGACGACCTGTGGATGAGAGTGTGCAACCTGTGCACCAAAG |
| | CCTTCCGGTCCAGATGCGGCATGCACTTCGAGGGCAGCATCACAACAGATGGCGCCAGCGTGTCCGTGTACC |
| | TGAAACACCCTGAGGCCGATAAGTACGGCAAGAGAGGCGCCAGAAAGTCCGCCAATACTGTGGCCGCCGAA |
| | GTGAAGGCCCTGTACGTGGAAAACAACCTGCCTGCCTGTAGAGCCGCCGAGAACGTGGTGGTCATCGACCCC |
| | AACAAGCGGGATATCCTGTACTGCCAGGACAGCAACGGCACCACCTTCAGATACACCGCCAACCAGAGAGC |
| | CGTGGAAACCGGCAGCAGAAGATTCGCCAAGCGGCGGGAAGCCATGAAGGAAGAAGCCGGCGTTGACCTGA |
| | TCGAGAGCAGAATCCCTAGCCACAAGACCATGAACCTGATGGACTTCACCAGATACCTGCTCGTGCGGAGAG |
| | CCGACTGGGACAGACGGAAAGAGTTCTACTCTCACCCCGCTCACACCCGGTGGAAGTGGCACAGCTTCATCA |
| | ACCGGCAGAAGTCCGAGAGCGACCTGATCAGCAACATGCGGAACAAATACGGCGAGAACTTCACCGTGGTC |
| | ATGGGCGATTGGAGCGACGCTGGAAGAACCGCCAGATTCCAGACCAGCAGCAAGACCAAAGGCTGGCGGAC |
| | CCTGTTCAAGCGGAACCGGATCGATTGCTTCCTGCTGGACGAGTACAAGACCTCCAGCGTGTGCCCTAGATG |
| | CAGCAGCAGCGAGTTCGTGGAAAAGAAGTTCAAGACCCGGCCTCACAGCAGACCCTGGCGAAGAAGAGAGG |
| | GCAAGATCGAGAAGGTGCACGGCCTGCTGGGCTGCACCAATCCTAATTGTCTGCAGCAGGCCTGGACCAGCG |
| | GCATGAGATACTGGAACCGGGACATGCTGAGCACATGCAACATGCTGCTGATCGTGCGGTCCATGCTGGATG |
| | GCCATGGCAGACCTGAGGTGTTCTCTAGATCTGTGCCTGCCGTGGCCtgaCTAGCATAACCCCTTGGGGCGCAC |
| | Tcctcaggtgcaggctgcctatcagaaggtggtggctggtgtggccaatgccctggctcacaaataccactgagatctttttccctctgccaaaaattatggggacatcatgaagccc |
| | cttgagcatctgacttctggctaataaaggaaatttattttcattgcaatagtgtgttggaattttttgtgtctctcactcggaaggacatatgggagggcaaatcatttaaaacatcagaatg |
| | agtatttggtttagagtttggcaacatatgcccatatgctggctgccatgaacaaaggttggctataaagaggtcatcagtatatgaaacagccccctgctgtccattccttattccataga |
| | aaagccttgacttgaggttagattttttttatattttgttttgtgttatttttttctttaacatccctaaaattttccttacatgttttactagccagatttttcctcctctcctgactactcccagtcatag |
| | ctgtccctcttctcttatggagatccctcgacctgcagcccaagcttggcgtaatcatggtcatagctgtttcctgtgtgaaattgttatccgctcacaattccacacaacatacgagccg |
| | gaagcataaagtgtaaagcctggggtgcctaatgagtgagctaactcacattaattgcgttgcgctcactgcccgctttccagtcgggaaacctgtcgtgccagcggatccgcatctc |
| | aattagtcagcaaccatagtcccgcccctaactccgcccatcccgcccctaactccgcccagttccgcccattctccgccccatggctgactaattttttttatttatgcagaggccgag |
| | gccgcctcggcctctgagctattccagaagtagtgaggaggcttttttggaggcctaggcttttgcaaaaagctaacttgtttattgcagcttataatggttacaaataaagcaatagcat |
| | cacaaatttcacaaataaagcatttttttcactgcattctagttgtggtttgtccaaactcatcaatgtatcttatcatgtctggatccgctgcattaatgaatcggccaacgcgcggggaga |
| | ggcggtttgcgtattgggcgctcttccgcttcctcgctcactgactcgctgcgctcggtcgttcggctgcggcgagcggtatcagctcactcaaaggcggtaatacggttatccacag |
| | aatcaggggataacgcaggaaagaacatgtgagcaaaaggccagcaaaaggccaggaaccgtaaaaaggccgcgttgctggcgtttttccataggctccgcccccctgacgag |
| | catcacaaaaatcgacgctcaagtcagaggtggcgaaacccgacaggactataaagataccaggcgtttccccctggaagctccctcgtgcgctctcctgttccgaccctgccgctt |
| | accggatacctgtccgcctttctcccttcgggaagcgtggcgctttctcatagctcacgctgtaggtatctcagttcggtgtaggtcgttcgctccaagctgggctgtgtgcacgaaccc |
| | cccgttcagcccgaccgctgcgccttatccggtaactatcgtcttgagtccaacccggtaagacacgacttatcgccactggcagcagccactggtaacaggattagcagagcgag |
| | gtatgtaggcggtgctacagagttcttgaagtggtggcctaactacggctacactagaagaacagtatttggtatctgcgctctgctgaagccagttaccttcggaaaaagagttggta |
| | gctcttgatccggcaaacaaaccaccgctggtagcggtggtttttttgtttgcaagcagcagattacgcgcagaaaaaaaggatctcaagaagatcctttgatcttttctacggggtctg |
| | acgctcagtggaacgaaaactcacgttaagggattttggtcatgagattatcaaaaaggatcttcacctagatccttttaaattaaaaatgaagttttaaatcaatctaaagtatatatgagt |
| | aaacttggtctgacagttaccaatgcttaatcagtgaggcacctatctcagcgatctgtctatttcgttcatccatagttgcctgactccccgtcgtgtagataactacgatacgggaggg |
| | cttaccatctggccccagtgctgcaatgataccgcgagacccacgctcaccggctccagatttatcagcaataaaccagccagccggaagggccgagcgcagaagtggtcctgc |
| | aactttatccgcctccatccagtctattaattgttgccgggaagctagagtaagtagttcgccagttaatagtttgcgcaacgttgttgccattgctacaggcatcgtggtgtcacgctcgt |
| | cgtttggtatggcttcattcagctccggttcccaacgatcaaggcgagttacatgatcccccatgttgtgcaaaaaagcggttagctccttcggtcctccgatcgttgtcagaagtaagtt |
| | ggccgcagtgttatcactcatggttatggcagcactgcataattctcttactgtcatgccatccgtaagatgcttttctgtgactggtgagtactcaaccaagtcattctgagaatagtgtat |
| | gcggcgaccgagttgctcttgcccggcgtcaatacgggataataccgcgccacatagcagaactttaaaagtgctcatcattggaaaacgttcttcggggcgaaaactctcaaggat |
| | cttaccgctgttgagatccagttcgatgtaacccactcgtgcacccaactgatcttcagcatcttttactttcaccagcgtttctgggtgagcaaaaacaggaaggcaaaatgccgcaaa |
| | aaagggaataagggcgacacggaaatgttgaatactcatactcttcctttttcaatattattgaagcatttatcagggttattgtctcatgagcggatacatatttgaatgtatttagaaaaat |
| | aaacaaataggggttccgcgcacatttccccgaaaagtgccacctgggtcgacattgattattgactagtaatagtaatcaattacggggtcattagttcatagcccatatatggagttc |
| | cg (SEQ ID NO: 581) |
| pMJ149 | cgttacataacttacggtaaatggcccgcctggctgaccgcccaacgacccccgcccattgacgtcaataatgacgtatgttcccatagtaacgccaatagggactttccattgacgt |
| pCMV- | caatgggtggagtatttacggtaaactgcccacttggcagtacatcaagtgtatcatatgccaagtacgccccctattgacgtcaatgacggtaaatggcccgcctggcattatgccca |
| Hs_FZID16- | gtacatgaccttatgggactttcctacttggcagtacatctacgtattagtcatcgctattaccatggtgatgcggttttggcagtacatcaatgggcgtggatagcggtttgactcacgg |
| NLS-HA | ggatttccaagtctccaccccattgacgtcaatgggagtttgttttggcaccaaaatcaacgggactttccaaaatgtcgtaacaactccgccccattgacgcaaatgggggtaggc |
| | gtgtacggtgggaggtctatataagcagagctggtttagtgaaccgtcagatccgctagcgCTACCGGACTCAGATCGCCACCATGCCGCCTAAG |
| | AAGAAGCAGAAGCTGGAACGGCTGAAGAAACTGGACAAGCCCACACTGCACACCTGTAACAAGACCAGCTT |
| | CGCCAAGGCCTTCCTGCCTAACGAGACATACCGGCAGCGGCTGCTGGACTATATCGCCATCATTCACCAGCT |
| | GGCCGACCACGCCTCTCACGCCCTGAAGTTTTACATCCTGAGCACCTCCACCAGCAGCTTCCCTGTGGTGCAC |
| | GAGGATACCATCGAGGCCATCCTGTACCTGCTGAACAAGGGCGAAGCCTGGCATCCCAGAAAAGAGGCCAA |
| | GAAGGCCTGGCGGGATTGCCTGCTGCCTTACGTGCAGAGATACTGCCAGATCGTGGGCTTCATTCACCCCAA |
| | CCTGAGAGGCGAGCAGCAGAGCATCAACTACCTGACCGTGTCCATGATGACCAACCTGAAAGTGAACGTGC |
| | AAGAGCACTTCATGCAGATGCTGCTGCGGTACATCAATCTGCGCTTCGACGTGAAGGGCCAGAAGCAGAGAC |
| | TGCCTCCTAAGAGCGACGCCCGCAAGGCCTTTTTCACCCGGCTGAGATACCTGAAGTCCGTGTTCCTGTTCGA |
| | CGTGGTGCCCGAGCTGGAATTCCTGGACGATCTGACCCCTCTGGAAAGCGAGGTGCTGGAAGAGATCTGGTC |
| | CCTGGACCTGCCTTTTCTGCCCAACGATCCTCTGGCCTACGCCATCGTGGCCGATCCTATGAGCTTCTTCCCAG |
| | CCTACTGCAAGCTGAGCGGCCTGTACGAGCAGTACGGCTTCCAGCGGTTTAGCGCCATTCCTCTGCGGAGAA |
| | GCCTGATCCAGTCTCACGTGCGGATCGACACCATCATCCTGTATCAGCACATCCTGTGCATCACCAGACGGG |
| | ACGCCGAGACAGTGGAAAAGGACGACCTGTGGATGAGAGTGTGCAACCTGTGCACCAAAGCCTTCCGGTCC |
| | AGATGCGGCATGCACTTCGAGGGCAGCATCACAACAGATGGCGCCAGCGTGTCCGTGTACCTGAAACACCCT |
| | GAGGCCGATAAGTACGGCAAGAGAGGCGCCAGAAAGTCCGCCAATACTGTGGCCGCCGAAGTGAAGGCCCT |
| | GTACGTGGAAAACAACCTGCCTGCCTGTAGAGCCGCCGAGAACGTGGTGGTCATCGACCCCAACAAGCGGG |
| | ATATCCTGTACTGCCAGGACAGCAACGGCACCACCTTCAGATACACCGCCAACCAGAGAGCCGTGGAAACCG |
| | GCAGCAGAAGATTCGCCAAGCGGCGGGAAGCCATGAAGGAAGAAGCCGGCGTTGACCTGATCGAGAGCAGA |
| | ATCCCTAGCCACAAGACCATGAACCTGATGGACTTCACCAGATACCTGCTCGTGCGGAGAGCCGACTGGGAC |
| | AGACGGAAAGAGTTCTACTCTCACCCCGCTCACACCCGGTGGAAGTGGCACAGCTTCATCAACCGGCAGAAG |
| | TCCGAGAGCGACCTGATCAGCAACATGCGGAACAAATACGGCGAGAACTTCACCGTGGTCATGGGCGATTG |
| | GAGCGACGCTGGAAGAACCGCCAGATTCCAGACCAGCAGCAAGACCAAAGGCTGGCGGACCCTGTTCAAGC |
| | GGAACCGGATCGATTGCTTCCTGCTGGACGAGTACAAGACCTCCAGCGTGTGCCCTAGATGCAGCAGCAGCG |
| | AGTTCGTGGAAAAGAAGTTCAAGACCCGGCCTCACAGCAGACCCTGGCGAAGAAGAGAGGGCAAGATCGAG |
| | AAGGTGCACGGCCTGCTGGGCTGCACCAATCCTAATTGTCTGCAGCAGGCCTGGACCAGCGGCATGAGATAC |
| | TGGAACCGGGACATGCTGAGCACATGCAACATGCTGCTGATCGTGCGGTCCATGCTGGATGGCCATGGCAGA |
| | CCTGAGGTGTTCTCTAGATCTGTGCCTGCCGTGGCCGGAGGATCTGGCGGAGGCGGCTCTGGCGGCGGTGGA |
| | AGCGGAGGACCTAAGAAGAAGAGAAAAGTCTACCCCTACGACGTGCCAGACTACGCCTgactagcataaccccttgggg |
| | cgcactcctcaggtgcaggctgcctatcagaaggtggtggctggtgtggccaatgccctggctcacaaataccactgagatctttttccctctgccaaaaattatggggacatcatga |
| | agccccttgagcatctgacttctggctaataaaggaaatttattttcattgcaatagtgtgttggaattttttgtgtctctcactcggaaggacatatgggagggcaaatcatttaaaacatc |
| | agaatgagtatttggtttagagtttggcaacatatgcccatatgctggctgccatgaacaaaggttggctataaagaggtcatcagtatatgaaacagccccctgctgtccattccttatt |
| | ccatagaaaagccttgacttgaggttagattttttttatattttgttttgtgttatttttttctttaacatccctaaaattttccttacatgttttactagccagatttttcctcctctcctgactactccca |
| | gtcatagctgtccctcttctcttatggagatccctcgacctgcagcccaagcttggcgtaatcatggtcatagctgtttcctgtgtgaaattgttatccgctcacaattccacacaacatac |
| | gagccggaagcataaagtgtaaagcctggggtgcctaatgagtgagctaactcacattaattgcgttgcgctcactgcccgctttccagtcgggaaacctgtcgtgccagcggatcc |
| | gcatctcaattagtcagcaaccatagtcccgcccctaactccgcccatcccgcccctaactccgcccagttccgcccattctccgccccatggctgactaattttttttatttatgcagag |
| | gccgaggccgcctcggcctctgagctattccagaagtagtgaggaggcttttttggaggcctaggcttttgcaaaaagctaacttgtttattgcagcttataatggttacaaataaagca |
| | atagcatcacaaatttcacaaataaagcatttttttcactgcattctagttgtggtttgtccaaactcatcaatgtatcttatcatgtctggatccgctgcattaatgaatcggccaacgcgcg |
| | gggagaggcggtttgcgtattgggcgctcttccgcttcctcgctcactgactcgctgcgctcggtcgttcggctgcggcgagcggtatcagctcactcaaaggcggtaatacggttat |
| | ccacagaatcaggggataacgcaggaaagaacatgtgagcaaaaggccagcaaaaggccaggaaccgtaaaaaggccgcgttgctggcgtttttccataggctccgcccccct |
| | gacgagcatcacaaaaatcgacgctcaagtcagaggtggcgaaacccgacaggactataaagataccaggcgtttccccctggaagctccctcgtgcgctctcctgttccgaccct |
| | gccgcttaccggatacctgtccgcctttctcccttcgggaagcgtggcgctttctcatagctcacgctgtaggtatctcagttcggtgtaggtcgttcgctccaagctgggctgtgtgca |
| | cgaaccccccgttcagcccgaccgctgcgccttatccggtaactatcgtcttgagtccaacccggtaagacacgacttatcgccactggcagcagccactggtaacaggattagca |
| | gagcgaggtatgtaggggtgctacagagttcttgaagtggtggcctaactacggctacactagaagaacagtatttggtatctgcgctctgctgaagccagttaccttcggaaaaag |
| | agttggtagctcttgatccggcaaacaaaccaccgctggtagcggtggtttttttgtttgcaagcagcagattacgcgcagaaaaaaaggatctcaagaagatcctttgatcttttctac |
| | ggggtctgacgctcagtggaacgaaaactcacgttaagggattttggtcatgagattatcaaaaaggatcttcacctagatccttttaaattaaaaatgaagttttaaatcaatctaaagta |
| | tatatgagtaaacttggtctgacagttaccaatgcttaatcagtgaggcacctatctcagcgatctgtctatttcgttcatccatagttgcctgactccccgtcgtgtagataactacgatac |
| | gggagggcttaccatctggccccagtgctgcaatgataccgcgagacccacgctcaccggctccagatttatcagcaataaaccagccagccggaagggccgagcgcagaagt |
| | ggtcctgcaactttatccgcctccatccagtctattaattgttgccgggaagctagagtaagtagttcgccagttaatagtttgcgcaacgttgttgccattgctacaggcatcgtggtgtc |
| | acgctcgtcgtttggtatggcttcattcagctccggttcccaacgatcaaggcgagttacatgatcccccatgttgtgcaaaaaagcggttagctccttcggtcctccgatcgttgtcag |
| | aagtaagttggccgcagtgttatcactcatggttatggcagcactgcataattctcttactgtcatgccatccgtaagatgcttttctgtgactggtgagtactcaaccaagtcattctgaga |
| | atagtgtatgcggcgaccgagttgctcttgcccggcgtcaatacgggataataccgcgccacatagcagaactttaaaagtgctcatcattggaaaacgttcttcggggcgaaaactc |
| | tcaaggatcttaccgctgttgagatccagttcgatgtaacccactcgtgcacccaactgatcttcagcatcttttactttcaccagcgtttctgggtgagcaaaaacaggaaggcaaaat |
| | gccgcaaaaaagggaataagggcgacacggaaatgttgaatactcatactcttcctttttcaatattattgaagcatttatcagggttattgtctcatgagcggatacatatttgaatgtattt |
| | agaaaaataaacaaataggggttccgcgcacatttccccgaaaagtgccacctgggtcgacattgattattgactagtaatagtaatcaattacggggtcattagttcatagcccatata |
| | tggagttccg (SEQ ID NO: 582) |
| pMJ162 | AATTCTGTGGAATGTGTGTCAGTTAGGGTGTGGAAAGTCCCCAGGCTCCCCAGCAGGCAGAAGTATGCAAAG |
| pU6- | CATGCATCTCAATTAGTCAGCAACCAGGTGTGGAAAGTCCCCAGGCTCCCCAGCAGGCAGAAGTATGCAAAG |
| ID16- | CATGCATCTCAATTAGTCAGCAACCATAGTCCCGCCCCTAACTCCGCCCATCCCGCCCCTAACTCCGCCCAGT |
| empty | TCCGCCCATTCTCCGCCCCATGGCTGACTAATTTTTTTTATTTATGCAGAGGCCGAGGCCGCCTCTGCCTCTGA |
| | GCTATTCCAGAAGTAGTGAGGAGGCTTTTTTGGAGGCCTAGGCTTTTGCAAAAAGCTAACTTGTTTATTGCAG |
| | CTTATAATGGTTACAAATAAAGCAATAGCATCACAAATTTCACAAATAAAGCATTTTTTTCACTGCATTCTAG |
| | TTGTGGTTTGTCCAAACTCATCAATGTATCTTATCATGTCTGTATACCGTCGACCTCTAGCTAGAGCTTGGCGT |
| | AATCATGGTCATAGCTGTTTCCTGTGTGAAATTGTTATCCGCTCACAATTCCACACAACATACGAGCCGGAAG |
| | CATAAAGTGTAAAGCCTGGGGTGCCTAATGAGTGAGCTAACTCACATTAATTGCGTTGCGCTCACTGCCCGCT |
| | TTCCAGTCGGGAAACCTGTCGTGCCAGCTGCATTAATGAATCGGCCAACGCGCGGGGAGAGGCGGTTTGCGT |
| | ATTGGGCGCTCTTCCGCTTCCTCGCTCACTGACTCGCTGCGCTCGGTCGTTCGGCTGCGGCGAGCGGTATCAG |
| | CTCACTCAAAGGCGGTAATACGGTTATCCACAGAATCAGGGGATAACGCAGGAAAGAACATGTGAGCAAAA |
| | GGCCAGCAAAAGGCCAGGAACCGTAAAAAGGCCGCGTTGCTGGCGTTTTTCCATAGGCTCCGCCCCCCTGAC |
| | GAGCATCACAAAAATCGACGCTCAAGTCAGAGGTGGCGAAACCCGACAGGACTATAAAGATACCAGGCGTT |
| | TCCCCCTGGAAGCTCCCTCGTGCGCTCTCCTGTTCCGACCCTGCCGCTTACCGGATACCTGTCCGCCTTTCTCC |
| | CTTCGGGAAGCGTGGCGCTTTCTCATAGCTCACGCTGTAGGTATCTCAGTTCGGTGTAGGTCGTTCGCTCCAA |
| | GCTGGGCTGTGTGCACGAACCCCCCGTTCAGCCCGACCGCTGCGCCTTATCCGGTAACTATCGTCTTGAGTCC |
| | AACCCGGTAAGACACGACTTATCGCCACTGGCAGCAGCCACTGGTAACAGGATTAGCAGAGCGAGGTATGT |
| | AGGCGGTGCTACAGAGTTCTTGAAGTGGTGGCCTAACTACGGCTACACTAGAAGAACAGTATTTGGTATCTG |
| | CGCTCTGCTGAAGCCAGTTACCTTCGGAAAAAGAGTTGGTAGCTCTTGATCCGGCAAACAAACCACCGCTGG |
| | TAGCGGTTTTTTTGTTTGCAAGCAGCAGATTACGCGCAGAAAAAAAGGATCTCAAGAAGATCCTTTGATCTTT |
| | TCTACGGGGTCTGACGCTCAGTGGAACGAAAACTCACGTTAAGGGATTTTGGTCATGAGATTATCAAAAAGG |
| | ATCTTCACCTAGATCCTTTTAAATTAAAAATGAAGTTTTAAATCAATCTAAAGTATATATGAGTAAACTTGGT |
| | CTGACAGTTACCAATGCTTAATCAGTGAGGCACCTATCTCAGCGATCTGTCTATTTCGTTCATCCATAGTTGC |
| | CTGACTCCCCGTCGTGTAGATAACTACGATACGGGAGGGCTTACCATCTGGCCCCAGTGCTGCAATGATACC |
| | GCGAGACCCACGCTCACCGGCTCCAGATTTATCAGCAATAAACCAGCCAGCCGGAAGGGCCGAGCGCAGAA |
| | GTGGTCCTGCAACTTTATCCGCCTCCATCCAGTCTATTAATTGTTGCCGGGAAGCTAGAGTAAGTAGTTCGCC |
| | AGTTAATAGTTTGCGCAACGTTGTTGCCATTGCTACAGGCATCGTGGTGTCACGCTCGTCGTTTGGTATGGCT |
| | TCATTCAGCTCCGGTTCCCAACGATCAAGGCGAGTTACATGATCCCCCATGTTGTGCAAAAAAGCGGTTAGCT |
| | CCTTCGGTCCTCCGATCGTTGTCAGAAGTAAGTTGGCCGCAGTGTTATCACTCATGGTTATGGCAGCACTGCA |
| | TAATTCTCTTACTGTCATGCCATCCGTAAGATGCTTTTCTGTGACTGGTGAGTACTCAACCAAGTCATTCTGAG |
| | AATAGTGTATGCGGCGACCGAGTTGCTCTTGCCCGGCGTCAATACGGGATAATACCGCGCCACATAGCAGAA |
| | CTTTAAAAGTGCTCATCATTGGAAAACGTTCTTCGGGGCGAAAACTCTCAAGGATCTTACCGCTGTTGAGATC |
| | CAGTTCGATGTAACCCACTCGTGCACCCAACTGATCTTCAGCATCTTTTACTTTCACCAGCGTTTCTGGGTGA |
| | GCAAAAACAGGAAGGCAAAATGCCGCAAAAAAGGGAATAAGGGCGACACGGAAATGTTGAATACTCATACT |
| | CTTCCTTTTTCAATATTATTGAAGCATTTATCAGGGTTATTGTCTCATGAGCGGATACATATTTGAATGTATTT |
| | AGAAAAATAAACAAATAGGGGTTCCGCGCACATTTCCCCGAAAAGTGCCACCTgagggcctatttcccatgattccttcatatttg |
| | catatacgatacaaggctgttagagagataattagaattaatttgactgtaaacacaaagatattagtacaaaatacgtgacgtagaaagtaataatttcttgggtagtttgcagttttaaaa |
| | ttatgttttaaaatggactatcatatgcttaccgtaacttgaaagtatttcgatttcttggctttatatatcttgtggaaaggacgttttccgagccggttgtcgcgcggttcaatccctggtgc |
| | gggtgctagtgccaatacccaccggctccgcactaCAgtcttcTCTgaagacCATTTTTT (SEQ ID NO: 583) |
| pMJ168 | AATTCTGTGGAATGTGTGTCAGTTAGGGTGTGGAAAGTCCCCAGGCTCCCCAGCAGGCAGAAGTATGCAAAG |
| pU6- | CATGCATCTCAATTAGTCAGCAACCAGGTGTGGAAAGTCCCCAGGCTCCCCAGCAGGCAGAAGTATGCAAAG |
| HDV- | CATGCATCTCAATTAGTCAGCAACCATAGTCCCGCCCCTAACTCCGCCCATCCCGCCCCTAACTCCGCCCAGT |
| ID16- | TCCGCCCATTCTCCGCCCCATGGCTGACTAATTTTTTTTATTTATGCAGAGGCCGAGGCCGCCTCTGCCTCTGA |
| empty | GCTATTCCAGAAGTAGTGAGGAGGCTTTTTTGGAGGCCTAGGCTTTTGCAAAAAGCTAACTTGTTTATTGCAG |
| | CTTATAATGGTTACAAATAAAGCAATAGCATCACAAATTTCACAAATAAAGCATTTTTTTCACTGCATTCTAG |
| | TTGTGGTTTGTCCAAACTCATCAATGTATCTTATCATGTCTGTATACCGTCGACCTCTAGCTAGAGCTTGGCGT |
| | AATCATGGTCATAGCTGTTTCCTGTGTGAAATTGTTATCCGCTCACAATTCCACACAACATACGAGCCGGAAG |
| | CATAAAGTGTAAAGCCTGGGGTGCCTAATGAGTGAGCTAACTCACATTAATTGCGTTGCGCTCACTGCCCGCT |
| | TTCCAGTCGGGAAACCTGTCGTGCCAGCTGCATTAATGAATCGGCCAACGCGCGGGGAGAGGCGGTTTGCGT |
| | ATTGGGCGCTCTTCCGCTTCCTCGCTCACTGACTCGCTGCGCTCGGTCGTTCGGCTGCGGCGAGCGGTATCAG |
| | CTCACTCAAAGGCGGTAATACGGTTATCCACAGAATCAGGGGATAACGCAGGAAAGAACATGTGAGCAAAA |
| | GGCCAGCAAAAGGCCAGGAACCGTAAAAAGGCCGCGTTGCTGGCGTTTTTCCATAGGCTCCGCCCCCCTGAC |
| | GAGCATCACAAAAATCGACGCTCAAGTCAGAGGTGGCGAAACCCGACAGGACTATAAAGATACCAGGCGTT |
| | TCCCCCTGGAAGCTCCCTCGTGCGCTCTCCTGTTCCGACCCTGCCGCTTACCGGATACCTGTCCGCCTTTCTCC |
| | CTTCGGGAAGCGTGGCGCTTTCTCATAGCTCACGCTGTAGGTATCTCAGTTCGGTGTAGGTCGTTCGCTCCAA |
| | GCTGGGCTGTGTGCACGAACCCCCCGTTCAGCCCGACCGCTGCGCCTTATCCGGTAACTATCGTCTTGAGTCC |
| | AACCCGGTAAGACACGACTTATCGCCACTGGCAGCAGCCACTGGTAACAGGATTAGCAGAGCGAGGTATGT |
| | AGGCGGTGCTACAGAGTTCTTGAAGTGGTGGCCTAACTACGGCTACACTAGAAGAACAGTATTTGGTATCTG |
| | CGCTCTGCTGAAGCCAGTTACCTTCGGAAAAAGAGTTGGTAGCTCTTGATCCGGCAAACAAACCACCGCTGG |
| | TAGCGGTTTTTTTGTTTGCAAGCAGCAGATTACGCGCAGAAAAAAAGGATCTCAAGAAGATCCTTTGATCTTT |
| | TCTACGGGGTCTGACGCTCAGTGGAACGAAAACTCACGTTAAGGGATTTTGGTCATGAGATTATCAAAAAGG |
| | ATCTTCACCTAGATCCTTTTAAATTAAAAATGAAGTTTTAAATCAATCTAAAGTATATATGAGTAAACTTGGT |
| | CTGACAGTTACCAATGCTTAATCAGTGAGGCACCTATCTCAGCGATCTGTCTATTTCGTTCATCCATAGTTGC |
| | CTGACTCCCCGTCGTGTAGATAACTACGATACGGGAGGGCTTACCATCTGGCCCCAGTGCTGCAATGATACC |
| | GCGAGACCCACGCTCACCGGCTCCAGATTTATCAGCAATAAACCAGCCAGCCGGAAGGGCCGAGCGCAGAA |
| | GTGGTCCTGCAACTTTATCCGCCTCCATCCAGTCTATTAATTGTTGCCGGGAAGCTAGAGTAAGTAGTTCGCC |
| | AGTTAATAGTTTGCGCAACGTTGTTGCCATTGCTACAGGCATCGTGGTGTCACGCTCGTCGTTTGGTATGGCT |
| | TCATTCAGCTCCGGTTCCCAACGATCAAGGCGAGTTACATGATCCCCCATGTTGTGCAAAAAAGCGGTTAGCT |
| | CCTTCGGTCCTCCGATCGTTGTCAGAAGTAAGTTGGCCGCAGTGTTATCACTCATGGTTATGGCAGCACTGCA |
| | TAATTCTCTTACTGTCATGCCATCCGTAAGATGCTTTTCTGTGACTGGTGAGTACTCAACCAAGTCATTCTGAG |
| | AATAGTGTATGCGGCGACCGAGTTGCTCTTGCCCGGCGTCAATACGGGATAATACCGCGCCACATAGCAGAA |
| | CTTTAAAAGTGCTCATCATTGGAAAACGTTCTTCGGGGCGAAAACTCTCAAGGATCTTACCGCTGTTGAGATC |
| | CAGTTCGATGTAACCCACTCGTGCACCCAACTGATCTTCAGCATCTTTTACTTTCACCAGCGTTTCTGGGTGA |
| | GCAAAAACAGGAAGGCAAAATGCCGCAAAAAAGGGAATAAGGGCGACACGGAAATGTTGAATACTCATACT |
| | CTTCCTTTTTCAATATTATTGAAGCATTTATCAGGGTTATTGTCTCATGAGCGGATACATATTTGAATGTATTT |
| | AGAAAAATAAACAAATAGGGGTTCCGCGCACATTTCCCCGAAAAGTGCCACCTgagggcctatttcccatgattccttcatatttg |
| | catatacgatacaaggctgttagagagataattagaattaatttgactgtaaacacaaagatattagtacaaaatacgtgacgtagaaagtaataatttcttgggtagtttgcagttttaaaa |
| | ttatgttttaaaatggactatcatatgcttaccgtaacttgaaagtatttcgatttcttggctttatatatcttgtggaaaggacgttttccgagccggttgtcgcgcggttcaatccctggtgc |
| | gggtgctagtgccaatacccaccggctccgcactaCAgtcttcTCTgaagacCAggccggcatggtcccagcctcctcgctggcgccggctgggcaacatgcttcggcatg |
| | gcgaatgggacTTTTTT (SEQ ID NO: 584) |
| pMJ169 | AATTCTGTGGAATGTGTGTCAGTTAGGGTGTGGAAAGTCCCCAGGCTCCCCAGCAGGCAGAAGTATGCAAAG |
| pU6- | CATGCATCTCAATTAGTCAGCAACCAGGTGTGGAAAGTCCCCAGGCTCCCCAGCAGGCAGAAGTATGCAAAG |
| ID16_RNA1- | CATGCATCTCAATTAGTCAGCAACCATAGTCCCGCCCCTAACTCCGCCCATCCCGCCCCTAACTCCGCCCAGT |
| empty | TCCGCCCATTCTCCGCCCCATGGCTGACTAATTTTTTTTATTTATGCAGAGGCCGAGGCCGCCTCTGCCTCTGA |
| | GCTATTCCAGAAGTAGTGAGGAGGCTTTTTTGGAGGCCTAGGCTTTTGCAAAAAGCTAACTTGTTTATTGCAG |
| | CTTATAATGGTTACAAATAAAGCAATAGCATCACAAATTTCACAAATAAAGCATTTTTTTCACTGCATTCTAG |
| | TTGTGGTTTGTCCAAACTCATCAATGTATCTTATCATGTCTGTATACCGTCGACCTCTAGCTAGAGCTTGGCGT |
| | AATCATGGTCATAGCTGTTTCCTGTGTGAAATTGTTATCCGCTCACAATTCCACACAACATACGAGCCGGAAG |
| | CATAAAGTGTAAAGCCTGGGGTGCCTAATGAGTGAGCTAACTCACATTAATTGCGTTGCGCTCACTGCCCGCT |
| | TTCCAGTCGGGAAACCTGTCGTGCCAGCTGCATTAATGAATCGGCCAACGCGCGGGGAGAGGCGGTTTGCGT |
| | ATTGGGCGCTCTTCCGCTTCCTCGCTCACTGACTCGCTGCGCTCGGTCGTTCGGCTGCGGCGAGCGGTATCAG |
| | CTCACTCAAAGGCGGTAATACGGTTATCCACAGAATCAGGGGATAACGCAGGAAAGAACATGTGAGCAAAA |
| | GGCCAGCAAAAGGCCAGGAACCGTAAAAAGGCCGCGTTGCTGGCGTTTTTCCATAGGCTCCGCCCCCCTGAC |
| | GAGCATCACAAAAATCGACGCTCAAGTCAGAGGTGGCGAAACCCGACAGGACTATAAAGATACCAGGCGTT |
| | TCCCCCTGGAAGCTCCCTCGTGCGCTCTCCTGTTCCGACCCTGCCGCTTACCGGATACCTGTCCGCCTTTCTCC |
| | CTTCGGGAAGCGTGGCGCTTTCTCATAGCTCACGCTGTAGGTATCTCAGTTCGGTGTAGGTCGTTCGCTCCAA |
| | GCTGGGCTGTGTGCACGAACCCCCCGTTCAGCCCGACCGCTGCGCCTTATCCGGTAACTATCGTCTTGAGTCC |
| | AACCCGGTAAGACACGACTTATCGCCACTGGCAGCAGCCACTGGTAACAGGATTAGCAGAGCGAGGTATGT |
| | AGGCGGTGCTACAGAGTTCTTGAAGTGGTGGCCTAACTACGGCTACACTAGAAGAACAGTATTTGGTATCTG |
| | CGCTCTGCTGAAGCCAGTTACCTTCGGAAAAAGAGTTGGTAGCTCTTGATCCGGCAAACAAACCACCGCTGG |
| | TAGCGGTTTTTTTGTTTGCAAGCAGCAGATTACGCGCAGAAAAAAAGGATCTCAAGAAGATCCTTTGATCTTT |
| | TCTACGGGGTCTGACGCTCAGTGGAACGAAAACTCACGTTAAGGGATTTTGGTCATGAGATTATCAAAAAGG |
| | ATCTTCACCTAGATCCTTTTAAATTAAAAATGAAGTTTTAAATCAATCTAAAGTATATATGAGTAAACTTGGT |
| | CTGACAGTTACCAATGCTTAATCAGTGAGGCACCTATCTCAGCGATCTGTCTATTTCGTTCATCCATAGTTGC |
| | CTGACTCCCCGTCGTGTAGATAACTACGATACGGGAGGGCTTACCATCTGGCCCCAGTGCTGCAATGATACC |
| | GCGAGACCCACGCTCACCGGCTCCAGATTTATCAGCAATAAACCAGCCAGCCGGAAGGGCCGAGCGCAGAA |
| | GTGGTCCTGCAACTTTATCCGCCTCCATCCAGTCTATTAATTGTTGCCGGGAAGCTAGAGTAAGTAGTTCGCC |
| | AGTTAATAGTTTGCGCAACGTTGTTGCCATTGCTACAGGCATCGTGGTGTCACGCTCGTCGTTTGGTATGGCT |
| | TCATTCAGCTCCGGTTCCCAACGATCAAGGCGAGTTACATGATCCCCCATGTTGTGCAAAAAAGCGGTTAGCT |
| | CCTTCGGTCCTCCGATCGTTGTCAGAAGTAAGTTGGCCGCAGTGTTATCACTCATGGTTATGGCAGCACTGCA |
| | TAATTCTCTTACTGTCATGCCATCCGTAAGATGCTTTTCTGTGACTGGTGAGTACTCAACCAAGTCATTCTGAG |
| | AATAGTGTATGCGGCGACCGAGTTGCTCTTGCCCGGCGTCAATACGGGATAATACCGCGCCACATAGCAGAA |
| | CTTTAAAAGTGCTCATCATTGGAAAACGTTCTTCGGGGCGAAAACTCTCAAGGATCTTACCGCTGTTGAGATC |
| | CAGTTCGATGTAACCCACTCGTGCACCCAACTGATCTTCAGCATCTTTTACTTTCACCAGCGTTTCTGGGTGA |
| | GCAAAAACAGGAAGGCAAAATGCCGCAAAAAAGGGAATAAGGGCGACACGGAAATGTTGAATACTCATACT |
| | CTTCCTTTTTCAATATTATTGAAGCATTTATCAGGGTTATTGTCTCATGAGCGGATACATATTTGAATGTATTT |
| | AGAAAAATAAACAAATAGGGGTTCCGCGCACATTTCCCCGAAAAGTGCCACCTgagggcctatttcccatgattccttcatatttg |
| | catatacgatacaaggctgttagagagataattagaattaatttgactgtaaacacaaagatattagtacaaaatacgtgacgtagaaagtaataatttcttgggtagtttgcagttttaaaa |
| | ttatgttttaaaatggactatcatatgcttaccgtaacttgaaagtatttcgatttcttggctttatatatcttgtggaaaggacagatcaatgttggatggacacggtagaccagaagtgttc |
| | agcaggagtgttccagccgtagcgtagaacgtagattggttagattaggttttccgagccggttgtcgcgcggttcaatccctggtgcgggtgctagtgccaatacccaccggctcc |
| | gcactaCAgtcttcTCTgaagacCATTTTTT (SEQ ID NO: 585) |
| pMJ170 | AATTCTGTGGAATGTGTGTCAGTTAGGGTGTGGAAAGTCCCCAGGCTCCCCAGCAGGCAGAAGTATGCAAAG |
| pU6- | CATGCATCTCAATTAGTCAGCAACCAGGTGTGGAAAGTCCCCAGGCTCCCCAGCAGGCAGAAGTATGCAAAG |
| ID16_RNA2- | CATGCATCTCAATTAGTCAGCAACCATAGTCCCGCCCCTAACTCCGCCCATCCCGCCCCTAACTCCGCCCAGT |
| empty | TCCGCCCATTCTCCGCCCCATGGCTGACTAATTTTTTTTATTTATGCAGAGGCCGAGGCCGCCTCTGCCTCTGA |
| | GCTATTCCAGAAGTAGTGAGGAGGCTTTTTTGGAGGCCTAGGCTTTTGCAAAAAGCTAACTTGTTTATTGCAG |
| | CTTATAATGGTTACAAATAAAGCAATAGCATCACAAATTTCACAAATAAAGCATTTTTTTCACTGCATTCTAG |
| | TTGTGGTTTGTCCAAACTCATCAATGTATCTTATCATGTCTGTATACCGTCGACCTCTAGCTAGAGCTTGGCGT |
| | AATCATGGTCATAGCTGTTTCCTGTGTGAAATTGTTATCCGCTCACAATTCCACACAACATACGAGCCGGAAG |
| | CATAAAGTGTAAAGCCTGGGGTGCCTAATGAGTGAGCTAACTCACATTAATTGCGTTGCGCTCACTGCCCGCT |
| | TTCCAGTCGGGAAACCTGTCGTGCCAGCTGCATTAATGAATCGGCCAACGCGCGGGGAGAGGCGGTTTGCGT |
| | ATTGGGCGCTCTTCCGCTTCCTCGCTCACTGACTCGCTGCGCTCGGTCGTTCGGCTGCGGCGAGCGGTATCAG |
| | CTCACTCAAAGGCGGTAATACGGTTATCCACAGAATCAGGGGATAACGCAGGAAAGAACATGTGAGCAAAA |
| | GGCCAGCAAAAGGCCAGGAACCGTAAAAAGGCCGCGTTGCTGGCGTTTTTCCATAGGCTCCGCCCCCCTGAC |
| | GAGCATCACAAAAATCGACGCTCAAGTCAGAGGTGGCGAAACCCGACAGGACTATAAAGATACCAGGCGTT |
| | TCCCCCTGGAAGCTCCCTCGTGCGCTCTCCTGTTCCGACCCTGCCGCTTACCGGATACCTGTCCGCCTTTCTCC |
| | CTTCGGGAAGCGTGGCGCTTTCTCATAGCTCACGCTGTAGGTATCTCAGTTCGGTGTAGGTCGTTCGCTCCAA |
| | GCTGGGCTGTGTGCACGAACCCCCCGTTCAGCCCGACCGCTGCGCCTTATCCGGTAACTATCGTCTTGAGTCC |
| | AACCCGGTAAGACACGACTTATCGCCACTGGCAGCAGCCACTGGTAACAGGATTAGCAGAGCGAGGTATGT |
| | AGGCGGTGCTACAGAGTTCTTGAAGTGGTGGCCTAACTACGGCTACACTAGAAGAACAGTATTTGGTATCTG |
| | CGCTCTGCTGAAGCCAGTTACCTTCGGAAAAAGAGTTGGTAGCTCTTGATCCGGCAAACAAACCACCGCTGG |
| | TAGCGGTTTTTTTGTTTGCAAGCAGCAGATTACGCGCAGAAAAAAAGGATCTCAAGAAGATCCTTTGATCTTT |
| | TCTACGGGGTCTGACGCTCAGTGGAACGAAAACTCACGTTAAGGGATTTTGGTCATGAGATTATCAAAAAGG |
| | ATCTTCACCTAGATCCTTTTAAATTAAAAATGAAGTTTTAAATCAATCTAAAGTATATATGAGTAAACTTGGT |
| | CTGACAGTTACCAATGCTTAATCAGTGAGGCACCTATCTCAGCGATCTGTCTATTTCGTTCATCCATAGTTGC |
| | CTGACTCCCCGTCGTGTAGATAACTACGATACGGGAGGGCTTACCATCTGGCCCCAGTGCTGCAATGATACC |
| | GCGAGACCCACGCTCACCGGCTCCAGATTTATCAGCAATAAACCAGCCAGCCGGAAGGGCCGAGCGCAGAA |
| | GTGGTCCTGCAACTTTATCCGCCTCCATCCAGTCTATTAATTGTTGCCGGGAAGCTAGAGTAAGTAGTTCGCC |
| | AGTTAATAGTTTGCGCAACGTTGTTGCCATTGCTACAGGCATCGTGGTGTCACGCTCGTCGTTTGGTATGGCT |
| | TCATTCAGCTCCGGTTCCCAACGATCAAGGCGAGTTACATGATCCCCCATGTTGTGCAAAAAAGCGGTTAGCT |
| | CCTTCGGTCCTCCGATCGTTGTCAGAAGTAAGTTGGCCGCAGTGTTATCACTCATGGTTATGGCAGCACTGCA |
| | TAATTCTCTTACTGTCATGCCATCCGTAAGATGCTTTTCTGTGACTGGTGAGTACTCAACCAAGTCATTCTGAG |
| | AATAGTGTATGCGGCGACCGAGTTGCTCTTGCCCGGCGTCAATACGGGATAATACCGCGCCACATAGCAGAA |
| | CTTTAAAAGTGCTCATCATTGGAAAACGTTCTTCGGGGCGAAAACTCTCAAGGATCTTACCGCTGTTGAGATC |
| | CAGTTCGATGTAACCCACTCGTGCACCCAACTGATCTTCAGCATCTTTTACTTTCACCAGCGTTTCTGGGTGA |
| | GCAAAAACAGGAAGGCAAAATGCCGCAAAAAAGGGAATAAGGGCGACACGGAAATGTTGAATACTCATACT |
| | CTTCCTTTTTCAATATTATTGAAGCATTTATCAGGGTTATTGTCTCATGAGCGGATACATATTTGAATGTATTT |
| | AGAAAAATAAACAAATAGGGGTTCCGCGCACATTTCCCCGAAAAGTGCCACCTgagggcctatttcccatgattccttcatatttg |
| | catatacgatacaaggctgttagagagataattagaattaatttgactgtaaacacaaagatattagtacaaaatacgtgacgtagaaagtaataatttcttgggtagtttgcagttttaaaa |
| | ttatgttttaaaatggactatcatatgcttaccgtaacttgaaagtatttcgatttcttggctttatatatcttgtggaaaggaccgagatatgctgtcaacctgcaacatgctattgattgtgag |
| | atcaatgttggatggacacggtagaccagaagtgttcagcaggagtgttccagccgtagcgtagaacgtagattggttagattaggttttccgagccggttgtcgcgcggttcaatcc |
| | ctggtgcgggtgctagtgccaatacccaccggctccgcactaCAgtcttcTCTgaagacCATTTTTT (SEQ ID NO: 586) |
| pMJ171 | AATTCTGTGGAATGTGTGTCAGTTAGGGTGTGGAAAGTCCCCAGGCTCCCCAGCAGGCAGAAGTATGCAAAG |
| pU6- | CATGCATCTCAATTAGTCAGCAACCAGGTGTGGAAAGTCCCCAGGCTCCCCAGCAGGCAGAAGTATGCAAAG |
| ID16_RNA3- | CATGCATCTCAATTAGTCAGCAACCATAGTCCCGCCCCTAACTCCGCCCATCCCGCCCCTAACTCCGCCCAGT |
| empty | TCCGCCCATTCTCCGCCCCATGGCTGACTAATTTTTTTTATTTATGCAGAGGCCGAGGCCGCCTCTGCCTCTGA |
| | GCTATTCCAGAAGTAGTGAGGAGGCTTTTTTGGAGGCCTAGGCTTTTGCAAAAAGCTAACTTGTTTATTGCAG |
| | CTTATAATGGTTACAAATAAAGCAATAGCATCACAAATTTCACAAATAAAGCATTTTTTTCACTGCATTCTAG |
| | TTGTGGTTTGTCCAAACTCATCAATGTATCTTATCATGTCTGTATACCGTCGACCTCTAGCTAGAGCTTGGCGT |
| | AATCATGGTCATAGCTGTTTCCTGTGTGAAATTGTTATCCGCTCACAATTCCACACAACATACGAGCCGGAAG |
| | CATAAAGTGTAAAGCCTGGGGTGCCTAATGAGTGAGCTAACTCACATTAATTGCGTTGCGCTCACTGCCCGCT |
| | TTCCAGTCGGGAAACCTGTCGTGCCAGCTGCATTAATGAATCGGCCAACGCGCGGGGAGAGGCGGTTTGCGT |
| | ATTGGGCGCTCTTCCGCTTCCTCGCTCACTGACTCGCTGCGCTCGGTCGTTCGGCTGCGGCGAGCGGTATCAG |
| | CTCACTCAAAGGCGGTAATACGGTTATCCACAGAATCAGGGGATAACGCAGGAAAGAACATGTGAGCAAAA |
| | GGCCAGCAAAAGGCCAGGAACCGTAAAAAGGCCGCGTTGCTGGCGTTTTTCCATAGGCTCCGCCCCCCTGAC |
| | GAGCATCACAAAAATCGACGCTCAAGTCAGAGGTGGCGAAACCCGACAGGACTATAAAGATACCAGGCGTT |
| | TCCCCCTGGAAGCTCCCTCGTGCGCTCTCCTGTTCCGACCCTGCCGCTTACCGGATACCTGTCCGCCTTTCTCC |
| | CTTCGGGAAGCGTGGCGCTTTCTCATAGCTCACGCTGTAGGTATCTCAGTTCGGTGTAGGTCGTTCGCTCCAA |
| | GCTGGGCTGTGTGCACGAACCCCCCGTTCAGCCCGACCGCTGCGCCTTATCCGGTAACTATCGTCTTGAGTCC |
| | AACCCGGTAAGACACGACTTATCGCCACTGGCAGCAGCCACTGGTAACAGGATTAGCAGAGCGAGGTATGT |
| | AGGCGGTGCTACAGAGTTCTTGAAGTGGTGGCCTAACTACGGCTACACTAGAAGAACAGTATTTGGTATCTG |
| | CGCTCTGCTGAAGCCAGTTACCTTCGGAAAAAGAGTTGGTAGCTCTTGATCCGGCAAACAAACCACCGCTGG |
| | TAGCGGTTTTTTTGTTTGCAAGCAGCAGATTACGCGCAGAAAAAAAGGATCTCAAGAAGATCCTTTGATCTTT |
| | TCTACGGGGTCTGACGCTCAGTGGAACGAAAACTCACGTTAAGGGATTTTGGTCATGAGATTATCAAAAAGG |
| | ATCTTCACCTAGATCCTTTTAAATTAAAAATGAAGTTTTAAATCAATCTAAAGTATATATGAGTAAACTTGGT |
| | CTGACAGTTACCAATGCTTAATCAGTGAGGCACCTATCTCAGCGATCTGTCTATTTCGTTCATCCATAGTTGC |
| | CTGACTCCCCGTCGTGTAGATAACTACGATACGGGAGGGCTTACCATCTGGCCCCAGTGCTGCAATGATACC |
| | GCGAGACCCACGCTCACCGGCTCCAGATTTATCAGCAATAAACCAGCCAGCCGGAAGGGCCGAGCGCAGAA |
| | GTGGTCCTGCAACTTTATCCGCCTCCATCCAGTCTATTAATTGTTGCCGGGAAGCTAGAGTAAGTAGTTCGCC |
| | AGTTAATAGTTTGCGCAACGTTGTTGCCATTGCTACAGGCATCGTGGTGTCACGCTCGTCGTTTGGTATGGCT |
| | TCATTCAGCTCCGGTTCCCAACGATCAAGGCGAGTTACATGATCCCCCATGTTGTGCAAAAAAGCGGTTAGCT |
| | CCTTCGGTCCTCCGATCGTTGTCAGAAGTAAGTTGGCCGCAGTGTTATCACTCATGGTTATGGCAGCACTGCA |
| | TAATTCTCTTACTGTCATGCCATCCGTAAGATGCTTTTCTGTGACTGGTGAGTACTCAACCAAGTCATTCTGAG |
| | AATAGTGTATGCGGCGACCGAGTTGCTCTTGCCCGGCGTCAATACGGGATAATACCGCGCCACATAGCAGAA |
| | CTTTAAAAGTGCTCATCATTGGAAAACGTTCTTCGGGGCGAAAACTCTCAAGGATCTTACCGCTGTTGAGATC |
| | CAGTTCGATGTAACCCACTCGTGCACCCAACTGATCTTCAGCATCTTTTACTTTCACCAGCGTTTCTGGGTGA |
| | GCAAAAACAGGAAGGCAAAATGCCGCAAAAAAGGGAATAAGGGCGACACGGAAATGTTGAATACTCATACT |
| | CTTCCTTTTTCAATATTATTGAAGCATTTATCAGGGTTATTGTCTCATGAGCGGATACATATTTGAATGTATTT |
| | AGAAAAATAAACAAATAGGGGTTCCGCGCACATTTCCCCGAAAAGTGCCACCTgagggcctatttcccatgattccttcatatttg |
| | catatacgatacaaggctgttagagagataattagaattaatttgactgtaaacacaaagatattagtacaaaatacgtgacgtagaaagtaataatttcttgggtagtttgcagttttaaaa |
| | ttatgttttaaaatggactatcatatgcttaccgtaacttgaaagtatttcgatttcttggctttatatatcttgtggaaaggacgtccacggactgctgggttgtaccaaccctaactgtttgc |
| | agcaagcctggacatcgggaatgcgctactggaatcgagatatgctgtcaacctgcaacatgctattgattgtgagatcaatgttggatggacacggtagaccagaagtgttcagca |
| | ggagtgttccagccgtagcgtagaacgtagattggttagattaggttttccgagccggttgtcgcgcggttcaatccctggtgcgggtgctagtgccaatacccaccggctccgcact |
| | aCAgtcttcTCTgaagacCATTTTTT (SEQ ID NO: 587) |
| pMJ204 | AATTCTGTGGAATGTGTGTCAGTTAGGGTGTGGAAAGTCCCCAGGCTCCCCAGCAGGCAGAAGTATGCAAAG |
| pU6- | CATGCATCTCAATTAGTCAGCAACCAGGTGTGGAAAGTCCCCAGGCTCCCCAGCAGGCAGAAGTATGCAAAG |
| ID16_RNA4- | CATGCATCTCAATTAGTCAGCAACCATAGTCCCGCCCCTAACTCCGCCCATCCCGCCCCTAACTCCGCCCAGT |
| empty | TCCGCCCATTCTCCGCCCCATGGCTGACTAATTTTTTTTATTTATGCAGAGGCCGAGGCCGCCTCTGCCTCTGA |
| | GCTATTCCAGAAGTAGTGAGGAGGCTTTTTTGGAGGCCTAGGCTTTTGCAAAAAGCTAACTTGTTTATTGCAG |
| | CTTATAATGGTTACAAATAAAGCAATAGCATCACAAATTTCACAAATAAAGCATTTTTTTCACTGCATTCTAG |
| | TTGTGGTTTGTCCAAACTCATCAATGTATCTTATCATGTCTGTATACCGTCGACCTCTAGCTAGAGCTTGGCGT |
| | AATCATGGTCATAGCTGTTTCCTGTGTGAAATTGTTATCCGCTCACAATTCCACACAACATACGAGCCGGAAG |
| | CATAAAGTGTAAAGCCTGGGGTGCCTAATGAGTGAGCTAACTCACATTAATTGCGTTGCGCTCACTGCCCGCT |
| | TTCCAGTCGGGAAACCTGTCGTGCCAGCTGCATTAATGAATCGGCCAACGCGCGGGGAGAGGCGGTTTGCGT |
| | ATTGGGCGCTCTTCCGCTTCCTCGCTCACTGACTCGCTGCGCTCGGTCGTTCGGCTGCGGCGAGCGGTATCAG |
| | CTCACTCAAAGGCGGTAATACGGTTATCCACAGAATCAGGGGATAACGCAGGAAAGAACATGTGAGCAAAA |
| | GGCCAGCAAAAGGCCAGGAACCGTAAAAAGGCCGCGTTGCTGGCGTTTTTCCATAGGCTCCGCCCCCCTGAC |
| | GAGCATCACAAAAATCGACGCTCAAGTCAGAGGTGGCGAAACCCGACAGGACTATAAAGATACCAGGCGTT |
| | TCCCCCTGGAAGCTCCCTCGTGCGCTCTCCTGTTCCGACCCTGCCGCTTACCGGATACCTGTCCGCCTTTCTCC |
| | CTTCGGGAAGCGTGGCGCTTTCTCATAGCTCACGCTGTAGGTATCTCAGTTCGGTGTAGGTCGTTCGCTCCAA |
| | GCTGGGCTGTGTGCACGAACCCCCCGTTCAGCCCGACCGCTGCGCCTTATCCGGTAACTATCGTCTTGAGTCC |
| | AACCCGGTAAGACACGACTTATCGCCACTGGCAGCAGCCACTGGTAACAGGATTAGCAGAGCGAGGTATGT |
| | AGGCGGTGCTACAGAGTTCTTGAAGTGGTGGCCTAACTACGGCTACACTAGAAGAACAGTATTTGGTATCTG |
| | CGCTCTGCTGAAGCCAGTTACCTTCGGAAAAAGAGTTGGTAGCTCTTGATCCGGCAAACAAACCACCGCTGG |
| | TAGCGGTTTTTTTGTTTGCAAGCAGCAGATTACGCGCAGAAAAAAAGGATCTCAAGAAGATCCTTTGATCTTT |
| | TCTACGGGGTCTGACGCTCAGTGGAACGAAAACTCACGTTAAGGGATTTTGGTCATGAGATTATCAAAAAGG |
| | ATCTTCACCTAGATCCTTTTAAATTAAAAATGAAGTTTTAAATCAATCTAAAGTATATATGAGTAAACTTGGT |
| | CTGACAGTTACCAATGCTTAATCAGTGAGGCACCTATCTCAGCGATCTGTCTATTTCGTTCATCCATAGTTGC |
| | CTGACTCCCCGTCGTGTAGATAACTACGATACGGGAGGGCTTACCATCTGGCCCCAGTGCTGCAATGATACC |
| | GCGAGACCCACGCTCACCGGCTCCAGATTTATCAGCAATAAACCAGCCAGCCGGAAGGGCCGAGCGCAGAA |
| | GTGGTCCTGCAACTTTATCCGCCTCCATCCAGTCTATTAATTGTTGCCGGGAAGCTAGAGTAAGTAGTTCGCC |
| | AGTTAATAGTTTGCGCAACGTTGTTGCCATTGCTACAGGCATCGTGGTGTCACGCTCGTCGTTTGGTATGGCT |
| | TCATTCAGCTCCGGTTCCCAACGATCAAGGCGAGTTACATGATCCCCCATGTTGTGCAAAAAAGCGGTTAGCT |
| | CCTTCGGTCCTCCGATCGTTGTCAGAAGTAAGTTGGCCGCAGTGTTATCACTCATGGTTATGGCAGCACTGCA |
| | TAATTCTCTTACTGTCATGCCATCCGTAAGATGCTTTTCTGTGACTGGTGAGTACTCAACCAAGTCATTCTGAG |
| | AATAGTGTATGCGGCGACCGAGTTGCTCTTGCCCGGCGTCAATACGGGATAATACCGCGCCACATAGCAGAA |
| | CTTTAAAAGTGCTCATCATTGGAAAACGTTCTTCGGGGCGAAAACTCTCAAGGATCTTACCGCTGTTGAGATC |
| | CAGTTCGATGTAACCCACTCGTGCACCCAACTGATCTTCAGCATCTTTTACTTTCACCAGCGTTTCTGGGTGA |
| | GCAAAAACAGGAAGGCAAAATGCCGCAAAAAAGGGAATAAGGGCGACACGGAAATGTTGAATACTCATACT |
| | CTTCCTTTTTCAATATTATTGAAGCATTTATCAGGGTTATTGTCTCATGAGCGGATACATATTTGAATGTATTT |
| | AGAAAAATAAACAAATAGGGGTTCCGCGCACATTTCCCCGAAAAGTGCCACCTgagggcctatttcccatgattccttcatatttg |
| | catatacgatacaaggctgttagagagataattagaattaatttgactgtaaacacaaagatattagtacaaaatacgtgacgtagaaagtaataatttcttgggtagtttgcagttttaaaa |
| | ttatgttttaaaatggactatcatatgcttaccgtaacttgaaagtatttcgatttcttgGCTTTATATATCTTGTGGAAAGGACgagtttgtggagaaaaaattcaa |
| | aacacgacctcattcaagaccttggcgccgtgtgaaggcaagattgaaaaagtccacggactgctgggttgtaccaaccctaactgtttgcagcaagcctggacatcgggaatgc |
| | gctactggaatcgagatatgctgtcaacctgcaacatgctattgattgtgagatcaatgttggatggacacggtagaccagaagtgttcagcaggagtgttccagccgtagcgtagaa |
| | cgtagattggttagattaggttttccgagccggttgtcgcgcggttcaatccctggtgcgggtgctagtgccaatacccaccggctccgcactaCAgtcttcTCTgaagacCAT |
| | TTTTT (SEQ ID NO: 588) |
| pMJ205 | AATTCTGTGGAATGTGTGTCAGTTAGGGTGTGGAAAGTCCCCAGGCTCCCCAGCAGGCAGAAGTATGCAAAG |
| pU6- | CATGCATCTCAATTAGTCAGCAACCAGGTGTGGAAAGTCCCCAGGCTCCCCAGCAGGCAGAAGTATGCAAAG |
| ID16_RNA5- | CATGCATCTCAATTAGTCAGCAACCATAGTCCCGCCCCTAACTCCGCCCATCCCGCCCCTAACTCCGCCCAGT |
| empty | TCCGCCCATTCTCCGCCCCATGGCTGACTAATTTTTTTTATTTATGCAGAGGCCGAGGCCGCCTCTGCCTCTGA |
| | GCTATTCCAGAAGTAGTGAGGAGGCTTTTTTGGAGGCCTAGGCTTTTGCAAAAAGCTAACTTGTTTATTGCAG |
| | CTTATAATGGTTACAAATAAAGCAATAGCATCACAAATTTCACAAATAAAGCATTTTTTTCACTGCATTCTAG |
| | TTGTGGTTTGTCCAAACTCATCAATGTATCTTATCATGTCTGTATACCGTCGACCTCTAGCTAGAGCTTGGCGT |
| | AATCATGGTCATAGCTGTTTCCTGTGTGAAATTGTTATCCGCTCACAATTCCACACAACATACGAGCCGGAAG |
| | CATAAAGTGTAAAGCCTGGGGTGCCTAATGAGTGAGCTAACTCACATTAATTGCGTTGCGCTCACTGCCCGCT |
| | TTCCAGTCGGGAAACCTGTCGTGCCAGCTGCATTAATGAATCGGCCAACGCGCGGGGAGAGGCGGTTTGCGT |
| | ATTGGGCGCTCTTCCGCTTCCTCGCTCACTGACTCGCTGCGCTCGGTCGTTCGGCTGCGGCGAGCGGTATCAG |
| | CTCACTCAAAGGCGGTAATACGGTTATCCACAGAATCAGGGGATAACGCAGGAAAGAACATGTGAGCAAAA |
| | GGCCAGCAAAAGGCCAGGAACCGTAAAAAGGCCGCGTTGCTGGCGTTTTTCCATAGGCTCCGCCCCCCTGAC |
| | GAGCATCACAAAAATCGACGCTCAAGTCAGAGGTGGCGAAACCCGACAGGACTATAAAGATACCAGGCGTT |
| | TCCCCCTGGAAGCTCCCTCGTGCGCTCTCCTGTTCCGACCCTGCCGCTTACCGGATACCTGTCCGCCTTTCTCC |
| | CTTCGGGAAGCGTGGCGCTTTCTCATAGCTCACGCTGTAGGTATCTCAGTTCGGTGTAGGTCGTTCGCTCCAA |
| | GCTGGGCTGTGTGCACGAACCCCCCGTTCAGCCCGACCGCTGCGCCTTATCCGGTAACTATCGTCTTGAGTCC |
| | AACCCGGTAAGACACGACTTATCGCCACTGGCAGCAGCCACTGGTAACAGGATTAGCAGAGCGAGGTATGT |
| | AGGCGGTGCTACAGAGTTCTTGAAGTGGTGGCCTAACTACGGCTACACTAGAAGAACAGTATTTGGTATCTG |
| | CGCTCTGCTGAAGCCAGTTACCTTCGGAAAAAGAGTTGGTAGCTCTTGATCCGGCAAACAAACCACCGCTGG |
| | TAGCGGTTTTTTTGTTTGCAAGCAGCAGATTACGCGCAGAAAAAAAGGATCTCAAGAAGATCCTTTGATCTTT |
| | TCTACGGGGTCTGACGCTCAGTGGAACGAAAACTCACGTTAAGGGATTTTGGTCATGAGATTATCAAAAAGG |
| | ATCTTCACCTAGATCCTTTTAAATTAAAAATGAAGTTTTAAATCAATCTAAAGTATATATGAGTAAACTTGGT |
| | CTGACAGTTACCAATGCTTAATCAGTGAGGCACCTATCTCAGCGATCTGTCTATTTCGTTCATCCATAGTTGC |
| | CTGACTCCCCGTCGTGTAGATAACTACGATACGGGAGGGCTTACCATCTGGCCCCAGTGCTGCAATGATACC |
| | GCGAGACCCACGCTCACCGGCTCCAGATTTATCAGCAATAAACCAGCCAGCCGGAAGGGCCGAGCGCAGAA |
| | GTGGTCCTGCAACTTTATCCGCCTCCATCCAGTCTATTAATTGTTGCCGGGAAGCTAGAGTAAGTAGTTCGCC |
| | AGTTAATAGTTTGCGCAACGTTGTTGCCATTGCTACAGGCATCGTGGTGTCACGCTCGTCGTTTGGTATGGCT |
| | TCATTCAGCTCCGGTTCCCAACGATCAAGGCGAGTTACATGATCCCCCATGTTGTGCAAAAAAGCGGTTAGCT |
| | CCTTCGGTCCTCCGATCGTTGTCAGAAGTAAGTTGGCCGCAGTGTTATCACTCATGGTTATGGCAGCACTGCA |
| | TAATTCTCTTACTGTCATGCCATCCGTAAGATGCTTTTCTGTGACTGGTGAGTACTCAACCAAGTCATTCTGAG |
| | AATAGTGTATGCGGCGACCGAGTTGCTCTTGCCCGGCGTCAATACGGGATAATACCGCGCCACATAGCAGAA |
| | CTTTAAAAGTGCTCATCATTGGAAAACGTTCTTCGGGGCGAAAACTCTCAAGGATCTTACCGCTGTTGAGATC |
| | CAGTTCGATGTAACCCACTCGTGCACCCAACTGATCTTCAGCATCTTTTACTTTCACCAGCGTTTCTGGGTGA |
| | GCAAAAACAGGAAGGCAAAATGCCGCAAAAAAGGGAATAAGGGCGACACGGAAATGTTGAATACTCATACT |
| | CTTCCTTTTTCAATATTATTGAAGCATTTATCAGGGTTATTGTCTCATGAGCGGATACATATTTGAATGTATTT |
| | AGAAAAATAAACAAATAGGGGTTCCGCGCACATTTCCCCGAAAAGTGCCACCTgagggcctatttcccatgattccttcatatttg |
| | catatacgatacaaggctgttagagagataattagaattaatttgactgtaaacacaaagatattagtacaaaatacgtgacgtagaaagtaataatttcttgggtagtttgcagttttaaaa |
| | ttatgttttaaaatggactatcatatgcttaccgtaacttgaaagtatttcgatttcttgGCTTTATATATCTTGTGGAAAGGACaagcgcaaccgcattgattgtttc |
| | cttctcgacgagtacaagacctcatctgtttgccctcgctgttcctcatctgagtttgtggagaaaaaattcaaaacacgacctcattcaagaccttggcgccgtcgtgaaggcaagatt |
| | gaaaaagtccacggactgctgggttgtaccaaccctaactgtttgcagcaagcctggacatcgggaatgcgctactggaatcgagatatgctgtcaacctgcaacatgctattgattg |
| | tgagatcaatgttggatggacacggtagaccagaagtgttcagcaggagtgttccagccgtagcgtagaacgtagattggttagattaggttttccgagccggttgtcgcgcggttca |
| | atccctggtgcgggtgctagtgccaatacccaccggctccgcactaCAgtcttcTCTgaagacCATTTTTT (SEQ ID NO: 589) |
| pMJ206 | AATTCTGTGGAATGTGTGTCAGTTAGGGTGTGGAAAGTCCCCAGGCTCCCCAGCAGGCAGAAGTATGCAAAG |
| pU6- | CATGCATCTCAATTAGTCAGCAACCAGGTGTGGAAAGTCCCCAGGCTCCCCAGCAGGCAGAAGTATGCAAAG |
| ID16_RNA6- | CATGCATCTCAATTAGTCAGCAACCATAGTCCCGCCCCTAACTCCGCCCATCCCGCCCCTAACTCCGCCCAGT |
| empty | TCCGCCCATTCTCCGCCCCATGGCTGACTAATTTTTTTTATTTATGCAGAGGCCGAGGCCGCCTCTGCCTCTGA |
| | GCTATTCCAGAAGTAGTGAGGAGGCTTTTTTGGAGGCCTAGGCTTTTGCAAAAAGCTAACTTGTTTATTGCAG |
| | CTTATAATGGTTACAAATAAAGCAATAGCATCACAAATTTCACAAATAAAGCATTTTTTTCACTGCATTCTAG |
| | TTGTGGTTTGTCCAAACTCATCAATGTATCTTATCATGTCTGTATACCGTCGACCTCTAGCTAGAGCTTGGCGT |
| | AATCATGGTCATAGCTGTTTCCTGTGTGAAATTGTTATCCGCTCACAATTCCACACAACATACGAGCCGGAAG |
| | CATAAAGTGTAAAGCCTGGGGTGCCTAATGAGTGAGCTAACTCACATTAATTGCGTTGCGCTCACTGCCCGCT |
| | TTCCAGTCGGGAAACCTGTCGTGCCAGCTGCATTAATGAATCGGCCAACGCGCGGGGAGAGGCGGTTTGCGT |
| | ATTGGGCGCTCTTCCGCTTCCTCGCTCACTGACTCGCTGCGCTCGGTCGTTCGGCTGCGGCGAGCGGTATCAG |
| | CTCACTCAAAGGCGGTAATACGGTTATCCACAGAATCAGGGGATAACGCAGGAAAGAACATGTGAGCAAAA |
| | GGCCAGCAAAAGGCCAGGAACCGTAAAAAGGCCGCGTTGCTGGCGTTTTTCCATAGGCTCCGCCCCCCTGAC |
| | GAGCATCACAAAAATCGACGCTCAAGTCAGAGGTGGCGAAACCCGACAGGACTATAAAGATACCAGGCGTT |
| | TCCCCCTGGAAGCTCCCTCGTGCGCTCTCCTGTTCCGACCCTGCCGCTTACCGGATACCTGTCCGCCTTTCTCC |
| | CTTCGGGAAGCGTGGCGCTTTCTCATAGCTCACGCTGTAGGTATCTCAGTTCGGTGTAGGTCGTTCGCTCCAA |
| | GCTGGGCTGTGTGCACGAACCCCCCGTTCAGCCCGACCGCTGCGCCTTATCCGGTAACTATCGTCTTGAGTCC |
| | AACCCGGTAAGACACGACTTATCGCCACTGGCAGCAGCCACTGGTAACAGGATTAGCAGAGCGAGGTATGT |
| | AGGCGGTGCTACAGAGTTCTTGAAGTGGTGGCCTAACTACGGCTACACTAGAAGAACAGTATTTGGTATCTG |
| | CGCTCTGCTGAAGCCAGTTACCTTCGGAAAAAGAGTTGGTAGCTCTTGATCCGGCAAACAAACCACCGCTGG |
| | TAGCGGTTTTTTTGTTTGCAAGCAGCAGATTACGCGCAGAAAAAAAGGATCTCAAGAAGATCCTTTGATCTTT |
| | TCTACGGGGTCTGACGCTCAGTGGAACGAAAACTCACGTTAAGGGATTTTGGTCATGAGATTATCAAAAAGG |
| | ATCTTCACCTAGATCCTTTTAAATTAAAAATGAAGTTTTAAATCAATCTAAAGTATATATGAGTAAACTTGGT |
| | CTGACAGTTACCAATGCTTAATCAGTGAGGCACCTATCTCAGCGATCTGTCTATTTCGTTCATCCATAGTTGC |
| | CTGACTCCCCGTCGTGTAGATAACTACGATACGGGAGGGCTTACCATCTGGCCCCAGTGCTGCAATGATACC |
| | GCGAGACCCACGCTCACCGGCTCCAGATTTATCAGCAATAAACCAGCCAGCCGGAAGGGCCGAGCGCAGAA |
| | GTGGTCCTGCAACTTTATCCGCCTCCATCCAGTCTATTAATTGTTGCCGGGAAGCTAGAGTAAGTAGTTCGCC |
| | AGTTAATAGTTTGCGCAACGTTGTTGCCATTGCTACAGGCATCGTGGTGTCACGCTCGTCGTTTGGTATGGCT |
| | TCATTCAGCTCCGGTTCCCAACGATCAAGGCGAGTTACATGATCCCCCATGTTGTGCAAAAAAGCGGTTAGCT |
| | CCTTCGGTCCTCCGATCGTTGTCAGAAGTAAGTTGGCCGCAGTGTTATCACTCATGGTTATGGCAGCACTGCA |
| | TAATTCTCTTACTGTCATGCCATCCGTAAGATGCTTTTCTGTGACTGGTGAGTACTCAACCAAGTCATTCTGAG |
| | AATAGTGTATGCGGCGACCGAGTTGCTCTTGCCCGGCGTCAATACGGGATAATACCGCGCCACATAGCAGAA |
| | CTTTAAAAGTGCTCATCATTGGAAAACGTTCTTCGGGGCGAAAACTCTCAAGGATCTTACCGCTGTTGAGATC |
| | CAGTTCGATGTAACCCACTCGTGCACCCAACTGATCTTCAGCATCTTTTACTTTCACCAGCGTTTCTGGGTGA |
| | GCAAAAACAGGAAGGCAAAATGCCGCAAAAAAGGGAATAAGGGCGACACGGAAATGTTGAATACTCATACT |
| | CTTCCTTTTTCAATATTATTGAAGCATTTATCAGGGTTATTGTCTCATGAGCGGATACATATTTGAATGTATTT |
| | AGAAAAATAAACAAATAGGGGTTCCGCGCACATTTCCCCGAAAAGTGCCACCTgagggcctatttcccatgattccttcatatttg |
| | catatacgatacaaggctgttagagagataattagaattaatttgactgtaaacacaaagatattagtacaaaatacgtgacgtagaaagtaataatttcttgggtagtttgcagttttaaaa |
| | ttatgttttaaaatggactatcatatgcttaccgtaacttgaaagtatttcgatttcttgGCTTTATATATCTTGTGGAAAGGACggtgattggagcgacgctggtc |
| | gaactgcgagatttcagacctcatcaaagacaaaaggctggcgcaccctctttaagcgcaaccgcattgattgtttccttctcgacgagtacaagacctcatctgtttgccctcgctgtt |
| | cctcatctgagtttgtggagaaaaaattcaaaacacgacctcattcaagaccttggcgccgtcgtgaaggcaagattgaaaaagtccacggactgctgggttgtaccaaccctaactg |
| | tttgcagcaagcctggacatcgggaatgcgctactggaatcgagatatgctgtcaacctgcaacatgctattgattgtgagatcaatgttggatggacacggtagaccagaagtgttc |
| | agcaggagtgttccagccgtagcgtagaacgtagattggttagattaggttttccgagccggttgtcgcgcggttcaatccctggtgcgggtgctagtgccaatacccaccggctcc |
| | gcactaCAgtcttcTCTgaagacCATTTTTT (SEQ ID NO: 590) |

TABLE 9
FZID16 Fanzor ortholog

| | | | Native | |
|---|---|---|---|---|
| | Sequence | | Locus | |
| Name | (Human codon optimized) | Native Fanzor Sequence | Accession No. | Description |
| FZID16 | ATGCCGCCTAAGAAGAAGCAGAAGCTGGA | ATGCCGCCAAAGAAGAAGCAAAA | NW_015971553 | Spizellomyces |
| | ACGGCTGAAGAAACTGGACAAGCCCACAC | GCTTGAAAGGCTCAAAAAACTCGA | | punctatus |
| | TGCACACCTGTAACAAGACCAGCTTCGCC | CAAACCCACCTTACATACCTGCAA | | DAOM |
| | AAGGCCTTCCTGCCTAACGAGACATACCG | CAAGACGTCCTTTGCAAAGGCTTT | | BR117 |
| | GCAGCGGCTGCTGGACTATATCGCCATCAT | CTTGCCTAATGAGACCTACCGGCA | | chromosome |
| | TCACCAGCTGGCCGACCACGCCTCTCACGC | GCGTCTTCTAGATTACATCGCCATC | | Unknown |
| | CCTGAAGTTTTACATCCTGAGCACCTCCAC | ATCCATCAACTCGCTGACCATGCTT | | supercont1.1 |
| | CAGCAGCTTCCCTGTGGTGCACGAGGATA | CCCACGCTCTCAAATTCTACATCCT | | 7, whole |
| | CCATCGAGGCCATCCTGTACCTGCTGAACA | CTCTACATCCACATCGTCTTTCCCG | | genome |
| | AGGGCGAAGCCTGGCATCCCAGAAAAGAG | GTTGTTCACGAAGATACAATCGAA | | shotgun |
| | GCCAAGAAGGCCTGGCGGGATTGCCTGCT | GCCATTCTCTATCTTCTCAACAAGG | | sequence |
| | GCCTTACGTGCAGAGATACTGCCAGATCGT | GGGAGGCTTGGCATCCAAGAAAGG | | |
| | GGGCTTCATTCACCCCAACCTGAGAGGCG | AAGCAAAGAAGGCATGGCGGGAT | | |
| | AGCAGCAGAGCATCAACTACCTGACCGTG | TGTTTGTTGCCATATGTTCAACGGT | | |
| | TCCATGATGACCAACCTGAAAGTGAACGT | ACTGCCAAATCGTCGGCTTCATTC | | |
| | GCAAGAGCACTTCATGCAGATGCTGCTGC | ATCCAAATCTACGAGGCGAGCAGC | | |
| | GGTACATCAATCTGCGCTTCGACGTGAAG | AGTCAATTAATTACCTGACAGTGA | | |
| | GGCCAGAAGCAGAGACTGCCTCCTAAGAG | GTATGATGACGAACCTGAAAGTCA | | |
| | CGACGCCCGCAAGGCCTTTTTCACCCGGCT | ACGTTCAAGAGCATTTCATGCAGA | | |
| | GAGATACCTGAAGTCCGTGTTCCTGTTCGA | TGCTGCTCCGGTACATTAATCTGCG | | |
| | CGTGGTGCCCGAGCTGGAATTCCTGGACG | GTTCGACGTGAAGGGACAGAAGCA | | |
| | ATCTGACCCCTCTGGAAAGCGAGGTGCTG | GCGACTGCCACCGAAAAGCGATGC | | |
| | GAAGAGATCTGGTCCCTGGACCTGCCTTTT | GCGAAAGGCTTTCTTTACTCGGCT | | |
| | CTGCCCAACGATCCTCTGGCCTACGCCATC | ACGCTACTTGAAGTCGGTTTTCCTT | | |
| | GTGGCCGATCCTATGAGCTTCTTCCCAGCC | TTTGATGTGGTGCCCGAGTTGGAG | | |
| | TACTGCAAGCTGAGCGGCCTGTACGAGCA | TTCCTGGATGACTTGACACCATTG | | |
| | GTACGGCTTCCAGCGGTTTAGCGCCATTCC | GAGAGCGAGGTTCTTGAAGAGATT | | |
| | TCTGCGGAGAAGCCTGATCCAGTCTCACGT | TGGTCATTGGATCTCCCATTCCTTC | | |
| | GCGGATCGACACCATCATCCTGTATCAGCA | CTAACGATCCCCTTGCCTACGCCAT | | |
| | CATCCTGTGCATCACCAGACGGGACGCCG | TGTTGCTGATCCGATGTCATTTTTT | | |
| | AGACAGTGGAAAAGGACGACCTGTGGATG | CCCGCGTACTGCAAACTCTCTGGG | | |
| | AGAGTGTGCAACCTGTGCACCAAAGCCTT | CTGTATGAACAATATGGCTTCCAA | | |
| | CCGGTCCAGATGCGGCATGCACTTCGAGG | CGGTTCAGTGCGATACCTCTGCGC | | |
| | GCAGCATCACAACAGATGGCGCCAGCGTG | CGCTCGCTCATTCAAAGTCACGTG | | |
| | TCCGTGTACCTGAAACACCCTGAGGCCGAT | CGAATCGACACCATCATCCTGTAC | | |
| | AAGTACGGCAAGAGAGGCGCCAGAAAGTC | CAGCATATCCTTTGCATCACGCGG | | |
| | CGCCAATACTGTGGCCGCCGAAGTGAAGG | CGAGACGCAGAAACTGTCGAAAA | | |
| | CCCTGTACGTGGAAAACAACCTGCCTGCCT | GGATGATCTGTGGATGCGCGTCTG | | |
| | GTAGAGCCGCCGAGAACGTGGTGGTCATC | CAATCTATGTACCAAGGCTTTTCG | | |
| | GACCCCAACAAGCGGGATATCCTGTACTG | GTCTCGCTGTGGTATGCATTTTGAA | | |
| | CCAGGACAGCAACGGCACCACCTTCAGAT | GGCTCAATCACCACGGATGGAGCC | | |
| | ACACCGCCAACCAGAGAGCCGTGGAAACC | TCGGTGTCTGTATACCTAAAGCAC | | |
| | GGCAGCAGAAGATTCGCCAAGCGGCGGGA | CCAGAAGCAGACAAGTATGGAAA | | |
| | AGCCATGAAGGAAGAAGCCGGCGTTGACC | GCGCGGAGCGAGAAAGTCAGCAA | | |
| | TGATCGAGAGCAGAATCCCTAGCCACAAG | ACACGGTGGCTGCAGAGGTTAAAG | | |
| | ACCATGAACCTGATGGACTTCACCAGATA | CGCTTTATGTGGAGAACAACTTAC | | |
| | CCTGCTCGTGCGGAGAGCCGACTGGGACA | CTGCTTGTCGAGCAGCAGAGAATG | | |
| | GACGGAAAGAGTTCTACTCTCACCCCGCTC | TCGTCGTTATCGACCCAAACAAGC | | |
| | ACACCCGGTGGAAGTGGCACAGCTTCATC | GCGACATTCTCTACTGCCAAGACA | | |
| | AACCGGCAGAAGTCCGAGAGCGACCTGAT | GCAATGGTACGACATTTCGCTACA | | |
| | CAGCAACATGCGGAACAAATACGGCGAGA | CCGCCAACCAGCGAGCCGTGGAGA | | |
| | ACTTCACCGTGGTCATGGGCGATTGGAGC | CTGGAAGCCGGCGGTTTGCAAAGA | | |
| | GACGCTGGAAGAACCGCCAGATTCCAGAC | GACGAGAAGCAATGAAGGAAGAA | | |
| | CAGCAGCAAGACCAAAGGCTGGCGGACCC | GCTGGAGTTGATCTCATAGAATCA | | |
| | TGTTCAAGCGGAACCGGATCGATTGCTTCC | CGAATACCATCCCACAAAACAATG | | |
| | TGCTGGACGAGTACAAGACCTCCAGCGTG | AACCTCATGGACTTCACTCGCTAC | | |
| | TGCCCTAGATGCAGCAGCAGCGAGTTCGT | CTTCTCGTTCGCCGCGCTGATTGGG | | |
| | GGAAAAGAAGTTCAAGACCCGGCCTCACA | ATCGTCGCAAGGAATTCTATTCGC | | |
| | GCAGACCCTGGCGAAGAAGAGAGGGCAA | ATCCTGCTCATACTCGATGGAAAT | | |
| | GATCGAGAAGGTGCACGGCCTGCTGGGCT | GGCACTCCTTCATAAACCGTCAGA | | |
| | GCACCAATCCTAATTGTCTGCAGCAGGCCT | AGAGCGAATCAGACCTCATAAGTA | | |
| | GGACCAGCGGCATGAGATACTGGAACCGG | ACATGCGCAACAAGTACGGTGAAA | | |
| | GACATGCTGAGCACATGCAACATGCTGCT | ACTTTACTGTTGTGATGGGTGATTG | | |
| | GATCGTGCGGTCCATGCTGGATGGCCATG | GAGCGACGCTGGTCGAACTGCGAG | | |
| | GCAGACCTGAGGTGTTCTCTAGATCTGTGC | ATTTCAGACCTCATCAAAGACAAA | | |
| | CTGCCGTGGCCtga (SEQ ID NO: 591) | AGGCTGGCGCACCCTCTTTAAGCG | | |
| | | CAACCGCATTGATTGTTTCCTTCTC | | |
| | | GACGAGTACAAGACCTCATCTGTT | | |
| | | TGCCCTCGCTGTTCCTCATCTGAGT | | |
| | | TTGTGGAGAAAAAATTCAAAACAC | | |
| | | TCCACGGACTGCTGGGTTGTACCA | | |
| | | ACCCTAACTGTTTGCAGCAAGCCT | | |
| | | GGACATCGGGAATGCGCTACTGGA | | |
| | | ATCGAGATATGCTGTCAACCTGCA | | |
| | | ACATGCTATTGATTGTGAGATCAA | | |
| | | TGTTGGATGGACACGGTAGACCAG | | |
| | | AAGTGTTCAGCAGGAGTGTTCCAG | | |
| | | CCGTAGCGTAG (SEQ ID | | |
| | | NO: 592) | | |

### Example 3-Identifying Representative Remote Fanzor Polypeptides

[1371] Described in this example are strategies for identifying remote Fanzor polypeptides and homologues.

[1372] Applicant mapped about 214 million structures from Alphafold to UniRef50 to reduce redundancy. Structures associated with a low score confidence were discarded. Applicant then annotated the taxonomy for each structure. Applicant then did a structural mining of the structures (using Dali with custom scripts) following the taxonomy (phylum by phylum) starting from Fanzor16 (Spu, see e.g., example 2 herein). For the seeds, Applicant used the RuvC+Bridge Helix (BH) domains, the REC domain, and the WED domain, all independently. Applicant then manually curated the results. For each hit, Applicant then performed genomic mining with an extremely narrow threshold to identify very close homologs in order to align their genomic vicinity and predict the ends. Representative results in which ends were curated are shown in Tables 10-12 and FIGS. 31-33.

TABLE 10
Representative Mollusk Fanzor Polypeptides

| | | |
|---|---|---|
| Mercenaria | XP_045183411.1 | MNRKRSLSPLTLWKAAHVFKHQNLECWFQFAKDGESHNKVFASDFERTRKRAKLEDEKTFMTT |
| | | FSVGIRPTRNQKRVLNEMLRVSNHAYNWCNYLVCEKNLKPKEYDLQKYVSKTNSSDVPTDFRM |
| | | NNNDDWYFNNKMTKIRDAACKDFCTMYKSALTNQRKKKKYIKTVSLKDKDDMNPSHGAFEIQ |
| | | KALIRKLKETDSDDYDILNNCLSVMADNFTMRRKDVRNRFLRLSKPVSKLPPLEHAVKIVKTAK |
| | | GKFVLHIPCEPTYTRSKRYDEPFDSLCGIDPGGRTFLTIYDPSKPRAFQIASRCKAPSKPVRKRTKK |
| | | KGEKWHRKKKSQRRVGSTIDKIDSLHAKKDYVNSKMQAAIRRKQPQAKKDRQRQLQKVYYQL |
| | | GNVIRWVHLRCTYNLMQYSYVAIGKIGIPSIIRRQCNGKRRRINKKSVRHLTVWNHCKFRERLV |
| | | YRAKGTKTNVIVQDESYTSKTCSECGTINSKLGGSETFKCTNPSCDYITNRDVNGAKNILRKSLGI |
| | | GSIKTYRA (SEQ ID NO: 593) |
| Mercenaria | XP_045186055.1 | MKRKREQMTLWKAAFVNGRETFKSWIDKARMLELNCDISSASSTHYSDLDLKSKCAKIEDKFM |
| | | CTFSVGIRPTSKQNRTLNQMLKVSNYAYNWCNHLVKEKDFKPKQFDLQRVVTKTNSHDVPAEY |
| | | RLPGDDWFFDNKMSSIKLTACKNFCTMYKSARTNQKKTKVDLRNKDTALLREGSFEVQRQYVR |
| | | LLTEKDIPDERIRQSRIALMADNFSKSKKDWKERFLRLSKNVSKIPPLNHDMKVCKRPNGKFILQI |
| | | PCDPICTRQIQVHTSDSICSIDPGGRTFATCYDPSNIKTFQIGPEADKKEIIHKFHNKIDNVHRLLSY |
| | | AQKKKQTQAVQDRIGQLKKLHLKLKTYVDDVHLKLCSYLVKNYKLVVLGRISVSSIVRKDRPN |
| | | HLAKKGNRDLLCWQHFRFRQRLLHRVRGTDCEAIAQDERYTSKTCGNCGVQNNKLGGNETFH |
| | | CKSCNYKTHRDVNGARNILCKYLGHFPFAT (SEQ ID NO: 594) |
| Mercenaria | XP_045186809.1 | MLFFLVPIKPVALRFSPHFRMKRKREQMTLWKAAFVNGQETFKSWIDKVRMLELNCDISSASST |
| | | HYSDLNLKTKCAKTEDKFMCTYSVGIRPTSKQKRTLNQMLKVSNYAYNWCNYLVKEKDFKPK |
| | | QFDLQRVVAKTNSTDVPAEYRLPGDDWSFDNKMSGIKLTACKNFCTMYKSAQTNQKKTKVDL |
| | | RNKDIVQLREGSFEVQSKYVRLLTEKDIPGERIRQSRIALTPDSFSKSKKDWKERFLRLSKNVSKIP |
| | | PLSHDMKVCKRPNGKFILQISCDPICTRQIQVQTSDSICSIDPGGRTFATCYDPSNIKTFQIGPEADK |
| | | KEIIHEFHNKIDYVHRLLSHAQEKKQTQAVQDRIGQLKKLHLKLKTYVDDVHLKLCSYLVKNYK |
| | | LVVLGKISVSSIVRKDRQNHLPKSANRDLLCWQHYRFRQRLLHRVRGTDCEAVAQDERYTSKT |
| | | CGNCGVKNNKLGGKETFHCKSCNYITHRDVNGARNILCKYLGLFPFAA (SEQ ID NO: 595) |
| Mercenaria | XP_045208820.1 | MKRKREQMTLWKAAFVNGQETFKSWIDKARMLELNCDVSSASSTHYSDLNLKTKCAKTDDKF |
| | | MCNYSVCIRPTSKQKRTLNQMLKVSNYAYNWCNYLVKEKDFKPKQFDLQRIVAKTNSTDVPAE |
| | | YRLPGDDWFFDNKMSSIKLTACKNFCTMYKSTQTNQKKTKVDLRNKDIVQLREGSFEVQSKYV |
| | | RLLTEKDIPGERIRQSRIALMPDSFSKSKKDWKERFLRLSKNVSKIPPLSHDMKVCKRPNGKFILQI |
| | | SCDPICTRQIQVQTSDSICSIDPGGRTFATCYDPSNIKTFQIGPEADKKEIIHEFHNKIDYVHRLLSH |
| | | AQEKKQTQAVQDRIGQLKKLHLKLKTYVDDVHLKLCSYLVKNYKLVVLGKISVSSIVRKDRPN |
| | | HLAKSANRDLLCWQHYRFRQRLLHRVRGTDCEVIIQDERYTSKTCGNCGEKNNKLGGKETFTC |
| | | ESCNYKTHRDVNGARNILCKYLGLFPFAA (SEQ ID NO: 596) |
| Mercenaria | XP_045205872.1 | MKRKREQMTLWKAAFVNGRETFKSWIDKVRMLELNCDISSASSTHYSDLNLKTKCAKTEDKFM |
| | | CTYSVGIRPTSKQKRTLNQMLKVSNYAYNWCNYLVKEKDFKPKQFDLQRVVAKTNSTDVPAE |
| | | YRLPGDDWSFDNKMSGIKLTACKNFCTMYKSAQTNQKKTKVDLRNKDIVQLREGSFEVQSKYV |
| | | SLLTEKDIPGERIRQLRIALMPDSFSKSKKDWKERFLRLSKNVSKIPPLSHDMKVCKRPDGKFILQI |
| | | PCDPICTRQIQVQTSDSICSIDPGGRTFATCYDPSNIKAFQIGPEADKKEIIHEFHNKIDYVHRLLSH |
| | | AQEKKQTQAVQDRIGQLKKLHLKLKTYVDDVHLKLCSYLVKNYKLVVLGKISVSSIVRKDRPN |
| | | HLGKKGNRDLLCWGHYRFRQRLLHRVRGTDCEAITQDERYTSKTCGNCGVKNNKLGGKETFT |
| | | YMKNKHLNVLDKTLT (SEQ ID NO: 597) |
| Dreissena | KAH3690924.1 | MKRKREQMTLWKAAFVNGRETFKSWIDKVRMLELNCDISSASSTHYSDLNLKTKCAKTEDKFM |
| | | CTYSVGIRPTSKQKRTLNQMLKVSNYAYNWCNYLVKEKDFKPKQFDLQRVVAKTNSTDVPAE |
| | | YRLPGDDWSFDNKMSGIKLTACKNFCTMYKSAQTNQKKTKVDLRNKDIVQLREGSFEVQSKYV |
| | | SLLTEKDIPGERIRQLRIALMPDSFSKSKKDWKERFLRLSKNVSKIPPLSHDMKVCKRPDGKFILQI |
| | | PCDPICTRQIQVQTSDSICSIDPGGRTFATCYDPSNIKAFQIGPEADKKEIIHEFHNKIDYVHRLLSH |
| | | AQEKKQTQAVQDRIGQLKKLHLKLKTYVDDVHLKLCSYLVKNYKLVVLGKISVSSIVRKDRPN |
| | | HLGKKGNRDLLCWGHYRFRQRLLHRVRGTDCEAITQDERYTSKTCGNCGVKNNKLGGKETFT |
| | | YMKNKHLNVLDKTLT (SEQ ID NO: 598) |
| Dreissena | KAH3753320.1 | MKRKREDLTLWDAANVHKHKSMWYWWEYIRRKDMVNYEKTDCDVIQLLQSASVKKQKTQS |
| | | DKFLTSFSVGIRPTKHQKRVLNEMLRVSNYTYNWCLWLVNEKGIRPHQFELQKIVCKTNANDV |
| | | DPQYRIENDDWFFNNRMTSVKTTSCKNFYTSYKAAKSLKSKLKRPMSVSNIVQGSFCVPKLFIRN |
| | | LSSKDVSIDNINMLNRYICMIPENFEKRSKPKERFLKLAKPITKIPPFDHDVKIVKRADGMFILNIPC |
| | | DPKYTRRNASNDTIDKRVCGIDPGGRTFATVYDPIDCCVFQVGIKEDKQYVISKLHNKIDHAQM |
| | | HLRKAQNKKQQQAARERIVSLKKTHLKLKTFVDDIHLKLSSHLVKEYQFVALGKINVAPLVKKK |
| | | HLSKRAKRDLLYWQHYRFRQRLTHRTTNTECILDVQNEAYTSKTCGVCGTINKNLEKSETFYCD |
| | | NCKYNTHRDVNGARNILLKSLRMFPFVNSQ (SEQ ID NO: 599) |
| Dreissena | KAH3875098.1 | MKRKREDLTLWDAAHVHKHKSMWYWWEYIRRKDMVNHEKTDCDVIQLLQSASVKKQKTQS |
| | | DKFFTSFSVGIRPTKHQKRVLNEMLRVSNYTYNWCLWLVNEKGIEPHQFELQKIVCKTNANDVD |
| | | PQYRMENDDWFFNNKMTSVKTTSCKNFYTSYKAAKSLKSKLKRPMSVSNIVQGSFCVPKLFVR |
| | | NLSSKDVSIDNINMLNRYICMIPENFEKRSKPKERFLKLAKPITKIPPFDHDVKIVKRADGMFILNI |
| | | PCDPKYTRRNASNDTIDKRVCGIDPGGRTFATVYDPIDCSVFQVGIEEDKQYVISKLHNKIYHAH |
| | | KHLTKAQNKKQQQAASERIVSLKKTHLKLKTFVDDIHLKLSSHLVKEYEYVALGKINVAQLVKT |
| | | DRPKPLSPRAKRDLLYWQHYRFRQRLTHRTTNTECILDVQNEAYTSKTCGVCGTINKNLEKSET |
| | | FFCDQCKYNTHRDVNGARNILLKSLRMFPFEKQQQ (SEQ ID NO: 600) |
| Dreissena | KAH3777210.1 | MKRKRENFTLWDAANVHKHKSMWYWWEHIRRKDMVNHEKTDCDVIQLLQSASVKKQKTQS |
| | | DKFLTSFSVGIRPTKHQKRVLNEMLRVSNYTYNWCLWLVDEKGQRPHLFELQKIVCKTTANDV |
| | | DPYYRMENDDWFFNNKMSTIKLTSCKNFCTSYKSAKSLKSKLKRPMSVSNIIQGSFCVQKLFIRR |
| | | LSDKDVSIDNTQMQNRYICMMPDNFEKRSNPKERFLKLAKPITKIPPIDHDVKIVKRADGMFIMN |
| | | IPCDPKYTRRNASNNTIEKRVCGIDPGGRTFATVYDPIDCCVFQVGIKEDKQYVISKLHNKIDHAH |
| | | MHLTKAQNKKQQQAARERIVSLKKTHLKLKTFVDDIHLKLSSHLVKEYEYVALGKINVAQLVK |
| | | TDRPKPLSPRAKRDLLYWQHYRFRQRLTHRTTNTECILDVQNEAYTSKTCGVCGTINKNLEKSE |
| | | TFYCDNCKYNTHRDVNGARNILLKSLRMFPFVNSQL (SEQ ID NO: 601) |
| Dreissena | KAH3822762.1 | MKRKREDLTLWDAANVHKHKSMWYWWEYIRRKDLINHEKTDCDVIQLLQSASVKKQKTHSD |
| | | DFLTSFSVGIRPTKHQKQVLNEMLRVSNYTYNWCLWLVNEKGLRPHQFELQKIVCKTNARDVD |
| | | PQYRMENDDWFFNNKMTRVKGTSCKNFCTSYKSAKALKSKLKRPMPISNIIEGSFGVPNLYIRLL |
| | | SSKDVCTHETNMQNRYICMMPDNFEKRSNPKERFLKLAKRITNIPPINHDVKIVKRADGMFIMNI |
| | | PCDPKYTRRNASNDTIEKRVCGIDPGGRTFATVYDPIDCCVFQVGIKEDKQYVISKLHNKIDHAH |
| | | MHLTKAQNKKQQQAARERIVSLKKTHLKLKTFVEDIHLKLSSHLVKEYHYVALGKINVAPMVK |
| | | KKHLSKRAKRDLLYWQHYRFRQRLTHRTTNTDCIFEVQNEAYTSKTCGVCGKINENLEKSETFY |
| | | CDQCKYNTHRDVNGARNILLKSLNMFPFEKKQQ (SEQ ID NO: 602) |
| Dreissena | KAH3892374.1 | MKRKREQLTLWDAANVHKHKSMWYWWQSIRRKDLVNHDKTACDVMELLQSASHKKQNTQS |
| | | DKFLTSFSVGIRPTKHQKRVLNEMLRVSNYTYNWCLWLVNEKGLKPLQFTLQKIVCKTNAGDV |
| | | DPQYRIENDEWFFNNKMSTIKLTSCKNFCTSYKSAKSLKSKLKRPMSVSNIVQGSFCVQKVLLRH |
| | | LSGKDVFTNNANMQNQYICMMPDNFEKRSNPKERFLKLAKRITKIPPIDHDVKIVKRANGTFVL |
| | | NIPCDPTYTRRNTSNDTIEKRVCGIDPGGRTFATVYDPIDCSVFQVGIEEDKQYVMSKLHNKINH |
| | | AHKHLTKAQNKQQQQAAQERIVSLKKIHFKLKTFVDDIHLKLSSHLVKEYQYVALGKINVAQLV |
| | | KTDRPKPLSPRSKRDLLNWQHFRFRQRLTHRTTNTDCILEVQNEAYTSMTCGVCGKIKKNLEKS |
| | | ETFYCDQCKYNTHRDVNGARNILLKSLHMFPFEKQQQ (SEQ ID NO: 603) |
| Dreissena | KAH3796522.1 | MKRKRENFTLWDAANVHKHKSMWYWWEHIRRKDMVNHEKTDCDVIQLLQSASVKKQKTQS |
| | | DKILTSFSVGLRPTKHQKQVLNEMLRVSNYTYNWCLWLVDEKGQRPHLFELQKIVCKTTANDV |
| | | DPYYRMENDDWFFNNKMSNIKLTSCKNFCTSYKSAKSLKSKLIRPMSVSNIIQGSFCVQKVLLRH |
| | | LSDKDVSTDNMLNRYICMMPDNFEKRSKPKERFLKLAKPITKIPPIDHDVKIVKRADGMFIMNIP |
| | | CDSKYTRRNASNDTIEKRVCGIDPGGRTFATVYDPIDCCVFQVGIKEDKQYVIRKLHDKIDHAHK |
| | | HLTKAQKKKQQKAAQERIVSLKKIHFKLKTFVDDIHLKLSSHLVKEYKYVALGKINVAQLVKTD |
| | | RPKPLSKRAKRDLLSWQHYRFRQRLTHRTTNTDCILEVQNEANTSKTCGVCGEKDDNLGKSETY |
| | | YCIKCEYNTHRDVNGARNILLKSLHMFPFVNSQQ (SEQ ID NO: 604) |
| Dreissena | KAH3785325.1 | MVNHEKTDCDVIQLLQSASVKKQKTQSDKFLTSFSVGIRPTKHQKRVLNEMLRVSNYTYNWCL |
| | | WLVNEKGIRPHQFELQKIVCKTNASDVDPQYRMANDDWFFNNKMTSIKTTSCKNFFTSYKAAK |
| | | SLKSKLKRPMCVSNIIQGSFCVRKEFIRHLSGKDVSTDNMLNRYICMMPDNFEKRSKPKERFLKL |
| | | AKPITNIPPINHDVKIVKRADGMFIMNIPCDPKYTRRNASNDTIEKRVCGIDPGGRTFATVYDPIDC |
| | | CVFQVGIKEDKQYVISKLHNKIDHAHKHLTKAQNKKQQQAASERIVSLKKTHLKLKTFVEDIHL |
| | | KLSSHLVKEYQYVALGKINVAQLVKTDRPKPLSKRAKRDLLSWQHYRFRQRLTHRTTNTDCILE |
| | | VQNEANTSKTCGVCGEKDDNLGKSETYYCIKCEYNTHRDVNGARNILLKSLHMFPF (SEQ ID |
| | | NO: 605) |
| Dreissena | KAH3700187.1 | MANDDWFFNNKMTSIKTTSCKNFFTSYKAAKSLKSKLKRPMCVSNIIQGSFCVRKEFIRHLSGKD |
| | | VSTDNMLNRYICMMPDNFEKRSKPKERFLKLAKPITNIPPINHDVKIVKRADGMFIMNIPCDPKY |
| | | TRRNASNDTIEKRVCGIDPGGRTFATVYDPIDCCVFQVGIKEDKQYVISKLHNKIDHAHKHLTKA |
| | | QNKKQQQAASERIVSLKKTHLKLKTFVEDIHLKLSSHLVKEYQYVALGKINVAQLVKTDRPKPL |
| | | SKRAKRDLLSWQHYRFRQRLTHRTTNTDCILEVQNEANTSKTCGVCGEKDDNLGKSETYYCIKC |
| | | EYNTHRDVNGARNILLKSLHMFPFKKHQK (SEQ ID NO: 606) |
| Dreissena | KAH3721835.1 | MGCCKRPQTQSMWYWWQSIRRKDLVNHDKTACDVMELLQSASHKKQNTQSDKFLTSFSVGIR |
| | | PTKHQKRVLNEMLRVSNYTYNWCLWLVNEKGLKPLQFTLQKIVCKTNAGDVDPQYRIENDEW |
| | | FFNNKMSTIKLTSCKNFCTSYKSAKSLKSKLKRPMSVSNIVQGSFCVQKVLLRHLSGKDVFTNNA |
| | | NMQNQYICMMPDNFEKRSNPKERFLKLAKRITKIPPIDHDVKIVKRANGTFVLNIPCDPTYTRRN |
| | | TSNDTIEKRVCGIDPGGRTFATVYDPIDCSVFQVGIEEDKQYVMSKLHNKINHAHKHLTKAQTNS |
| | | NNKQHRNELYHCRKYTLS (SEQ ID NO: 607) |
| Dreissena | KAH3856132.1 | MKRKREDLTLWDAANVHKHKSMWYWWEYIRRKDLINHEKTDCDVIQLLQSASVKKQKTQSD |
| | | KFLTSFSVGIRPTKHQKQVLNEMLRVSNYTYNWCLWLVNEKGLKPHQFELQKIVCKTNARDVD |
| | | PQYRMANDDWFFNNKMTRVKGTSCKNFCTSYKSAKALKSKLKRPMPISNIIEGSFGVPNLYIRLL |
| | | SSKDVCTHETNMQNRYICMMPDNFEKRSNPKERFLKLAKRITNIPPINHDVKIVKRADGMFIMNI |
| | | PCDPKYTRRNASNDTIEKRVCGIDPGAVCHVRGSTIAANGVAKFRVTAKTEE (SEQ ID NO: 608) |
| Dreissena | KAH3856132.1 | MLNRYICMIPDNFEKRSKPKERFLKLAKPITKIPPIDHDVKIVKRADGMFIMNIPCDPKYTRRNAS |
| | | NDTIDKRVCGIDPGGRTFATVYDPIDCSVFQVGIEEDKQYVISKLHNKIYHAHKHLTKAQNKKQ |
| | | QQAASERIVSLKKTHLKLKTFVEDIHLKLSSHLVKEYQYVALGKINVAQLVKTDRPKPLSKRAK |
| | | RDLLSWQHYRFRQRLTHRTTNTDCILEVQNEANTSKTCGVCGEKDDNLGKSETYYCIKCEYNTH |
| | | RDVNGARNILLKSLSMFPFEKKQQ (SEQ ID NO: 609) |
| Dreissena | KAH3739195.1 | MTSVKGTSCKNFSTSYKSATSLKLKQKRPMSVSNIFQGSFCVPKKFIRHLSGSDVSIDNTNMQNR |
| | | YICMMPDNFEKRSNPKERFLKIAKPITKIPPIDHDVKIVKRADGTFIMKIPCDPKYTRRNASNDSIE |
| | | KRVCGIDPGGRTFATVYDQIESSVFQVGIEEDKQYLISKLHNKIDHAHMHLTKAQNKKQQQAAR |
| | | ERIVSLKKTHLKLKTFVEDIHLKLSAHLVKEYQYVALGKINVAQLVKKNRPKPLSPRANRFAML |
| | | ATLQISPKAYSPNYEHRMHIGCSK (SEQ ID NO: 610) |
| Batillaria | KAG5708924.1 | MKRTYSATKSSLTLWTAASVKTTSAPKVVTTFSGWMKKILPTRAETSLTLINPADIADPSPPKKK |
| | | AKKTTPATPKPTLRIYKIGLRPSPAQRKTLNACIVAANFAYNQCVHLVQHKVCKPHLYDLQKIV |
| | | AKMKTPEDINHRYAPDRDGWFWKSSTIVRLLATKDFCAAYKAIVSNKKKDVAVIKYKTYDDPE |
| | | AINPLSGLFGCQKQYATVTQAGLRLLPRLFGKDPIPLVKKKPKVATIDHDFKIEKTSKGKFVLCLT |
| | | VECSLLRRVKPPAPLFEDGYIHACGIDPGVRSFVTVYDPTRQDCYQFGTSAQKAERLDPITNAIDN |
| | | WNSFVDQHRDKAPPTAIESWSRKTKKLWYKLKNQVRSLHDQVIAHLLGAYNFISLGKLDVSCF |
| | | RRGTTAKSTNRWLRIYRHFEFRTKLLARVEGTDNCRVEITDERWTSKTCGMCRSIHRELGAKEL |
| | | FECPNCHYTCHRDVHGARNILLRSFGQFPV (SEQ ID NO: 611) |
| Batillaria | KAG5707941.1 | MKRTYSATKSSLTLWTAASVKTTSAPKVVTTFSGWMKKILPTRAETSLTLINPADIADPSPPKKK |
| | | AKKTTPATPKPTLRIYKIGLRPSPAQRKTLNACIVAANFAYNQCVHLVQHKVCKPHLYDLQKIV |
| | | AKMKTPEDINHRYAPDRDGWFWKSSTIVRLLATKDFCAAYKAIVSNKKKDVAVIKYKTYDDPE |
| | | AINPLSGLFGCQKQYATVTQAGLRLLPRLFGKDPIPLVKKKLKVATIDHDFKIEKTSKGKFVLCLT |
| | | VECSLLRRVKPPAPLFEDGYIHACGIDPGVRSFVTVYDPTRQDCYQFGTSAQKAERLDPITNAIDN |
| | | WNSFVDQHRDKAPPTAIESWSRKTKKLWYKLKNQVRSLHDQVIAHLLGAYNFISLGKLDVSCF |
| | | RRGTTAKSTNRWLRIYRHFEFRTKLLARVEGTDNCRVEITDERWTSKTCGMCRSIHRELGAKEL |
| | | FECPNCHYTCHRDVHVARNILLRSFGQFPV (SEQ ID NO: 612) |
| Batillaria | KAG5698421.1 | MKRTYSATKSSLTLWTAASVKTTSAPKVVTTFSGWMKKILPTRAETSLTLINPADIADPSPPKKK |
| | | AKKTTPATPKPTLRIYKIGLRPSPAQRKTLNACIVAANFAYNQCVHLVQHKVCKPHLYDLQKIV |
| | | AKMKTPEDINHRYAPDRDGWFWKSSTIVRLLATKDFCAAYKAIVSNKKKDVAVIKYKTYDDPE |
| | | AINPLSGLFGCQKQYATVTQAGLRLLPRLFGKDPIPLVKKKLKVATIDHDFKIEKTSKGKFVLCLT |
| | | VECSLLRRVKPPAPLFEDGYIHACGIDPGVRSFVTVYDPTRQDCYQFGTSAQKAERLDPITNAIDN |
| | | WNSFVDQHRDKAPPTAIESWSRKTKKLWYKLKNQVRSLHDQVIAHLLGAYNFISLGKLDVSCF |
| | | RRGTTAKSTNRWLRITDTLNFGQNCSLEWRELTTVEWRSPTNAGPQRRVACADPSTANLGQKN |
| | | YSSAPTATTPATETCTELETSC (SEQ ID NO: 613) |
| Elysia | RUS69625.1 | MAEKLRKTLWIPGNEPDSDCTVSITGKLNELVNSIDPAPEALGIYKVKFKLTRHQHNVLKDLLAA |
| | | SNLAWNWTKWLIEDKGIKRKDEKTLQSIVAKKSIEDPLMAPREVHDNAKLLHKTSTIRLTGMKS |
| | | YLSALKSSMTLHKGRMEKFDVDYKELYPASGTFTVQKLFIKKFDISMVNKGVRSKVPEAFYRLSI |
| | | TPDSFGNRNEFTERFLRISKKRSYDRMPPINHDSQIQLRKDGHWLLLIPCDRSYLRCKQPESIEKSV |
| | | VGVDPGGRTFQTTYDPIKREVKEFHSNKGAEFRYIELMKVKAKRHEEHAKNVKSFPKYKEHKA |
| | | AARKYWHKYETKRNDLHRKLSSKMVRENKLIVIGDLSTKNACKKGGKLHKKSKDDLYTWAHY |
| | | EFRQRLIDRARGTNTKVIVQDESYTSMTCGNCGHRKTDLGGDKVYNCTECGCSIGRDVNGGRNI |
| | | LIKAMIE (SEQ ID NO: 614) |
| Elysia | RUS69626.1 | MAEIIRKQLWYPGYKPENLSGVVEKLKEVGASNDESALGTFKIKLRPTAYQKACLKRVLAASNL |
| | | AWNWTKWLIEEKGVSWKDKKTMQAIVVKKSIESLENQDMVAPEVRANQQLLSKTTSVRLTAM |
| | | CSFVAATKSSMTLHKGCTRKFDVGYKELYPRSGTFGVQKPYIRKFEESMLPAKMPTEARKNFNR |
| | | LRLSILPNSFAAKGNPNERFLRIGKRRSWESMPPISHDCKVEMRKDGSWLLLIPCDRSYLRFSKPV |
| | | AEKNHAVSLDPGVRTFQTEYNPFKQETRNHGSQRDKDRINFFKTKAQRHEVLAKTNKKEYVRK |
| | | EHKRQADKYWHKHGKYRDNIHRELASKLVNENDLVIVGDFSSSRCAAKRAGSKLTKQTRAEM |
| | | YSWAHYRFKQRLIERARGTGTRVHFQDESYTSKTCGNCGNIKEDLGGNKTYACEVCGVVMDR |
| | | DVNGARNIMIKSLTKN (SEQ ID NO: 615) |

TABLE 11
Representative Insect Fanzor Polypeptides

| | | |
|---|---|---|
| Contarinia | XP_031620448.1 | MLFERSVQMTEVAALASLSILFILNEALDNDDRAFFLKPHPSLFIADCFRAVLNQHVNNINSQYRI |
| | | LPEFRFMVERNSEEQFRWPDDEKLGNGLRYFYKQYITNIQTNTNTWCEKRLENFFRMRCWYRN |
| | | RFHNGSRFDNIDIRNAKEFSYRFKNLTNGNNVDPQRVEKFNILMRDLTEIGWSGTVSMKFFAKY |
| | | RWFESLWLFGQMQRQIEVYHSHAEQWYTIHEMFRNNPNFQEPTINRPPKISSFALIPLCDYHLKN |
| | | VRLDITDLYNKIVNELDLVPSFLNTQTNRMNKRNLKYYTQTDRSGLWNMLFDVGKINKLGKSK |
| | | PFHHQILTDSVSISIMYKKPQRQQRPQRQQRPQQTTQANRGPEKLIGKKYIIGIDPNEKSWLTVVR |
| | | RNIQKTPDEPAVEENIIIPNQRFHWETQQKKRDKEAKKLAGWFDIEEKEHLKTYPYRPPSPRNST |
| | | WKSYIEYRIKMLRKGMAAYATREYARLDLDHHIRSTRVNDQIAVRVTNNKPSLVQFGAWAMK |
| | | PDRPFGIKKRKRCPGSRKFRVSIKKLGHSEVEMQDEWGTSQTCANCQERFPRHTKDDRFKVCYD |
| | | CRAKKIDGLPDSVAGLPDIIVSTVNRRVLRRKRAIIKRQIIDGNREAVNEKIRTGRLMSKVKVTYK |
| | | NWPLNVDDDDVVPQTVTWHRDIVAAKCIMLKGMNQLETEYSLFNVFALNYIGLCRIFDVPLPVS |
| | | LLRPPDYNNNVN (SEQ ID NO: 616) |
| Contarinia | XP_031634920.1 | MDDDELDDNQPEESKYVVIKCGLQTILRQQHERIERVGEVVTKMLFERSVQMTEVAALASLSILF |
| | | ILNEALDNDDRAFFLKPHPSLFIADCFRAVLNQHVNNIRSQYRILPEFRFMVERNSEEQFRWPDDE |
| | | KLGNGLRYFYKQYITNIQTNTNTWCEKRLENFFRMRCWYRNRFHNGSRFDNIDIRNAKEFSYRF |
| | | KNLTNGNNGNNVDPQRVEKFNILMRDLTEIGWSGTVSMKFFAKYRWFESLWLFGQMQRQIEVY |
| | | HSHAEQWHTIHEMFRNNPNFQEPTINRPPKISSFALIPLCDYHLKNVRLDIKDLYYKIVNELDLVP |
| | | SFLNTRTNRMNKRNLKYYTQTDRSGLWNMLFDVGEINKLGKSKSFHHQILTDSVSISIMYKKPQ |
| | | RQQRPQRQQRPQQTTQANRGPEKLIGKKYIIGIDPNEKSWLTVVRRNIQKTPDEPAVEENIIIPNQ |
| | | RFHWETQQKKRDKEAKKLAGWFDIEEKEHLKTYPYRPPSPRNSTWKSYIEYRIKMLRKGMAAY |
| | | ATREYARLDLDHHIRSTRVNDQIAVCVTNNKPSLVQFGAWAMKPDRPFGIKKRKRCPGSRKFRV |
| | | SIKKLGHSEVEMQDEWGTSQTCANCQERFPRHTKDDRFKVCYDCRAKKIDGLPDSVAGLPDIIV |
| | | STVNRRVLRRKRAIIKRQIIDGNREAVNEKLQTGRLMSKVKVTYKNWPLNVDDDDVVPQTVTW |
| | | HRDIVAAKCIMLKGMNQLETEYSLFNVFALNYIGLCRIFDVPLPVSLLRPPDQNNNVN (SEQ ID |
| | | NO: 617) |
| Contarinia | XP_031635312.1 | MDDDELDDNQPEESKYVVIKCGLQTILRQQHERIERVGEVVTKMLFERSVQMTEVAALASLSILF |
| | | ILNEALDNDDRAFFLKPHPSLFIADCFRAVLNQHVNNINSQYRILPEFRFMVERNSEEQFRWPDDE |
| | | KLGNGLRYFYKQYITNIQTNTNTWCEKRLENFFRMRCWYRNRFHNGSRFDNIDIRNAKEFSYRF |
| | | KNLTNGNNGNNVDPQRVEKFNILMRDLTEIGWSGTVSMKFFAKYRWFESLWLFGQMQRQIEVY |
| | | HSHAEQWYTIHEMFRNNPNFQEPTINRPPKISSFALIPLCDYHLKNVRLDIKDLYNKIVNELDLVP |
| | | SFLNTRTNRMNKRNLKYYTQTDRSGLWNMLFDVGEINKLGKSKSFHHQILTDSVSISIMYKKPQ |
| | | RQQRPQRQQRPQQTTQANRGPEKLIGKKYIIGIDPNEKSWLTVVRRNIQKTPDEPAVEENIIIPNQ |
| | | RFHWETQQKKRDKEAKKLAGWFDIEEKEHLKTYPYRPPSPRNSTWKSYIEYRIKMLRKGMAAY |
| | | ATREYARLDLDHHIRSTRVNDQIAVRVTNNKPSLVQFGAWAMKPDRPFGIKKRKRCPGSRKFRV |
| | | SIKKLGHSEVEMQDEWGTSQTCANCQERFPRHTKDDRFKVCYDCRAKKIDGLPDSVAGLPDIIV |
| | | STVNRRVLRRKRAIIKRQIIDGNREAVNEKIRTGRLMSKVKVTYKNWPLNVDDDDVVPQTVTW |
| | | HRDIVAAKCIMLKGMNQLETEYSLFNVFALNYIGLCRIFDVPLPVSLLRPPDYNNNVN (SEQ ID |
| | | NO: 618) |
| Contarinia | XP_031637771.1 | MDDDELDDNQPEESKYVVIKCGLQTILRQQHERIERVGEVVTKMLFERSVQMTEVAALASLSILF |
| | | ILNEALDNDDRAFFLKPHPSLFIADCFRAVLNQHVNNIRSQYRILPEFRFMVERNSEEQFRWPDDE |
| | | KLGNGLRYFYKQYITNIQTNTNTWCEKRLENFFRMRCWYRNRFHNGSRFDNIDIRNAKEFSYRF |
| | | KNLTNGNNGNNVDPQRVEKFNILMRDLTEIGWSGTVSMKFFAKYRWFESLWLFGQMQRQIEVY |
| | | HSHAEQWHTIHEMFRNNPNFQEPTINRPPKISSFALIPLCDYHLKNVRLDIKDLYYKIVNELDLVP |
| | | SFLNTRTNRMNKRNLKYYTQTDRSGLWNMLFDVGEINKLGKSKSFHHQILTDSVSISIMYKKPQ |
| | | RQQRPQRQQRPQQTTQANRGPEKLIGKKYIIGIDPNEKSWLTVVRRNIQKTPDEPAVEENIIIPNQ |
| | | RFHWETQQKKRDKEAKKLAGWFDIEEKEHLKTYPYRPPSPRNSTWKSYIEYRIKMLRKGMAAY |
| | | ATREYARLDLDHHIRSTRVNDQIAVCVTNNKPSLVQFGAWAMKPDRPFGIKKRKRCPGSRKFRV |
| | | SIKKLGHSEVEMQDEWGTSQTCANCQECFPRHTKDDRFKVCYDCRAKKIDGLPDSVAGLPDIIV |
| | | STVNRRVLRRKRAIIQRQIIDGNREAVNEKLQTGRLMSKVKVTYKNWPLNVDDDDVVPQTVTW |
| | | HRDIVAAKCIMLKGMNQLETEYSLFNVFALNYIGLCRIFDVPLPVSLLRPPDQNNNVN (SEQ ID |
| | | NO: 619) |
| Bradysia | XP_037040211.1 | MYETNFKNNVKTHAQKRIVRLFKLWFIEANGVKPSSRHMKVLKNAATFMFKRKSTVPRNPYLT |
| | | QRLMMYMPPQIVAMVANSNERGFMNKLHNAFNWFRMVPLYLRIQSDIDQYQATCRAADEPIH |
| | | VRNFHVVPLHNSKTKYIRIDSATLKLMLQHLKIHPTKPSLKQPNKRVCLTNAEFEDAVDPTGTFN |
| | | PNWFNYFKWSAVKKMQRHKEFDYQFLTNGVAVSLQFIVDQPPEPETFEKVMEKQKIKYRKFGQ |
| | | RFNNNQYKTIIGIDPGYKLYLAAVSKDMRTNEETLFRLTSRKFHNMCQQNIRDRKAKRYTSQLE |
| | | TEMAHDREVNFGGTIASPMSATNYMLFIDHRLKHFNSCIALYTQNKYTELAFHKYVHTQKAMD |
| | | GIVNELLPSSRSHERSLLVIGGTEFNPSAPIKKYRRCPGVRQLVKFVRKRTGCDIVYADEYNTSQV |
| | | CGRCQRRFKTSDDETIQHKRWERKGARMRLCSNCTPNDNIIPLPTTINTRMSPRAQHLHRLAITN |
| | | RLFFNVAAYSMEDAKRESDNIHYIAENCCYDVSHDKHTFDPNDRTTQLKCVWNRDISAARNILI |
| | | KGVASITGIPAPRTLYRQTQINEENSSDESMD (SEQ ID NO: 620) |
| Bradysia | XP_037024089.1 | MKNTKELSDSDTDIEKRQRKWQHQRQQKGNKKPKKRGQSNGNGNGKDSDDDFVSTKKVYNSP |
| | | PKLPNVAAVGRRKNVIPKKPPVSSNVNVNVLDSPPKLPNVAAAPKKPPVSSAAINAALLNATTK |
| | | DRSSSPSNATAASNPAINITSHRNTTSSIIGSGRTGSTQEVAHPLPIRQSPPPMEYGSEWDTDGEA |
| | | TIAQLKQMQRKRPSKKAHSTSTKPEVKQTPVQSNRKRAASTDEASDAVEATTKRSTSTKRSKASK |
| | | RSKATKTQQDSADEAGDADEETTKRSTSTKRSKASKRSKVTKTQQDSADEAGDADEATTKRST |
| | | STKRSKASKAQQRKDDDENGNRAVIQTQLEEIIFLGNVFDKSIRRFTCPFATCNVNYSTFLNLKN |
| | | HVKKTHEETLQKPIETDTNNWRRIQNANNRFDITTVKQKLRPLIIDGETIIKKQRVLEPLATEKTE |
| | | VATKVFDIMNKQAVELSKLAILFSSLVYFDVYNTISDPENGNEIDRIFEEEFNWKEMILEFKQFQR |
| | | NTAKAKKPRPDKHNTFFDLCRKYDVETYFTETSQNAWNSIVDTFATNFKTNITTHLYSRIRKWL |
| | | AFKLRDGKKKKDVCGKENRKDINNKIYHTIKFLFDSEKCTQAEEVQHELICELQKICQFPNFNHG |
| | | GRSYFERLRYDFKEDGDDDLGKPKRKRKCAAPKKTTKKSKKKKKKTQNNGPRLNWFQMVPA |
| | | MVRLQRRIYEINLSRKQTLIDAGIIKEKKKRKRKRKRKRKRKNESKPEPSSTENKRQAGGTKKKR |
| | | EIDPEATHYAKLPNFIVVPQNSFHTMHFPIDTKALFDILKNLPQFMAILNQAEFLELQIDDDPNRK |
| | | TTNPFWYFLFNIQKMETATKKFGGRITTNGSDVSIQYCKLRKEKELTKAEILEMASNRKRKHDVI |
| | | DSDSESESEDDDDDDDDNAKTIKTDPAIVSALTNITNMEDLSVSGVDLGVRNVAATVIRKWSKS |
| | | SDGYEVHESNVLHKSKDYHYKAGFARRQRKGKKLHGEFDERYQKDRQSQPIEPSQRSPDYIKFL |
| | | DSRLKWFNEGTATYMQRVVTNVKFDKFRSTQKQMMAMAKEIVGDINVHDKATTQPSKIRVVF |
| | | VGNCSTPANSTIKGHRRSPGNAPIVRYLKQIPQTYVDATIDEYCTTKKCSRCYETLDDVEFSKERL |
| | | KLCHNCKLAENSTSTNLVSTYQRKKVIAEAMIPITEDYPKPTQFERAQRVAMERTKRWSFGDKM |
| | | RMAARIKLKSTTYTVNTTATLKHLYWNRDGNAARNIMQLGLCQYNDCLPIEFNKDEAFQRPKK |
| | | KD (SEQ ID NO: 621) |
| Bradysia | XP_037033154.1 | MKNTKELSSDSDTDIEKRQRKWQHQRQQKGNKKPKKRGQSNGNGNGKDSDDDFVSTKKVYNS |
| | | PPKLPNVAAVGRRKNVIPKKPPVSSNVNVNVLDSPPKLPNVAAAPKKPPVSSAAINAALLNATTK |
| | | DRSSSPSNATAASNPAINITSHRNTTSSIIGSGRTGSTQEVAHPLPIRQSPPPMEYGSEWDTDGEA |
| | | TIAQLKQMQRKRPSKKAHSTSTKPEVKQTPVQSNRKRAASTDEASDAVEATTKRSTSTKRSKASK |
| | | RSKATKTQQDSADEAGDADEETTKRSTSTKRSKASKRSKVTKTQQDSADEAGDADEATTKRST |
| | | STKRSKASKAQQRKDDDENGNRAVIQTQLEEIIFLGNVFDKSIRRFTCPFATCNVNYSTFLNLKN |
| | | HVKKTHEETLQKPIETDTNNWRRIQNANNRFDITTVKQKLRPLIIDGETIIKKQRVLEPLATEKTE |
| | | VATKVFDIMNKQAVELSKLAILFSSLVYFDVYNTISDPENGNEIDRIFEEEFNWKEMILEFKQFQR |
| | | NTAKAKKSRPDKHNTFFDLCRKYDVETYFTETSQNAWNSIVDTFATNFKTNITTHLYSRIRKWL |
| | | AFKLRDGKKKKDVCGKENRKDINNKIYHTIKFLFDSEKCTQAEEVQHELICELQKICQFPNFNHG |
| | | GRSYFERLRYDFKEDGDDDLGKPKRKRKCAAPKKTTKKSKKKKKKTQNNGPRLNWFQMVPA |
| | | MVRLQRRIYEINLSRKQTLIDAGIIKEKKKRKRKRKRKRKRKNESKPEPSSTENKRQAGGTKKKR |
| | | EIDPEATHYAKLPNFIVVPQNSFHTMHFPIDTKALFDILKNLPQFKAILNQAEFLELQIDDDPNRKT |
| | | TNPFWYFLFNIQKMETATKKFGGRITTNGSDVSIQYCKLRKEKELTKAEILEMASNRKRKHDVID |
| | | SDSESESEDDDDDDDDNAKTIKTDPAIVSALTNITNMEDLSVSGVDLGVRNVAATVIRKWSKSS |
| | | DGYEVHESNVLHKSKDYHYKAGFARRQRKGKKLHGEFDERYQKDRQSQPIEPSQRSPDYIKFLD |
| | | SRLKWFNEGTATYMQRVVTNVKFDKFRSTQKQMMAMAKEIVGDINVHDKATTQPSKIRVVFV |
| | | GNCSTPANSTIKGHRRSPGNAPIVRYLKQIPQTYVDATIDEYCTTKKCSRCYETLDDVEFSKERLK |
| | | LCHNCKLAENSTSTNLVSTYQRKKVIAEAMIPITEDYPKPTQFERAQRVAMERTKRWSFGDKMR |
| | | MAARIKLKSTTYTVNATATLKHLYWNRDGNAARNIMQLGLCQYNDCLPIEFNKDEAFQRPKKK |
| | | D (SEQ ID NO: 622) |
| Bradysia | XP_037042105.1 | MKNTKELSSDSDTDIEKRQRKWQHQRQQKGNKKPKKRGQSNGNGNGKDSDDDFVSTKKVYNS |
| | | PPKLPNVAAVGRRKNVIPKKPPVSSNVNVNVLDSPPKLPNVAAAPKKPPVSSAAINAALLNATTK |
| | | DRSSSPSNATAASNLAINITSHRNTTSSIIGSGRTGSTQEVAHPLPIRQSPPPMEYGSEWDTDGEA |
| | | TIAQLKQMQRKRPSKKAHSTSTKPEVKQTPVQSNRKRAASTDEASDAVEATTKRSTSTKRSKASK |
| | | RSKATKTQQDSADEAGDADEETTKRSTSTKRSKASKRSKVTKTQQDSADEAGDADEATTKRST |
| | | STKRSKASKAQQRKDDDENGNRAVIQTQLEEIIFLGNVFDKSIRRFTCPFATCNVNYSTFLNLKN |
| | | HVKKTHEETLQKPIETDTNNWRRIQNANNRFDITTVKQKLRPLIIDGETIIKKQRVLEPLATEKTE |
| | | VATKVFDIMNKQAVELSKLAILFSSLVYFDVYNTISDPENGNEIDRIFEEEFNWKEMILEFKQFQR |
| | | NTAKAKKPRPDIHNTFFDLCRKYDVETYFTETSQNAWNSIVDTFATNFKTNITTHLYSRIRKWLA |
| | | FKLRDGKKKKDVCGKENRKDINNKIYHTIKFLFDSEKCTQAEEVQHELICELQKICQFPNFNHGG |
| | | RSYFERLRYDFKEDGDDDLGKPKRKRKCAAPKKTTKKSKKKKKKTQNNGPRLNWFQMVPAM |
| | | VRLQRRIYEINLSRKQTLIDAGIIKEKKKRKRKRKRKRKRKNESKPEPSSTENKRQAGGTKKKREI |
| | | DPEATHYAKLPNFIVVPQNSFHTMHFPIDTKALFDILKNLPQFKAILNQAEFLELQIDDDPNRKTT |
| | | NPFWYFLFNIQKMETATKKFGGRITTNGSDVSIQYCKLRKEKELTKAEILEMASNRKRKHDVIDS |
| | | DSESESEDDDDDDDDNAKTIKTDPAIVSALTNITNMEDLSVSGVDLGVRNVAATVIRKWSKSSD |
| | | GYEVHESNVLHKSKDYHYKAGFARRQRKGKKLHGEFDERYQKDRQSQPIEPSQRSPDYIKFLDS |
| | | RLKWFNEGTATYMQRVVTNVKFDKFRSTQKQMMAMAKEIVGDINVHDKATTQPSKIRVVFVG |
| | | NCSTPANSTIKGHRRSPGNAPIVRYLKQIPQTYVDATIDEYCTTKKCSRCYETLDDVEFSKERLKL |
| | | CHNCKLAENSTSTNLVSTYQRKKVIAEAMIPITEDYPKPTQFERAQRVAMERTKRWSFGDKMR |
| | | MAARIKLKSTTYTVNTTATLKHLYWNRDGNAARNIMQLGLCQYNDCLPIEFNKDEAFQRPKKK |
| | | D (SEQ ID NO: 623) |
| Bradysia | XP_037051825.1 | MEYGSEWDTDGEATIAQLKQMQRKRPSKKAHSTSTKPEVKQTPVQSNRKRAASTDEASDAVEA |
| | | TTKRSTSTKRSKASKRSKATKTQQDSADEAGDADEETTKRSTSTKRSKASKRSKVTKTQQDSAD |
| | | EAGDADEATTKRSTSTKRSKASKAQQRKDDDENGNRAVIQTQLEEIIFLGNVFDKSIRRFTCPFA |
| | | TCNVNYSAFLNLKNHVKKTHEETLQKPIETDTNNWRRIQNANNRFDIATVKQKLRPLIIDGETIIK |
| | | KQRVLEPLATEKTEVATKVFDIMNKQAVELSKLAILFSSLVYFDVYNTISDPENGNEIDRIFEEEF |
| | | NWKEMILEFKQFQRNTAKAKKSRPDKHNTFFDLCRKYDVETYFTETSQNAWNSIVDTFATNFKT |
| | | NITTHLYSRIRKWLAFKLRDGKKKKDVCGKENRKDINNKIYHTIKFLFDSEKCTQAEEVQHELIC |
| | | ELQKICQFPNFNHGGRSYFERLRYDFKADGDDDLGKPKRKRKCAAPKKTTKKSKKKKKKTQNN |
| | | GPRLNWFQMVPAMVRLQRRIYEINLSRKQTLIHAGIIKEKKKRKRKRKRKRKRKNESKPEPSSTE |
| | | NKRQAGGTKKKREIDPEATHYAKLPNFIVVPQNSFHTMHFPIDTKALFDILKNLPQFKAILNQAEF |
| | | LELQIDDDPNRKTTNPFWYFLFNIQKMETATKKFGGRITTNGSDVSIQYCKLRKEKELTKAEILE |
| | | MASNRKRKHDVIDSDSESESEDDDDDDDDDNAKTIKTDPAIVSALTNITNMEDLSVSGVDLGVR |
| | | NVAATVIRKWSKSSDGYEVHESNVLHKSKDYHYKAGFARRQRKGKKLHGEFDERYQKDRQSQ |
| | | PIEPSQRSPDYIKFLDSRLKWFNEGTATYMQRVVTNVKFDKFRSTQKQMMAMAKEIVGDINVH |
| | | DKATTQPSKIRVVFVGNCSTPANSTIKGHRRSPGNAPIVRYLKQIPQTYVDATIDEYCTTKKCSRC |
| | | YQTLDDVEFSKERLKLCHNCKLAENSTSTNLVSTYQRKKVIAEAMIPITEDYPKPTQFERAQRVA |
| | | MERTKRWSFGDKMRMAARIKLKSTTYTVNTTATLKHLYWNRDGNAARNIMQLGLCQYNDCLP |
| | | IEFNKDEAFQRPKKKD (SEQ ID NO: 624) |
| Leptopilina | XP_043477481.1 | MEKKNDNVNSDRSPPSRQENEIRRVEELNNFHRRAVSRPFIQVLPSSNPLPQFNLTSNRSLELENR |
| | | PPQQTSARIQRTVSSPFIPVLPFESNEGRVRRPLFDPTSMEEASSSTSGITEEEVSLDEIPSNVQI |
| | | EKFQFFDENTRMSEGSGVDYCKSKEHDFDDDTTLSWQRNLGLMNIVSSSSFKDSSTPMDIDNEEKEE |
| | | ETTSSPTPKKRYKLNLKEEKLVEDVFSQQSTSKEQKLGRKTPLKKKKSLSPIPSTSRQADENDYL |
| | | QSLNLQEEKDSTFKIPEPLATPSNMKKTTKSTARKEKQQQQQQTKFTIKTGFESFCPNEQIRTIVN |
| | | DQVQMLSRMFILISLLVNFALRHPTNTFLLDEWSKNGPDYLTITYLFKEKEPVKSTKNAFLKKLR |
| | | EEFVPEFSEYMGRPFEKFDCTNLTSQVQQMAAQMNTNFTTNLTTHCRNRLAKFFKNELLKKSPS |
| | | YKERKSRVIDEKSIEERDMKRKEEKRKRARKNKKKRIKWDKKKRMKRKSGRQKRIEKHNKCRN |
| | | LYPNNKKMRDKLINIQSKTEQKSRNVDLRKIVYDARKTIGRNRGKKKSSKKPRIQPPKTTPKNKT |
| | | CRNLQKEITPENETSDETSATIEKDKAEEEEEEEKEGYTIKTLIDNLLLNKCESEKLNQMNLEKLN |
| | | FGDIEDKNTCHKFLPFYIRLQKYFVDEKIKGFMLVPIMKPGLKYICYTNTALSDLEIVFKKKQNKT |
| | | EEKTPTKKMTRAEISKQEAEHKKLISPVKEKHKKLSSDKKILTRDIKLIKSEKNPYNKKRLAELQL |
| | | KLKVLNEDLSIINSELKNISENHKKVVTERNQDKYLENERRWERLFNFSKLRVNKKKYKFSGTIM |
| | | TDGIAVSVIYNVIKPKKIIDFSPTEQENVRDKTKYKILKGLDPGLKLAFGGVEREMQQDFDINSKD |
| | | KPIKIPTATFRFETQECKRRSILYKVGNDPKTYYENLLETPEFKDNVNHRDPSLIIPCTKFLLRTFY |
| | | DQQPNMENKKIARLRWDKYMLVQRETDYLADYLVGNREKKQLIAIGSPKISPWMRGHVRMPL |
| | | KKVVRRLAEEQDKYKNLRLVFVDEFNTTKMCSTCDQKMKILRNRTAYCSSCRIAWNRDVNAG |
| | | RNILNLALVRLGIIQKEQLPDSTKFRAIAEIE (SEQ ID NO: 625) |

TABLE 12
Other Representative Remote Fanzor Polypeptides

| | | |
|---|---|---|
| SAR | RLN86397.1 | MRLKVRTPQLLLRRLIGARKQACTMESIMDGVTEPNLSIRVDSNAAGTGTIFGSITDEHLVLL |
| | | FVLLRANPSRRPASGSSFSFFAMSGKRTKVDPPDKKTKRQCSDVGQRKARNKNTECSIVKCS |
| | | LKSFCQKSASVLPWDSVLKDTNKAVAEAYILANLRVVRLCEAGRPIPALDQEFYYQCLSAVS |
| | | VGLTARKKVDDEDLRQSVELYKSWRDPNVSFASSAHISYGWFQNASSQMATNASNHVVVN |
| | | FYRRIQKYVKQRVGITGKERYELLRDVLAPTYAGSDERVLGFRRWIPRNAEGYIDKEKPHLI |
| | | LPVTYRFLQFIEQENYRKREGPRYEQLRSFSLLPMKRGFECSHFKMCKLGLYALLRRAGIQIP |
| | | EIKRKEGQPCWNDVVDEWWHRLFKITKCETENRKFAGEISTDGKAVSIVLRKPKLPEPEKSP |
| | | SLKKDPKQYNFGEVWGLDPGRRDLFVATNNFGETIACSTREFYEDAKYTSSNMTTRYWIDH |
| | | NPKILEAIRNMPSPKTCSLQKLEAYVRFLSPRLDRLLDFRMAKPFRKLKFRRYIFMKNKLREL |
| | | CAKLTARAGANTLIGFGDWSATDYGGFIKKCPTGPVKKLEKELKRYCIVDSVPEFRTSKLHA |
| | | DCRRELTYQYALRTCKDGIVRRVKVYSVLHYPHNGCFGMTVNRDQNASKNILLLTLPHFLG |
| | | QDRHPACCRQGT (SEQ ID NO: 626) |
| SAR | POM76581.1 | MSCKRKKKADVPGKAKRQRPDVRERIKRNKTTEISVVKCSLNSFCNESARALPWESVLKDM |
| | | NKAVKEAFILANIRVLHLCNVNRPIPPLDQVFYYNCLSAVSVDLRARRKIDDADLRQSVELY |
| | | KSWLDSAVQYSSSAYISSGWFENASLQMATNASNHIVVNFYRRFQKYVKQRFGITGKDRYE |
| | | LLRDVLAPNYEDNNQLVTELRGWIPRNEDGFIDKANPHLMLPVMYRFLQFIEAENDSHHDD |
| | | LEFQQLRTFSLLPLKRGFECSHFKMCKLGLHALLQRAGISIPPLQAKDGLVWNDVVNEWWY |
| | | KLFKIAKFETEYRKFAGEILTDGKAVSIVLRKPKRPLQEKQTKKDSKTYNFSEVWGLDPGRR |
| | | DLFVATNNFGQTISCSSREFYEEAKYKSSNKTTHYWIEHDPKILEAIRNMPSPKTCSLQILEMY |
| | | VRFLIPRIDLLLDFRMAKPFRKLKFRRYIFMKKKLRELCQKLTARAGRNTLIGFGDWSATDY |
| | | GGLIKKCPGGPVRKLEKELKHYCTVDSIPEFRTSKLHADCHRELTYQFALRKCKDEVVRLVK |
| | | IYSVLHCRHNGCFGMTVNRDQNASKNILLLTLPHFFGQDRHPAFCRQRS (SEQ ID NO: 627) |
| Crypto- | XP_005840014.1 | MSNIRIVKRKAKGFFKCEDLVTIKDAVKAAHRIMSDASILVRSYYLRWFQSSYPLDSDDKEL |
| phycea | | ELEHFHISMACSIVQGITRPPVRGVGPEQSVKIDVFNDMLDEYKRLYERAPNDKENETDLSLS |
| | | HVLAYSIDNLLTAYKNNIEAHFSKYVKRFIRCDMLAKGFNKSEANRVAAIYTNAYIYDSSLD |
| | | LEPDFMERLGLEATSYSSLFPSKINKGGFPRVYDLKANPWVYLPKMVMINQALETDFSSVEH |
| | | KERRLLNPLPFYSSFVPMHIRIDTSGLSQLLMTKDRLDDFKRSYLAEFGVSLNIKNKGDMLAS |
| | | FEKIFGRKATSNREAGLYATEMWSFLTNLKTCRQWKELDGVVRKNDPKGTQWMFDNAVV |
| | | TDGVSISFQVIDNSMFGRKAFSGRKKRVACQEANDEEDSKQVTREELKTSKLLGCDPGKRDI |
| | | LAITDGIKTICYTKGQRDMDTHKTIRLRTSLKRRRGCGLEEYETQVMNRFQKRSCHPEMFRR |
| | | YACSRKRMEHMLLECYSHPVFREFKFLVYNKTKSSEHRFMHRVLETFKRPQTNLSKARCAS |
| | | GVMRMNALKEVQRHGDIIIGWGNWGKNPNALRCSAGPTPGIGIRRRFESLFKTTTVPEHYTS |
| | | QECPSCKGRCLRKATGNPIMRHHLLRCTNDSCCSRWWNRNVAGAFNILTRLLDGQTLSGNE |
| | | TTGDGLGGDDL (SEQ ID NO: 628) |

### Example 4-Structural Mining for Fanzor Polypeptides and NcRNA Locations

[1373] A general structural mining strategy for identifying suitable Fanzor polypeptides and homologues are shown in FIGS. 27-28. Seeds for the mining method were Fanzor1 and Fanzor2 of Bao and Jurka. 2013. Mobile DNA 4, Article No. 12. Candidates resulting from the structural mining and curation were tested in human cells. Genomic mining results were manually curated to align very closely related Fanzors. Specifically, the closely related Fanzors were close enough related that ends could be predicted. Fanzor16 (Fz16) was demonstrated to work in human cells and the border ncRNA. See also Example 2 herein.

### Example 5-Empty Fanzor Loci

[1374] Using the structural and genomic mining approach previously described (see e.g., Example 4 herein), Applicant also identified at least 23 “empty” Fanzor loci that encode the ncRNA, the IR ends, but not the Fanzor protein itself. Without being bound by theory, Applicant believes these are Fanzor attraction sites. See e.g., FIGS. 29-30.

### Example 7

[1375] Fanzor systems that included N- or C-terminal NLS tagged Fanzor (FZID16) prolylpeptides were evaluated using guide sequences of varying lengths (11-30 nucleotides (nt)). Activity of the system was evaluated by detecting indels as previously described (see strategy related to e.g., FIG. 10B). Results are shown in FIG. 34.

### Example 8

[1376] Additional Fanzor (FZID16) variants were generated (see e.g., FIG. 35 for mutations in relation to wild-type FZID16). Activity of the Fanzor variants were evaluated by detecting indels as previously described (see e.g., Example 2). Results are shown in FIG. 35.

### Example 9

[1377] Additional Fanzor systems and components were identified in various organisms using bioinformatical analysis and other techniques, including but not limited to structural mining, modeling, and analysis. FIG. 36 shows results from bioinformatical and expression characterization of a Fanzor polypeptide and ωRNA from an exemplary algae (Guillardia theta). Structural mining was used to identified Fanzor systems and components. FIG. 37 shows the predicted secondary structure of the ωRNA from G. theta of FIG. 36. FIG. 38 shows results from bioinformatical characterization and identification of G. theta predicted transposon ends from the identified G. theta ωRNA structure.

[1378] FIG. 39 shows results from bioinformatical and expression characterization of a Fanzor polypeptide and ωRNA from Mollusca (Batillaria attramentaria), an exemplary multicellular eukaryotic organism. FIG. 40 shows a predicted secondary structure of the ωRNA from B. attramentaria of FIG. 39. Structural mining was used to identified Fanzor systems and components

[1379] FIG. 41 shows results from the bioinformatical and expression characterization of Fanzor polypeptides and ωRNA identified in Mollusca (Dreissena polymorpha), an exemplary multicellular eukaryotic organism. 4 contigs were evaluated, ωRNA was identified in 2 of them. FIG. 42A-42B shows the predicted secondary structure exemplary ωRNAs identified the two contigs from D. polymorpha of FIG. 41. Structural mining was used to identified Fanzor systems and components

[1380] FIG. 43 shows results from the bioinformatical and expression characterization of Fanzor polypeptides and ωRNA identified in Mollusca (Mercenaria mercenaria), an exemplary multicellular eukaryotic organism. 4 contigs were evaluated, ωRNA was identified in 3 of them. FIG. 44A-44C shows the predicted secondary structures of exemplary ωRNAs identified the three contigs from M. mercenaria of FIG. 43. Structural mining was used to identified Fanzor systems and components

[1381] FIG. 45A-45C shows results from the bioinformatical analysis and prediction of transposon ends of ωRNA identified in M. mercenaria. Boxes indicate accession numbers of contigs where ωRNA was identified of the 4 contigs evaluated. FIG. 45A-45B shows LE and RE transposon end analysis prior to considering ωRNA structure. FIG. 45C shows transposon end bioinformatical analysis from the ωRNA structure, which clarified the transposon LE and RE ends. Structural mining was used to identified Fanzor systems and components.

TABLE 13
provides polynucleotide sequences of and/or encoding exemplary Fanzor
system components from representative Fanzor type 1 and Fanzor type 2 systems.
Additional Exemplary Fanzor systems

| | Accession | | | Predicted omegaRNA | |
|---|---|---|---|---|---|
| Type | No. | Description | Sequence (ORF) | by RNP-RNAseq | TAM |
| Fanzor 1 | NW_ | Guillardia | ATGTCAAACATTAGGATTGTAAAACG | CACTATCCGGTAACG | 5′-NNTTAA-3′ |
| (Cas12- | 005434667 | theta | AAAGGCGAAGGGCTTCTTCAAGTGTG | AAACTACCGGAGAC | |
| like) | e | CCMP2712 | AGGACCTAGTCACAATCAAGGATGCT | GGGTTAGGAGGTGAC | |
| | | unplaced | GTCAAGGCAGCTCATAGGATCATGTC | GACCTCTAAAACCTA | |
| | | genomic | AGATGCGTCCATACTCGTCCGGTCATA | GAACTTAGAGTGCAA | |
| | | scaffold | TTATCTGCGATGGTTCCAGAGCTCATA | AAACGCCATTACGAT | |
| | | GUITHscaf | TCCCCTTGATTCAGATGACAAGGAACT | TGTGATGCCTATTCA | |
| | | fold_7, | TGAGCTTGAGCACTTCCATATATCCAT | AGGGTGTCCCAAGTG | |
| | | whole | GGCCTGCAGCATAGTCCAGGGTATAA | TAAAAAGAAAGCAC | |
| | | genome | CAAGGCCTCCAGTCCGTGGTGTTGGTC | TCTAAGAGCATTAAA | |
| | | shotgun | CTGAACAATCTGTCAAGATAGACGTC | CTCTA (SEQ ID NO: | |
| | | sequence | TTCAATGACATGTTAGATGAGTATAA | 630) | |
| | | | GAGGCTGTACGAGCGTGCTCCAAATG | | |
| | | | ATAAAGAGAACGAAACGGACCTCTCT | | |
| | | | CTATCGCATGTCTTAGCATATTCCATC | | |
| | | | GACAACCTTCTTACCGCGTATAAAAA | | |
| | | | CAACATCGAAGCCCATTTCTCAAAAT | | |
| | | | ATGTCAAACGCTTCATCCGATGTGATA | | |
| | | | TGTTGGCTAAGGGCTTCAATAAGTCTG | | |
| | | | AGGCAAACAGAGTGGCGGCAATATAT | | |
| | | | ACCAATGCCTATATTTATGACTCATCC | | |
| | | | CTCGACCTGGAACCAGACTTTATGGA | | |
| | | | AAGATTAGGCCTTGAGGCAACAAGTT | | |
| | | | ATTCATCTCTATTCCCCTCTAAGATAA | | |
| | | | ATAAGGGCGGTTTTCCAAGGGTCTAT | | |
| | | | GACCTGAAGGCCAACCCTTGGGTCTA | | |
| | | | TCTTCCAAAGATGGTCATGATAAATCA | | |
| | | | GGCCTTAGAGACAGACTTCTCTTCTGT | | |
| | | | AGAGCATAAGGAGAGGAGGCTGCTCA | | |
| | | | ATCCACTGCCCTTCTATTCATCGTTTG | | |
| | | | TTCCGATGCACATACGGATTGATACAT | | |
| | | | CCGGCTTATCGCAGCTGCTGATGACTA | | |
| | | | AGGATAGGCTTGATGATTTCAAGAGA | | |
| | | | TCTTATCTTGCTGAGTTTGGAGTAAGT | | |
| | | | CTAAATATAAAGAACAAGGGTGATAT | | |
| | | | GCTAGCAAGTTTTGAGAAGATCTTTGG | | |
| | | | CCGGAAGGCAACATCCAATAGAGAGG | | |
| | | | CCGGATTGTATGCAACAGAGATGTGG | | |
| | | | AGCTTCTTGACAAACCTGAAGACATG | | |
| | | | CCGTCAATGGAAGGAGCTTGATGGGG | | |
| | | | TTGTTCGTAAGAACGATCCCAAGGGA | | |
| | | | ACACAATGGATGTTTGACAATGCTGTT | | |
| | | | GTAACGGACGGTGTTTCAATCTCATTC | | |
| | | | CAGGTGATCGATAACAGCATGTTTGG | | |
| | | | ACGGAAGGCCTTCTCTGGCAGGAAGA | | |
| | | | AGAGGGTAGCATGTCAGGAGGCCAAT | | |
| | | | GATGAAGAAGATAGCAAGCAGGTAAC | | |
| | | | AAGAGAAGAGCTAAAGACATCGAAGC | | |
| | | | TCTTGGGATGTGACCCTGGGAAGAGA | | |
| | | | GACATCCTAGCAATAACAGATGGCAT | | |
| | | | AAAGACTATCTGTTACACCAAGGGGC | | |
| | | | AGAGAGACATGGACACGCATAAGACA | | |
| | | | ATAAGGTTGAGAACCAGTCTGAAGAG | | |
| | | | GCGCCGAGGCTGCGGCCTAGAGGAGT | | |
| | | | ATGAGACACAGGTGATGAACCGGTTC | | |
| | | | CAGAAACGGTCATGCCATCCTGAGAT | | |
| | | | GTTTCGACGCTATGCCTGTTCCAGGAA | | |
| | | | GAGGATGGAACACATGCTGCTTGAAT | | |
| | | | GTTATTCTCATCCAGTCTTTAGAGAGT | | |
| | | | TCAAATTCTTGGTTTACAACAAGACTA | | |
| | | | AGAGCTCCGAACATAGGTTCATGCAT | | |
| | | | AGGGTGTTGGAAACATTCAAACGGCC | | |
| | | | GCAAACAAACCTGAGCAAGGCGAGGT | | |
| | | | GTGCGTCAGGAGTTATGCGTATGAAT | | |
| | | | GCCTTGAAGGAGGTCCAAAGGCATGG | | |
| | | | AGATATCATTATAGGGTGGGGCAACT | | |
| | | | GGGGAAAGAATCCAAACGCGCTACGA | | |
| | | | TGCTCGGCAGGACCAACCCCAGGCAT | | |
| | | | TGGAATAAGGAGAAGGTTTGAATCGC | | |
| | | | TGTTCAAAACAACAACAGTGCCAGAA | | |
| | | | CACTACACCTCCCAAGAATGTCCGAG | | |
| | | | TTGTAAGGGACGATGCCTAAGAAAGG | | |
| | | | CAACTGGCAACCCGATCATGAGACAC | | |
| | | | CATCTGCTTCGTTGTACAAACGATAGT | | |
| | | | TGCTGTAGCAGGTGGTGGAATCGGAA | | |
| | | | TGTAGCCGGGGCGTTCAACATCCTAA | | |
| | | | CAAGGCTGTTGGATGGACAAACACTA | | |
| | | | TCCGGTAACGAAACTACCGGAGACGG | | |
| | | | GTTAGGAGGTGACGACCTCTAA (SEQ | | |
| | | | ID NO: 629) | | |
| Fanzor 2 | NW_ | Mercenaria | ATGAAGAGAAAACGAGAACAGATGA | TTAGGGCTCGATTCT | 5′-NNTTAA-3′ |
| (TnpB- | 025542472 | mercenaria | CTTTGTGGAAAGCCGCGTTCGTCAATG | TTGCCTTCTCGATGC | |
| like) | | isolate | GACGGGAAACGTTCAAGTCATGGATT | ATTTATTGCCACAGA | |
| | | YKG-2019 | GACAAGGCACGAATGCTGGAATTGAA | TTTTGCTAATGCAGT | |
| | | unplaced | CTGTGACATCTCTTCTGCAAGCTCGAC | TTCTGAGGCAAGAAT | |
| | | genomic | ACATTACTCGGATCTGGATTTGAAAA | GTGTTCGGGTAAAAA | |
| | | scaffold, | GCAAGTGTGCTAAGATAGAAGACAAG | GAGTTAATGGGCAAA | |
| | | ASM14805 | TTTATGTGTACATTTTCTGTCGGCATT | CTAT (SEQ ID | |
| | | 67v1.1 | CGACCTACTTCTAAGCAAAACCGAAC | NO: 632) | |
| | | original_19 | TTTGAACCAGATGCTGAAAGTGAGCA | | |
| | | 12, whole | ACTACGCCTACAATTGGTGTAATCACC | | |
| | | genome | TAGTTAAGGAGAAAGACTTCAAACCT | | |
| | | shotgun | AAGCAGTTCGACTTGCAAAGAGTGGT | | |
| | | sequence | TACTAAAACGAATTCGCACGACGTTC | | |
| | | | CGGCCGAGTACAGACTTCCCGGAGAC | | |
| | | | GACTGGTTTTTCGACAACAAGATGTCT | | |
| | | | TCTATCAAGTTGACCGCCTGTAAGAAC | | |
| | | | TTTTGCACCATGTACAAGTCTGCTCGA | | |
| | | | ACCAATCAGAAGAAAACAAAGGTCGA | | |
| | | | TCTCAGAAACAAAGACACTGCTTTGTT | | |
| | | | ACGCGAAGGATCGTTCGAAGTGCAGA | | |
| | | | GACAATACGTGAGGTTGCTAACGGAA | | |
| | | | AAAGACATACCAGACGAACGAATTCG | | |
| | | | GCAATCGAGAATAGCCTTAATGGCAG | | |
| | | | ACAACTTTTCGAAATCCAAGAAGGAC | | |
| | | | TGGAAAGAAAGGTTTCTCCGACTTTCG | | |
| | | | AAAAATGTGTCTAAGATACCTCCTTTA | | |
| | | | AATCACGACATGAAAGTGTGCAAACG | | |
| | | | TCCGAACGGAAAATTCATACTGCAAA | | |
| | | | TTCCATGCGATCCAATATGTACGCGAC | | |
| | | | AGATACAAGTGCACACCTCGGACTCG | | |
| | | | ATATGTTCCATCGATCCTGGAGGCAG | | |
| | | | GACGTTCGCGACGTGCTACGATCCTA | | |
| | | | GCAATATAAAGACATTTCAAATCGGA | | |
| | | | CCTGAGGCAGACAAGAAGGAAATCAT | | |
| | | | TCACAAATTCCACAACAAGATCGATA | | |
| | | | ATGTTCACCGTCTCTTGTCATATGCTC | | |
| | | | AAAAGAAAAAGCAGACGCAAGCAGT | | |
| | | | GCAAGACAGAATCGGACAGCTGAAGA | | |
| | | | AGCTGCACTTGAAACTGAAAACGTAC | | |
| | | | GTCGATGACGTGCACTTGAAACTGTG | | |
| | | | CTCGTACCTGGTCAAGAATTACAAACT | | |
| | | | GGTCGTTCTTGGCAGGATATCGGTTTC | | |
| | | | GTCCATCGTGAGAAAAGACAGACCGA | | |
| | | | ACCATTTGGCCAAAAAAGGCAACAGG | | |
| | | | GACTTGCTGTGTTGGCAACATTTCAGA | | |
| | | | TTCAGACAGAGACTGTTACATAGAGT | | |
| | | | TCGTGGCACGGACTGCGAAGCGATCG | | |
| | | | CTCAAGACGAACGGTACACTTCAAAG | | |
| | | | ACATGTGGTAACTGTGGAGTGCAAAA | | |
| | | | CAACAAACTGGGTGGAAATGAAACGT | | |
| | | | TTCATTGTAAAAGTTGCAACTACAAA | | |
| | | | ACTCACAGGGACGTCAACGGAGCGAG | | |
| | | | AAACATTCTTTGCAAATACTTGGGACA | | |
| | | | TTTTCCATTTGCTACATAA (SEQ | | |
| | | | ID NO: 631) | | |
| Fanzor 2 | NC_ | Mercenaria | ATGAAGAGAAAACGAGAACAGATGA | TTCGGGTTCGATTCT | 5′-NNNTAG-3′ |
| (TnpB- | 059312 | mercenaria | CTTTGTGGAAAGCCGCGTTTGTCAACG | ATCCCCAGGGCTCGA | |
| like) | | isolate | GGCAGGAAACGTTCAAGTCCTGGATT | ATGCATTTTTGTCAC | |
| | | YKG-2019 | GACAAGGCACGAATGCTGGAATTGAA | AGATTTTGCCAATGC | |
| | | chromosome | CTGTGACGTCTCTTCTGCAAGCTCGAC | AAGATCTGGGGGCA | |
| | | 7, | ACATTACTCTGATCTGAACTTGAAGAC | AGAATGTCTCCGGGT | |
| | | ASM14805 | AAAGTGTGCCAAGACAGACGACAAAT | GAAAAGAGTCAGGC | |
| | | 67v1.1, | TTATGTGTAATTATTCTGTCTGCATAC | TGGAAAGATT (SEQ | |
| | | whole | GACCGACTTCTAAGCAGAAGCGAACG | ID NO: 634) | |
| | | genome | TTGAACCAGATGCTCAAGGTGAGCAA | | |
| | | shotgun | CTATGCTTACAATTGGTGCAATTACCT | | |
| | | sequence | AGTTAAGGAGAAAGACTTCAAACCGA | | |
| | | | AGCAGTTCGACTTGCAAAGAATTGTC | | |
| | | | GCTAAAACGAATTCAACAGACGTTCC | | |
| | | | GGCCGAATACAGGCTTCCAGGAGACG | | |
| | | | ACTGGTTTTTCGACAACAAGATGTCCT | | |
| | | | CTATCAAGTTGACCGCCTGTAAGAACT | | |
| | | | TTTGCACCATGTACAAGTCTACTCAAA | | |
| | | | CCAACCAGAAGAAAACAAAGGTCGAT | | |
| | | | CTCAGAAACAAAGACATTGTTCAGTT | | |
| | | | ACGCGAAGGATCGTTTGAAGTTCAAA | | |
| | | | GCAAGTACGTGAGATTGCTAACGGAA | | |
| | | | AAAGACATACCAGGCGAACGAATTCG | | |
| | | | GCAATCGAGAATTGCTTTGATGCCAG | | |
| | | | ACAGTTTTTCGAAATCAAAGAAGGAC | | |
| | | | TGGAAAGAAAGGTTTCTCAGGCTTTC | | |
| | | | GAAAAATGTATCTAAGATACCACCTTT | | |
| | | | GAGTCACGACATGAAGGTATGCAAAC | | |
| | | | GTCCGAATGGGAAATTCATACTGCAG | | |
| | | | ATTTCATGCGATCCAATATGTACTCGA | | |
| | | | CAGATACAAGTGCAAACTTCAGATTC | | |
| | | | GATATGTTCAATCGATCCGGGAGGCA | | |
| | | | GGACTTTTGCGACATGCTATGATCCTA | | |
| | | | GCAATATAAAGACATTTCAGATCGGA | | |
| | | | CCCGAGGCAGACAAAAAGGAAATCAT | | |
| | | | TCACGAATTTCACAACAAGATCGATT | | |
| | | | ATGTTCACCGTCTCTTGTCGCATGCTC | | |
| | | | AGGAGAAAAAGCAGACGCAAGCGGT | | |
| | | | GCAAGACAGAATCGGACAACTGAAGA | | |
| | | | AGCTGCACCTCAAACTGAAAACGTAC | | |
| | | | GTCGACGACGTGCACTTGAAATTGTG | | |
| | | | CTCGTACCTGGTCAAGAACTACAAAC | | |
| | | | TGGTCGTTCTCGGCAAGATATCGGTTT | | |
| | | | CGTCCATCGTGAGAAAAGACAGGCCG | | |
| | | | AACCATCTTGCCAAAAGCGCTAACAG | | |
| | | | GGACTTGCTCTGTTGGCAGCACTACAG | | |
| | | | ATTCAGACAGAGATTGTTACACAGAG | | |
| | | | TCCGTGGCACGGACTGCGAAGTGATC | | |
| | | | ATACAAGACGAACGTTACACTTCCAA | | |
| | | | GACCTGTGGTAATTGCGGTGAGAAGA | | |
| | | | ACAACAAACTCGGTGGAAAGGAAACG | | |
| | | | TTTACTTGTGAAAGTTGCAATTACAAA | | |
| | | | ACTCATCGAGACGTCAACGGAGCGAG | | |
| | | | AAACATTCTGTGCAAATACTTGGGACT | | |
| | | | TTTTCCATTTGCAGCGTAA (SEQ | | |
| | | | ID NO: 633) | | |

[1382] FIG. 46 shows results from the bioinformatical characterization of Fanzor polypeptides and ωRNA identified in an exemplary fungus (Batrachochytrium salamandrivorans, JAKFGG010000033). FIG. 46 shows analysis of 5 contigs were evaluated. Boxes indicate contigs where ωRNA was identified. FIG. 47 shows the predicted secondary structure an exemplary ωRNA identified from B. salmandrivorans of FIG. 46.

[1383] FIG. 48A-48B shows results from the bioinformatical characterization of Fanzor polypeptides and ωRNA identified in an exemplary fungi (Parasitella parasitica, LN731931 (FIG. 48A) and LN731111 (FIG. 48B)). FIG. 49A-49B shows the predicted secondary structure an exemplary fungi (Parasitella parasitica, LN731931 (FIG. 49A) and LN731111 (FIG. 49B))

### Example 10

[1384] Bioinformatical characterization of small TnpB-like Fanzor genes/polypeptides in Naegleria lovaniensis (Nlov). See e.g., FIG. 50A-50D, FIG. 53A-FIG. 53G and Table 14. 7 copies were identified (labeled as ID34, ID35, ID36, ID37, ID38, ID39, and ID40). ID35 had activity in yeast. The start codon predicted by DNA sequence characterization was incorrect as determined by AF2 prediction. See e.g., the arrow and circle in FIG. 50A. The small deletion (see circle in FIG. 50A), ID35 recovered its structure and demonstrated activity. Besides ID35, all N-terminal extended proteins could bind to omegaRNA as demonstrated by Nlov Fanzor yeast RNP-RNAseq analysis. As shown in FIG. 50B-50C there was a noncoding RNA (ncRNA) that was always 125 nt at an analogous position in each of the Nlov Fanzor copies. Without being bound by theory this is believed to be an omegaRNA (FIG. 50C-50D).

[1385] A TAM screen identified the TAM sequence for the Nlov Fanzors as 5′-(A)NCCG-3′. See e.g., FIG. 51.

[1386] Fanzors ID34-ID40 were codon optimized for human and were analyzed for their ability to target the human genome by an indel assay in human cells. Two RNA species from ID35, one (143nt) was identified by yeast-RNP RNAseq and the extended version (277nt) were tested. ID35 (active in yeast) was also active in human cells. ID36 and ID38 also worked with the 277 nt RNA scaffold (FIG. 52A). A 0.71% indel rate was achieved by ID36 with ID35 277 nt RNA scaffold (FIG. 52B). Without being bound by theory it is possible that N-terminal extension does not matter in human cells.

TABLE 14
Nlov Fanzors

| | | | Poly- |
|---|---|---|---|
| Nlov | | | peptide |
| Fanzor ID | Nucleotide sequence | Polypeptide sequence | Size |
| ID34 | atctcaacgaatgaagagaagtagagaggatgaacctact | MKRSREDEPTHPPTNPSLAHGIIPF | 495 amino |
| | catcctcctactaatccatctcttgcacacggcatcattccat | WDEYSQQVSDELWACSRDSFHEF | acids |
| | tctgggatgagtactcacaacaagtatcggatgaactttgg | NQYNNKGCTDRWFKFSQFTVIES | |
| | gcatgttcaagagattcctttcatgagtttaatcagtacaaca | KPVFDVPLNVHYSITENVAFDNSK | |
| | acaagggatgcactgacagatggttcaaattttctcaattca | KPPQLKKAKKNQKTPQKFQADKS | |
| | ctgtgattgaatcaaagccagtgtttgatgttccactcaatgt | LKIRLYPNEQERTTLNQWMGTAR | |
| | tcattactctataacagaaaatgtggcttttgataactctaaa | WIYNKCLEFTNKSKGVKKNKKNF | |
| | aagccacctcagctcaagaaggcaaagaagaatcaaaag | RTFVVNNDNYQTENQWVVNTPY | |
| | acgccccaaaaatttcaagcagacaaatcattgaaaattcg | DVRDAAANELLTAFKTNFEKKKA | |
| | tctctaccccaatgaacaagaaaggacaacattgaatcagt | GMIDKFMIRFRRKKDRKDHFVLH | |
| | ggatgggaactgctcgttggatctacaacaagtgtttagaa | CKHWKKKTGLYSFIRNIKSAKPLP | |
| | ttcaccaacaaatccaaaggtgtcaagaaaaataagaaga | EELQYDSIIIKNKLNHYYLCIPQVL | |
| | atttcagaacgtttgtggtgaacaacgataattatcagacag | DIRGENQAPQHSGQVVALDPGVR | |
| | aaaatcagtgggttgtaaatactccttatgacgtaagagatg | TFQTTFDLNGYSTKWGSGGAERIG | |
| | ctgccgctaatgaattgttgactgcatttaaaacaaattttga | RLCCAYDKLQSKWSQPEVRHCKR | |
| | aaagaagaaagctggaatgattgacaagttcatgatccgtt | YKYKRAGRRIQQKIRNIVDDLLKK | |
| | tcaggcgaaagaaagacagaaaagatcatttcgttctacat | LCLWLCRNYQVILLPSFETQKMV | |
| | tgcaagcactggaagaaaaagactggactgtattcttttata | KKLHRRINSKTARKMLTWSHYRF | |
| | aggaacatcaagagtgccaaacctttgcctgaggagcttc | KQRLLHKAREHPWTHIYIVNEAY | |
| | agtacgattccatcattattaagaacaagttgaaccattatta | TSKTCSCCGHVYTVGSSEVFRCPS | |
| | tttatgtattccacaagtactggacattaggggtgagaacca | CGSIFDRDINGARNILLRFLTTHRIS | |
| | agcccctcaacattcaggacaagttgtagcattggatccag | F* (SEQ ID NO: 636) | |
| | gagtaagaacatttcagaccacctttgatttgaatggttattc | | |
| | aaccaaatggggctcaggaggtgccgaaagaattggtag | | |
| | attgtgttgcgcgtatgacaagttgcaatcgaagtggtctca | | |
| | accagaagtcagacattgcaaaagatacaagtacaagag | | |
| | agcaggaagaagaattcaacaaaagattagaaatattgtg | | |
| | gatgatcttctcaagaaactgtgtttgtggctgtgtcgaaact | | |
| | accaagtgattttacttccttcgtttgagactcagaaaatggt | | |
| | aaagaaactccataggagaattaatagcaagacagcaag | | |
| | aaaaatgttgacttggtcacattacagattcaagcaaagatt | | |
| | gcttcacaaagctagagagcatccgtggacacacatttata | | |
| | ttgtcaacgaagcgtatacatccaaaacttgctcatgttgtg | | |
| | gacatgtttatacggttggatcatctgaagtgtttcgttgtcc | | |
| | atcatgtggctcaatttttgacagagatatcaatggagcaag | | |
| | aaatattcttcttcgattccttactactcatagaattagtttt | | |
| | (SEQ ID NO: 635) | | |
| ID35 | agagaagtagagaggatgaacctactcatcctcctactaat | MNLLILLLIHLLHTASFHSWACSR | 477 amino |
| | ccatctcttgcacacggcatcattccattcatgggcatgttc | DSFHEFNQYNNKGCTDGWFNFSQ | acids |
| | aagagattcctttcatgagtttaatcagtacaacaacaaggg | FTVIESQPVFDVPLNVHHSITENVA | |
| | atgcactgacggatggttcaacttttctcaattcactgtgatt | FDNSKKPPQLKKAKKGQKTPQKF | |
| | gaatcccagccagtatttgatgttccactcaatgttcatcact | QADKSMKIRLYPNEQERTTLNQW | |
| | ctataacagagaatgtggcttttgataactctaaaaagccac | MGTARWIYNKCLEFTNKSKGVKK | |
| | ctcagctcaagaaggcaaagaagggtcagaagactcccc | NKKNFRTFVVNNDNYQTENQWV | |
| | aaaaatttcaagcggacaaatcaatgaaaattcgtctctacc | VNTPYDVRDAAAIELLTAFNTNFE | |
| | ccaatgaacaagaaaggacaacattgaatcagtggatgg | KKKAGTIDKFMIRFRRKKDRKDH | |
| | gaactgctcgttggatctacaacaagtgtttagaattcacca | FVLRCKHWKKKSGMYSFIRNIKS | |
| | acaaatccaaaggtgtcaagaaaaataagaagaatttcag | AEPLPEELQYDSIIIKNKLNHYYLC | |
| | aacgtttgtggtgaacaacgataattatcagacagaaaatc | IPQVLDIRGENQAPQHSGQVVALD | |
| | agtgggttgtaaatactccttatgacgtaagagatgctgcc | PGVRTFQTTFDLNGYSTKWGSGG | |
| | gctattgaattgttaactgcgttcaacactaattttgaaaaga | AERIGRLCCAYDKLQSKWSQPEV | |
| | agaaggctggaacgattgacaagttcatgatccgtttcagg | RHCKRYKYKRAGRRIQQKIRNIVD | |
| | cgaaagaaagacagaaaagatcatttcgttctgcgttgcaa | DLHKKLCLWLCRNYQVILLPSFET | |
| | gcactggaagaaaaagagtggaatgtattcttttataagga | QKMVKKLHRRINSKTARKMLTW | |
| | acatcaagagcgccgaacctttgcctgaggagcttcagtat | SHYRFKQRLLHKAREHPWTHIYIV | |
| | gattccatcattattaagaacaagttgaaccattattatttat | NEAYTSKTCSCCGHVYTVGSSEVF | |
| | gtattccacaagtactggatattaggggtgagaaccaagccc | RCPSCGSIFDRDINGARNILLRFLT | |
| | ctcaacattcaggacaagttgtagcattggatccaggagta | THRISF* (SEQ ID NO: 638) | |
| | agaacatttcagaccacctttgatttgaatggttattcaacca | | |
| | aatggggctcaggaggtgccgaaagaattggtagattgtg | | |
| | ttgcgcgtatgacaagttacaatcgaagtggtctcaaccag | | |
| | aagtcagacattgcaaaagatacaagtacaagagagcag | | |
| | gaagaagaattcaacaaaagattagaaatattgtggatgat | | |
| | ttacacaagaaactgtgtttgtggctgtgtcgaaactaccaa | | |
| | gtgatcttacttccttcgtttgagactcagaaaatggtaaaga | | |
| | aactccacaggagaattaatagcaagacagcaagaaaaa | | |
| | tgttgacttggtcacattacagattcaagcaaagattgcttca | | |
| | caaagctagagagcatccgtggacacacatttatattgtca | | |
| | acgaagcgtatacatccaaaacttgctcatgttgtggacat | | |
| | gtttatacggttggatcatcggaagtgtttcgttgtccatcat | | |
| | gtggctcaatttttgacagagatatcaatggagccagaaat | | |
| | attcttcttcgattccttactactcatagaattagtttt | | |
| | (SEQ ID NO: 637) | | |
| ID36 | tctcaacgaatgaagagaagtagagaggatgaacctactc | MKRSREDEPTHPPTNPSLAHGIIPF | 495 amino |
| | atcctcctactaatccatctcttgcacacggcatcattccatt | WNEYSQQVSDKLWACSRDSFHEF | acids |
| | ctggaatgagtactcacaacaagtatcggataaactttggg | NQYNNKGCTDGWFNFSQFTVIES | |
| | catgttcaagagattcctttcatgagtttaatcagtacaacaa | KPVFDVPLNVHHSITENVAFDNSK | |
| | caagggatgcacagacggatggttcaacttttctcaattca | KPPQLKKAKKNQKTPQKLQADKS | |
| | ctgtgattgaatccaagccagtgtttgatgttccactcaatgt | LKIRLYPNEQERTTLNQWMGTAR | |
| | ccatcactctataacagagaatgtggcttttgataactctaaa | WIYNKCLEFTHNFKDVKKNKKNF | |
| | aagccacctcagctcaagaaagcaaaaaagaatcaaaag | RTFVVNNDNYQTENQWVVNTPY | |
| | acgccccaaaaattgcaagcagacaaatcattgaaaatcc | DVRDAAAIELLTAFNTNFEKKKA | |
| | gactctaccccaatgaacaagaaaggacaacattgaatca | GMIDKFMIRFRRKKDRKDHFVLH | |
| | gtggatgggaactgctcgttggatctacaacaagtgcttag | CKHWKKKSGLYSFIRNIKSAEPLP | |
| | aatttacacacaatttcaaagatgtcaagaaaaataagaag | EELQYDSIIIKNKLNHYYLCIPQVL | |
| | aatttcagaacgtttgtggtgaataacgataattatcagaca | DIRGENQAPQHSGQVVALDPGVR | |
| | gaaaatcagtgggttgtgaatactccttatgacgtaagaga | TFQTTFDLNGYSTKWGSGGAERIG | |
| | cgctgccgctattgaattgttgactgcgttcaacactaatttt | RLCCAYDKLQSKWSQPEVRHCKR | |
| | gaaaagaagaaggctggaatgattgacaagttcatgatcc | YKYKRAGRRIQQKIRNIVDDLHK | |
| | gtttcaggcgaaagaaagacagaaaagatcattttgttcta | KLCLWLCRNYQVILLPSFETQKM | |
| | cattgcaagcactggaagaaaaagagtggactgtattctttt | VKKLHRRINSKTARKMLTWSHYR | |
| | ataaggaatatcaagagtgccgaacctttgcctgaggagc | FKQRLLHKAREHPWTHIYIVNEAY | |
| | ttcagtatgattccatcattattaagaacaagctgaaccatta | TSKTCSCCGHVYTVGSSEVFRCPS | |
| | ttatttatgtattccacaagtactggatattaggggtgagaac | CGSIFDRDINGARNILLRFLTTHGIS | |
| | caagcccctcaacattcaggacaagttgtagcattggatcc | F* (SEQ ID NO: 640) | |
| | aggagttagaacatttcagaccacctttgatttgaacggttat | | |
| | tcaaccaaatggggctcaggaggtgccgaaagaattggt | | |
| | agattgtgttgcgcgtatgacaagttacaatcgaagtggtct | | |
| | caaccagaagtcagacattgcaaaagatacaagtacaag | | |
| | agagcaggaagaagaattcaacaaaagattagaaatattg | | |
| | tggatgatttacacaagaaactgtgtttgtggttgtgtcgaaa | | |
| | ctaccaagtgatcttacttccttcgtttgagactcagaaaatg | | |
| | gtaaagaaactccataggagaattaatagcaagacagcaa | | |
| | gaaaaatgttgacttggtcacattacagattcaagcaaagat | | |
| | tgcttcacaaagctagagagcatccgtggacacacatttat | | |
| | attgtcaacgaagcgtacacatccaaaacttgctcatgttgt | | |
| | ggacatgtttatacggttggatcatctgaagtgtttcgttgtc | | |
| | catcatgtggctcaatttttgacagagatatcaatggagcca | | |
| | gaaatattcttcttcgattccttactactcatggaattagttt | | |
| | t (SEQ ID NO: 639) | | |
| ID37 | tctcaacgaatgaagagaagtagagaggatgaacccact | MKRSREDEPTHPPTNPSLAHGIIPF | 495 amino |
| | catcctcctactaatccatctcttgcacacggcatcattccat | WDEYSQQVSDKLWACSRDSFHEF | acids |
| | tctgggatgagtactcacaacaagtatcggataaactttgg | NQYNNKGCTDGWFNFSQFTVIES | |
| | gcatgttcaagagattcctttcatgagtttaatcagtacaaca | KPVFDVPLSVHHSITENVAFDNSK | |
| | acaagggatgcactgacggatggttcaacttttctcaattca | KPPQLKKAKKNQKVAQKFQADK | |
| | ctgtgattgaatccaagccagtgtttgatgttccactcagtgt | SLKIRLYPKEQERTTLNQWMGTA | |
| | ccatcactctataacagagaatgtggcttttgataactctaaa | RWIYNKCLEFTHNFKGVKKNKKN | |
| | aagccacctcagctcaagaaagcaaaaaagaatcaaaag | FRTVVVNNDNYQTENQWVVNTP | |
| | gtggcccaaaaatttcaagcagacaaatccttgaaaatccg | YDVRDAAAIELLTAFKTNFEKKK | |
| | actctaccccaaagaacaagaaaggacaacattgaatcag | AGTIDKFMIRLRRKKDRKDHFVL | |
| | tggatgggaactgctcgttggatctacaacaagtgtttaga | HCKHWKKKNGLYSFIRNIKSAEPL | |
| | atttacacacaacttcaaaggtgtcaagaaaaataagaaga | LEELQYDSIIIKNKLNRYYLCIPQV | |
| | atttccgaacggttgtggtgaacaatgataattatcagacag | LEIRGENQAPQHSGQVVALDPGV | |
| | aaaatcagtgggttgtaaatactccttatgacgtaagagatg | RTFQTTFDLNGYSTKWGSGGAERI | |
| | ctgctgctattgaattgttgactgcgtttaaaacaaactttga | GRLCCAYDKLQSKWSQPEVRHCK | |
| | aaagaagaaagctggaacaattgacaagttcatgatccgtt | RYKYKRAGRRIQQKIRNIVDDLHK | |
| | taaggcgaaagaaagacagaaaagatcatttcgttctacat | KLCLWLCRNYQVILLPSFETQKM | |
| | tgcaagcactggaagaaaaagaatggactgtattcttttata | VKKLHRRINSKTARKMLTWSHYR | |
| | aggaacatcaagagtgccgaacctttgcttgaggagcttc | FKQRLLHKAREHPWTHIYIVNEAY | |
| | agtacgattccatcattattaagaacaagttgaaccgttatta | TSKTCSCCGHVYTVGLSEVFRCPS | |
| | tttatgtattccacaagtactggaaattaggggtgagaacca | CGSIFDRDINGARNILLRFLTTHRIS | |
| | agcccctcaacattcaggacaagttgtagcgttggatccag | F* (SEQ ID NO: 642) | |
| | gagtaagaacatttcagaccacctttgatttgaatggttattc | | |
| | aaccaaatggggctcaggaggtgccgaaagaattggtag | | |
| | attgtgttgcgcgtatgataagttacaatcgaagtggtctca | | |
| | accagaagtcagacattgcaaaagatacaagtacaagag | | |
| | agcaggaagaagaattcaacaaaagattagaaatattgtg | | |
| | gatgatctacacaagaaactgtgtttgtggttgtgtcgaaac | | |
| | taccaagtgatcttacttccttcgtttgagactcagaaaatgg | | |
| | taaagaaactccataggagaattaatagcaagacagcaag | | |
| | aaaaatgttgacttggtcacattacagattcaagcaaagatt | | |
| | gcttcacaaagctagagagcatccgtggacacacatttata | | |
| | ttgtcaacgaagcgtacacatccaaaacttgctcatgttgtg | | |
| | gacatgtttatacggttggattatctgaagtgtttcgttgtcc | | |
| | atcatgtggctcaatttttgacagagatatcaatggagcaaga | | |
| | aatattcttcttcgattccttactactcatagaattagcttt | | |
| | (SEQ ID NO: 641) | | |
| ID38 | tctcaaacaatgaagagaagtagagaggatgagcccact | MKRSREDEPTHPPTNPSLAHGIIPF | 495 amino |
| | catcctcctactaatccatctcttgcacacggcatcattccat | WDEYSQQVSDKLWACSRDSFHEF | acids |
| | tctgggatgagtactcacaacaagtatcggataaactttgg | NQYNNKGCTDGWFNFSQFTVIES | |
| | gcatgttcaagagattcctttcatgagtttaatcagtacaaca | KPVFDVPLNVHHSITENVAFDNSK | |
| | acaagggatgcacagacggatggttcaacttttctcaattc | KPPQLKKAKKNQKVAQKFQADK | |
| | actgtgattgaatccaagccagtgtttgatgttccactcaatg | SLKIRLYPNEQERTTLNQWMGTA | |
| | tccatcactctataacagagaatgtggcttttgataactctaa | RWIYNKCLEFTNKSKGVKKNKKN | |
| | aaagccacctcagctcaagaaagcaaaaaagaatcaaaa | FRTFVVNNDNYQTENQWVVNTP | |
| | ggtggcccaaaaatttcaagcagacaaatccttgaaaatcc | YDVRDAAAIELLTAFNTNFEKKK | |
| | gactctaccccaatgaacaagaaaggacaacattgaatca | AGTIDKFMIRFRRKKDRKDHFVLH | |
| | gtggatgggaactgctcgttggatctataacaagtgtttaga | CKHWKKKSGLYSFIRNIKSSEPLPE | |
| | attcactaacaaatccaaaggtgtcaagaaaaataagaag | ELQYDSIIIKNKLNHYYLCIPQVLD | |
| | aatttcagaacgtttgtggtgaacaacgataattatcagaca | IRGENQAPQHSGQVVALDPGVRT | |
| | gaaaatcagtgggttgtgaatactccttatgacgtaagagat | FQTTFDLNGYSTKWGSGGAERIG | |
| | gctgccgctattgaattgttgactgcgttcaacactaattttg | RLCCAYDKLQSKWSQPEVRHCKR | |
| | aaaagaagaaggctggaacgattgacaagttcatgatccg | YKYKRAGRRIQQKIRNIVDDLHK | |
| | ttttaggcgaaagaaagacagaaaagatcatttcgttctaca | KLCLWLCRNYQVILLPSFETQKM | |
| | ttgcaagcactggaagaaaaagagtggactgtattcttttat | VKKLHRRINSKTARKMLTWSHYR | |
| | aaggaacatcaagagttccgaacctttgcctgaggagcttc | FKQRLLHKAREHPWTHIYIVNEAY | |
| | agtacgattccatcattattaagaacaagttgaaccattatta | TSKTCSCCGHIYTVGSSEVFRCPSC | |
| | tttatgtattccacaagtactggatattaggggtgagaacca | GSIFDRDINAARNILLRFLTTHRIS | |
| | agcccctcaacattcaggacaagttgtagcattggatccag | F* (SEQ ID NO: 644) | |
| | gagtaagaacatttcagaccacctttgatttgaatggttattc | | |
| | aaccaaatggggctcaggaggtgccgaaagaattggtag | | |
| | attgtgttgcgcgtatgacaagttacaatcgaagtggtctca | | |
| | accagaagtcagacattgcaaaagatacaagtacaagag | | |
| | agcaggaagaagaattcaacaaaagattagaaatattgtg | | |
| | gatgatttacacaagaaactgtgtttgtggttgtgtcgaaact | | |
| | accaagtgattttacttccttcgtttgagactcagaaaatggt | | |
| | aaagaaactccacaggagaattaatagcaagacagcaag | | |
| | aaaaatgttgacttggtcacattacagattcaagcaaagatt | | |
| | gcttcacaaagctagagagcatccgtggacacacatttata | | |
| | ttgtcaacgaagcgtatacatccaaaacttgctcatgttgtg | | |
| | gacatatttatacggttggatcatccgaagtgtttcgttgtcc | | |
| | atcatgtggctcaatttttgacagagatatcaatgcagcaag | | |
| | aaatattcttcttcgattccttactactcatagaattagtttt | | |
| | (SEQ ID NO: 643) | | |
| ID39 | tctcaaacaatgaagagaagtagagaggatgaacctactc | MKRSREDEPTHPPTNPSLAHGIIPF | 385 Amino |
| | atcctcctactaatccatctcttgcacacggcatcattccatt | WDEYSQQVSDELWACSRDSFHEF | Acids |
| | ctgggatgagtactcacaacaagtatcggatgaactttggg | NQYNNKGCTDGWFNFSQFTVIES | |
| | catgttcaagagattcctttcatgagtttaatcagtacaacaa | KPVFDVPLNVHHSITENVAFDNSK | |
| | caagggatgcactgacggatggttcaacttttctcaattcac | KPPQLKKAKKNQKVAQKFQADK | |
| | tgtgattgaatccaagccagtgtttgatgttccactcaatgtt | SLKIRLYPNEQERTTLNQWMGTA | |
| | caccactccataacagagaatgtggcttttgataactctaaa | RWIYNKCLEFTHNFKDVKKNKKN | |
| | aagccacctcagctcaagaaagcaaaaaagaatcaaaag | FRTFVVNNDNYQTENQWVVNTP | |
| | gtggcccaaaaatttcaagcagacaaatccttgaaaatccg | YDVRDAAAIELLTAFNTNFEKKK | |
| | actctaccccaatgaacaagaaaggacaacattgaatcag | AGMIDKFMIRFRRKKDRKDHFVL | |
| | tggatgggaactgctcgttggatctacaacaagtgcttaga | HCKHWKKKSGLYSFIRNIKSAEPL | |
| | atttacacacaacttcaaagatgtcaagaaaaacaagaag | PEELQYDSIIIKNKLNHYYLCIPQV | |
| | aatttcagaacgtttgtggtgaacaacgataattatcagaca | LDIRGENQAPQHSGQVVALDPGV | |
| | gaaaatcagtgggttgtgaatactccttatgacgtaagagat | RTFQTTFDLNGYSTKWGSGGAERI | |
| | gctgccgctattgaattgttgactgcgttcaacactaattttg | GRLCCAYDKLQSKWSQPEVRHCK | |
| | aaaagaagaaggctggaatgattgacaagttcatgatccg | RYKYKRAGRRIQQKIRNIVDDLHK | |
| | tttcaggcgaaagaaagacagaaaagatcattttgttctcca | NCVCGCVETTK* (SEQ ID | |
| | ctgcaagcactggaagaaaaagagtggactgtattcttttat | NO: 646) | |
| | aaggaacatcaagagtgccgaacctttgcctgaggagctt | | |
| | cagtacgattccatcattattaagaacaagttgaaccattatt | | |
| | atttatgtatcccacaagtactggatattaggggtgagaacc | | |
| | aagcccctcaacattcaggacaagttgtagcattggatcca | | |
| | ggagtaagaacatttcagaccacctttgatttgaatggttatt | | |
| | caaccaaatggggctcaggaggtgccgaaagaattggta | | |
| | gattgtgttgcgcgtatgataagttgcaatcgaagtggtctc | | |
| | aaccagaagtcagacattgcaaaagatacaagtacaaga | | |
| | gagcaggaagaagaattcaacaaaagattagaaatattgt | | |
| | ggatgatcttcacaagaactgtgtttgtggctgtgtcgaaac | | |
| | taccaag (SEQ ID NO: 645) | | |
| ID40 | Tctcaaacaatgaagagaagtagagaggatgaacctact | MKRSREDEPTHPPTNPSLAHGIIPF | 327 amino |
| | catcctcctactaatccatctcttgcacacggcatcattccat | WDEYSQQVSDELWACSRDSFHEF | acids |
| | tctgggatgagtactcacaacaagtatcggatgaactttgg | NQYNNKGCTDGWFNFSQFTVIES | |
| | gcatgttcaagagattcctttcatgagtttaatcagtacaaca | KPVFDVPLNVHHSITENVAFDNSK | |
| | acaagggatgcactgacggatggttcaacttttctcaattca | KPPQLKKAKKNQKVAQKFQADK | |
| | ctgtgattgaatccaagccagtgtttgatgttccactcaatgt | SLKIRLYPNEQERTTLNQWMGTA | |
| | tcatcactctataacagagaatgtggcttttgataactctaaa | RWIYNKCLEFTNKSKGVKKNKKN | |
| | aagccacctcagctcaagaaagcaaaaaagaatcaaaag | FRTFVNNDNYQTENQWVVNTPY | |
| | gtggcccaaaaatttcaagcagacaaatccttgaaaatccg | DVRDAAAIELLTAFKTNFEKKKA | |
| | actctaccccaatgaacaagaaaggacaacattgaatcag | GTIDKFMIRFRRKKDRKDHFVLHC | |
| | tggatgggaactgctcgttggatctacaacaagtgtttaga | KHWKKKNGLYSFIRNIKSAEPLPV | |
| | attcaccaacaaatccaaaggtgtcaagaaaaataagaag | ELQYDSIIIKNKLNHYYLCIPQVLD | |
| | aatttcagaacgtttgtgaacaacgataattatcagacagaa | IRGENQAPQHSGQVVALDPGVRT | |
| | aatcagtgggttgtgaatactccttatgacgtaagagatgct | FQTTFDLNGYSTKMGLRRCRKNW* | |
| | gccgctattgaattgttgactgcgttcaaaacgaacttcgaa | (SEQ ID NO: 648) | |
| | aagaagaaggctggaacgattgacaagttcatgatccgttt | | |
| | taggcgaaagaaagacagaaaagatcattttgttctccact | | |
| | gcaagcactggaagaaaaagaacggactgtattcttttatt | | |
| | aggaacatcaagagtgccgaacctttgcctgtggagcttc | | |
| | agtacgattccatcattattaagaacaagttgaaccattatta | | |
| | tttatgtattccacaagtactggatattaggggtgagaacca | | |
| | agcccctcaacattcaggacaagttgtagcattggatccag | | |
| | gagtaagaacatttcagaccacctttgatttgaatggttattc | | |
| | aaccaaaatggggctcaggaggtgccgaaagaattgg | | |
| | (SEQ ID NO: 647) | | |

### Example 11

[1387] The structure of a representative Fanzor complexed with an omega RNA and target was modeled. FIG. 54 shows ternary Fanzor-omega RNA-target DNA complex modeling data based on Spu Fanzor (ID83). he chain ID of the protein is P, the omega RNA is W, the DNA target strand is T, and the DNA non-target strand is N. FIG. 55A-55D show views of the 3D model structure (FIGS. 55A and 55C) and 3D ribbon model (FIGS. 55B and 55D) for an exemplary Fanzor-omega RNA-target DNA complex generated from the data shown in FIG. 54. NTS refers to the non-target strand. TS refers to the target strand.

### Example 12

[1388] Additional Fanzor mutants were engineered and analyzed for functionality against a target locus in the human genome using an indel assay. FIG. 56A-56D show results from functional screening of Fanzor mutation variants. N- or C-terminally tagged (previously described) SpuFanzor wild-type (WT) or variants harboring mutations were screened for indel activity against a target locus in the human genome (FIG. 56A). Applicant also conducted R-substitution scanning of untagged Spu Fanzor WT (Fanzor ID16) or variants harboring point mutations in the Wedge (WED) and/or Bridge Helix domain (FIG. 56B). Untagged or Tagged (C- or N-terminal tag) WT or SpuFanzor mutation variants harboring mutations in the RuvC domain were screened for indel activity against a target locus in the human genome (FIG. 56C). (FIG. 56D) Untagged or Tagged (C- or N-terminus) WT or SpuFanzor mutation variants harboring various combinations of point mutations were screened for indel activity against a target locus in the human genome (FIG. 56D).

### Example 13

[1389] FIG. 57 shows a comparison of the architectures of TnpB/Fanzor/Cas12 proteins. FIG. 58 shows a detail of the REC architecture of TnpB, Fanzor2 and Fanzor 1 (e.g., ID83). The scaffoldREC (scaREC) can harbor REC1 domain. From a structural comparison of all Cas12 proteins (X-ray crystal structures and models), TnpB, and Fannzor (ID83), Applicant observed that the gRNA/omegaRNA contains a core region that interacts the same way in each system with the WED/BH areas of the TnpB and some Cas12 proteins, while the remaining portion seems to evolve freely to, without being bound by theory, retain some stability. Applicant referred to this observed core region in the gRNAs the “nexus area”. The nexus area is a hairpin structure (See also e.g., FIG. 59B). Applicant also observed that the scaffoldREC+wREC (a WED domain harbored by a REC domain) cover the hybrid spacer:target duplex on one side. The Bridge helix (BH)+bREC cover the other side of the hybrid spacer:target duplex (FIG. 59A). Colors noted in FIG. 59A are represented in greyscale. Applicant also observed in their models that these REC domains that protect the hybrid spacer:target are isolated and do not interact much with other parts of the protein and seem to only cover the hybrid region. As such and without being bound by theory, Applicant identified these REC domains as domains and/or locations within the protein suitable for engineering chimeric proteins harboring REC domains from different proteins.

### Example 14

[1390] As previously discussed, Applicant identified that the REC domains that protect the hybrid spacer:target complex are suitable for chimeric engineering. As shown in FIG. 60A-60L Applicant modeled Cas12 protein complexes (FIG. 60A-60K show Cas12a-Cas12k, respectively, and FIG. 60L shows Cas12m). Three Cas12 proteins (Cas12a, Cas12d, and Cas12e in FIGS. 60A, 60D, and 60E, respectfully) contain a secondary wREC (wREC2) domain positioned right after their first REC domain (wREC1). Applicant observed that Cas12 of FIG. 60C may have a REC upstream of the WED. The Cas12 of FIG. 60F was modeled to form a dimer, thus resulting the dimer having two RECs. Applicant has identified that these wREC2 domains of e.g., Cas12a, Cas12d, and Cas12e are suitable for insertion into Fanzor so as to generate a chimeric Fanzor. Further, Applicant has identified several exemplary positions within different Fanzors where the chimeric REC2 domains can be inserted. These sites are S246 in Fanzor ID83, N259 in Fanzor ID16, K165 in Fanzor ID89, and G210 in Fanzor ID 36. Applicant also at least envisions insertions at positions analogous to these in other Fanzors and in homologues and orthologs thereof. FIG. 61A-61C shows identification and modeling of a secondary wREC (wREC2) in Cpf1 (Cas12a) (FIG. 61A), Cas12d (FIG. 61B), and Cas12e (FIG. 61C). The chimeric REC2 domain can be directly fused and/or linked (e.g., via a GS linker or other linker described herein) to the Fanzor polypeptide. The linker can be included at the N- and/or C terminus of the REC2 sequence.

The REC2 sequence from Cpf1 (Cas12a) was:
(SEQ ID NO: 649)
NTLSFILEEFKSDEEVIQSFCKYKTLLRNENVLETAEALFNELNSIDLT
HIFISHKKLETISSALCDHWDTLRNALYERRISELTGKITKSAKEKVQR
SLKHEDINLQEIISAAGKELSEAFKQKTSEILSHAHAALDQPLPTTLKK
QEEKEILKSQLDSLLGLYHLLDWFAVDESNEVDPEFSARLTGIKLEMEP
SLSFYNKARNYATKKPYS.
The REC2 sequence from Cas12d was:
(SEQ ID NO: 650)
NLRNIPRFFGESKKEQFNKFINKSLPTIDVGLKILEDIRNALETVSVRK
PPSITEEYVTKQLEKLSRKYKINAFNSNRFKQITEQVLRKYNNGELPKI
SEVFYRYPRESHVAIRILPVKISNPRKDISYLLDKYQISPDWKNSNPGE
VVDLIEIYKLTLGWLLSCNKDFSMDFSSYDLKLFPEAASLIKNFGSCLS
GYYLSKMIFNCITSEIKGMITLYTRD.
The REC2 sequence from Cas12e was:
(SEQ ID NO: 651)
PVVERRENEVDWWNTINEVKKLIDAKRDMGRVFWSGVTAEKRNTILEGY
NYLPNENDHKKREGSLENPKKPAKRQFGDLLLYLEKKYAGDWGKVFDEA
WERIDKKIAGLTSHIEREEARNAEDAQSKAVLTDWLRAKASFVLERLKE
MDEKEFYACEIQLQKWYGDLRGNPFAVEAE.

[1391] Various modifications and variations of the described methods, pharmaceutical compositions, and kits of the invention will be apparent to those skilled in the art without departing from the scope and spirit of the invention. Although the invention has been described in connection with specific embodiments, it will be understood that it is capable of further modifications and that the invention as claimed should not be unduly limited to such specific embodiments. Indeed, various modifications of the described modes for carrying out the invention that are obvious to those skilled in the art are intended to be within the scope of the invention. This application is intended to cover any variations, uses, or adaptations of the invention following, in general, the principles of the invention and including such departures from the present disclosure come within known customary practice within the art to which the invention pertains and may be applied to the essential features herein before set forth.

1. A non-naturally occurring, engineered composition comprising a) a Fanzor polypeptide comprising a Ruv-C nuclease domain, the Ruv-C nuclease domain optionally comprising Ruv-CI, Ruv-CII, and Ruv-CIII subdomains, and b) an ωRNA component molecule comprising a scaffold and a reprogrammable spacer sequence, ωRNA component molecule capable of forming a complex with the Fanzor polypeptide and directing the Fanzor polypeptide to a target polynucleotide.

2. The composition of claim 1, wherein the Fanzor polypeptide further comprises a REC domain, a bridge helix domain, or both, optionally wherein the Fanzor polypeptide comprises a non-native REC domain, optionally wherein the Fanzor polypeptide comprises about 125 to about 1800 amino acids, optionally wherein the reprogrammable spacer sequence comprises a spacer of 10 nucleotides to 50 nucleotides in length, optionally wherein the ωRNA component molecule comprises a scaffold of about 20 to 200 nucleotides in length, optionally wherein the Fanzor complex binds a target adjacent motif (TAM) sequence 5′ and/or 3′ of the target polynucleotide, optionally wherein the target polynucleotide is DNA, or optionally further comprising a homologous recombination donor template comprising a donor sequence for insertion into a target polynucleotide.

3. (canceled)

4. (canceled)

5. (canceled)

6. (canceled)

7. (canceled)

8. (canceled)

9. (canceled)

10. The composition of claim 1, further comprising a functional domain associated with the Fanzor protein, optionally wherein the functional domain is a transposase, an integrase, a nucleobase deaminase, a reverse transcriptase, a recombinase, an integrase, a topoisomerase, a retrotransposon, phosphatase, polymerase, a ligase, a helitron, a helicase, a methylase, a demethylase, a translation activator, a translation repressor, a transcription activator, a transcription repressor, a transcription release factor, a chromatin modifier, a histone modifier, an acetylase, a deacetylase, a reverse transcriptase, a nuclease.

11. (canceled)

12. The composition of claim 1, wherein the Fanzor polypeptide is operatively coupled to one or more nuclear localization signal polypeptides at the C-terminus, the N-terminus, or both of the Fanzor polypeptide, optionally wherein Fanzor activity is increased 1 to 50 fold or more as compared to a wild-type Fanzor or a Fanzor lacking one or more nuclear localization signals.

13. The composition of claim 1, wherein the Fanzor polypeptide comprises one or more amino acid mutations as compared to a wild type, whereby the mutations increase binding and/or interaction with a target DNA and/or an ωRNA component molecule, and/or increase Fanzor activity, optionally wherein the Fanzor polypeptide comprises one or more mutations of one or more neutral and/or negatively charged amino acids to one or more positively charged amino acids, optionally wherein the one or more mutations are made in and/or in effective proximity to the DNA interaction region of the Fanzor polypeptide, optionally wherein the one or more mutations comprise one or more mutations of FIG. 10C-10E, FIG. 35, 56A-56D, or optionally wherein Fanzor activity is increased 1 to 50 fold or more as compared to a wild-type Fanzor or a Fanzor lacking one or more nuclear localization signals.

14. (canceled)

15. (canceled)

16. (canceled)

17. (canceled)

18. The composition of claim 1, wherein the Fanzor is
a. a yeast Fanzor;
b. an amoeba Fanzor;
c. a protist Fanzor;
d. a metazoan Fanzor;
e. an algae Fanzor;
f. a fungi Fanzor;
g. a eukaryotic Fanzor;
h. a Mollusca Fanzor;
i. from an organism of the genus Eremothecium, Ashbya, Spizellomyces, Torulaspora, Naegleria, Rhizopus, Guillardia, Batillaria, Dreissena, Mercenaria, Batrachochytrium, or Parasitella
j. a virus Fanzor, optionally a Bodo saltans virus, a Harvforvirus, Homavirus, Dishui Lake Large Algae virus 1, or Yasminevirus Fanzor;
k. a Fanzor selected from or is encoded by a polynucleotide set forth in Table 1, Table 6, Table 7, Table 8, Table 9, Table 10, Table 11, Table 12, Table 13, Table 14, FIG. 20, FIG. 35, FIG. 56A-56D or any combination thereof, or is a homolog, ortholog, or variant thereof;
or
l. any combination of a-k.

19. A vector system comprising one or more vectors encoding the Fanzor polypeptide, the ωRNA component, or both of claim 1.

20. An engineered cell comprising the composition and/or vector system of claim 1.

21. A method of modifying a target polynucleotide sequence in a cell, comprising introducing into the cell the composition of claim 1, optionally wherein the modifying comprises cleaving a DNA polynucleotide, optionally wherein the cleavage occurs distal to a target-adjacent motif, optionally wherein the cleavage occurs at the site of the spacer annealing site or 3′ of the target sequence, optionally wherein cleavage occurs about 20-22 nucleotides away from the target adjacent motif, optionally wherein the polypeptide and/or ωRNA component molecules are provided via one or more polynucleotides encoding the polypeptides and/or ωRNA component molecule(s), and wherein the one or more polynucleotides are operably configured to express the Fanzor polypeptide and/or the ωRNA component molecule, optionally wherein the one or more mutations include substitutions, deletions, and insertions.

22. (canceled)

23. (canceled)

24. (canceled)

25. (canceled)

26. (canceled)

27. (canceled)

28. An engineered, non-naturally occurring composition comprising:
a. a Fanzor polypeptide, wherein the Fanzor polypeptide is catalytically inactive,
b. a nucleotide deaminase associated with or otherwise capable of forming a complex with the Fanzor protein, and
c. an ωRNA component molecule capable of forming a complex with the Fanzor polypeptide and directing site-specific binding at a target sequence.

29. The composition of claim 28, wherein the Fanzor polypeptide is selected from or is encoded by a polynucleotide set forth in Table 1, Table 6, Table 7, Table 8, Table 9, Table 10, Table 11, Table 12, Table 13, Table 14, FIG. 20, FIG. 35, FIG. 56A-56D, or any combination thereof, or is a homolog, ortholog, or variant thereof, optionally wherein the nucleotide deaminase is an adenosine deaminase or a cytidine deaminase.

30. (canceled)

31. One or more polynucleotides encoding one or more components of the composition of claim 28.

32. One or more vectors encoding the one or more polynucleotides of claim 31.

33. A cell or progeny thereof genetically engineered to express one or more components of the composition of claim 28.

34. A method of editing nucleic acids in target polynucleotides comprising delivering the composition of claim 28 to a cell or population of cells comprising the target polynucleotides, optionally wherein the target polynucleotides are target sequences within genomic DNA, optionally wherein the target polynucleotide is edited at one or more bases to introduce a G→A or C→T mutation.

35. (canceled)

36. (canceled)

37. An isolated cell or progeny thereof comprising one or more base edits made using the method of claim 34.

38. An engineered, non-naturally occurring composition comprising:
a. a catalytically dead Fanzor polypeptide,
b. a reverse transcriptase associated with or otherwise capable of forming a complex with the Fanzor polypeptide, and
c. an ωRNA component molecule capable of forming a complex with the Fanzor protein and directing site-specific binding of the complex to a target sequence of a target polynucleotide, the guide molecule further comprising a donor template encoding a donor sequence for insertion into the target polynucleotide.

39. One or more polynucleotides encoding one or more components of the composition of claim 38.

40. One or more vectors encoding the one or more polynucleotides of claim 39.

41. A method of modifying target polynucleotides comprising;
delivering the composition of claim 38 to a cell, or population of cells, comprising the target polynucleotides, wherein the complex directs the reverse transcriptase to the target sequence and the reverse transcriptase facilitates insertion of a donor sequence encoded by the donor template from the ωRNA component molecule into the target polynucleotide, optionally wherein insertion of the donor sequence:
a. introduces one or more base edits;
b. corrects or introduces a premature stop codon;
c. disrupts a slice site;
d. inserts or restores a splice site;
e. inserts a gene or gene fragment at one or both alleles of the target polynucleotide; or
f. any combination thereof.

42. (canceled)

43. An isolated cell or progeny thereof comprising the modifications made using the method of claim 41.

44. An engineered, non-naturally occurring composition comprising:
a. a Fanzor polypeptide,
b. a non-LTR retrotransposon protein associated with or otherwise capable of forming a complex with the Fanzor polypeptide, and
c. an ωRNA component molecule capable of forming a complex with the Fanzor polypeptide and directing site-specific binding of the complex to a target sequence of a target polynucleotide, the ωRNA molecule further comprising a donor template encoding a donor sequence for insertion into the target polynucleotide and located between two binding elements capable of forming a complex with the non-LTR retrotransposon protein.

45. The composition of claim 44, wherein the Fanzor protein is fused to the N-terminus of the non-LTR retrotransposon protein, optionally wherein the Fanzor protein is engineered to have nickase activity.

46. (canceled)

47. The composition of claim 44, wherein the ωRNA component molecule directs the fusion protein to a target sequence 5′ of the targeted insertion site, and wherein the Fanzor protein generates a strand break at the targeted insertion site, optionally wherein the ωRNA component molecule directs the fusion protein to a target sequence 3′ of the targeted insertion site, and wherein the Fanzor protein generates a strand break at the targeted insertion site, optionally wherein the donor polynucleotide further comprises a polymerase processing element to facilitate 3′ end processing of the donor polynucleotide sequence, optionally wherein the donor polynucleotide further comprises a homology region to the target sequence on the 5′ end of the donor construct, the 3′ end of the donor construct, or both, optionally wherein the homology region is from 8 to 25 base pairs.

48. (canceled)

49. (canceled)

50. (canceled)

51. (canceled)

52. One or more polynucleotides encoding one or more components of the composition of claim 44.

53. One or more vectors comprising the one or more polynucleotides of claim 44.

54. A method of modifying target polynucleotides comprising;
delivering the composition of claim 44 to a cell or population of cells comprising the target polynucleotides, wherein the complex directs the non-LTR retrotransposon protein to the target sequence and the non-LTR retrotransposon protein facilitates insertion of the donor polynucleotide sequence from the donor construct into the target polynucleotide optionally wherein the insertion of the donor sequence:
a. introduces one or more base edits;
b. corrects or introduces a premature stop codon;
c. disrupts a splice site;
d. inserts or restores a splice site;
e. inserts a gene or gene fragment at one or both alleles of the target polynucleotide; or
f. any combination thereof.

55. (canceled)

56. An isolated cell or progeny thereof comprising the modifications made using the method of claim 54.

57. An engineered, non-naturally occurring composition comprising:
a. a Fanzor polypeptide,
b. an integrase protein associated with or otherwise capable of forming a complex with the Fanzor polypeptide, and optionally a reverse transcriptase, and
c. an ωRNA component molecule capable of forming a complex with the Fanzor protein and directing site-specific binding of the complex to a target sequence of a target polynucleotide, the guide molecule further comprising a donor template encoding a donor sequence for insertion into the target polynucleotide and located between two binding elements capable of forming a complex with the integrase protein.

58. The composition of claim 57, wherein the Fanzor protein is fused to the integrase protein and optionally the reverse transcriptase, optionally wherein the Fanzor protein is engineered to have nickase activity, optionally wherein the ωRNA component molecule directs the fusion protein to a target sequence, and wherein the Fanzor protein generates a nick at the targeted insertion site, optionally wherein the donor polynucleotide further comprises a homology region to the target sequence on the 5′ end of the donor construct, the 3′ end of the donor construct, or both.

59. (canceled)

60. (canceled)

61. (canceled)

62. One or more polynucleotides encoding one or more components of the composition of claim 57.

63. One or more vectors comprising the one or more polynucleotides of claim 62.

64. A method of modifying target polynucleotides comprising;
delivering the composition of claim 57 to a cell or population of cells comprising the target polynucleotides, wherein the complex directs the integrase protein to the target sequence and the integrase protein facilitates insertion of the donor polynucleotide sequence from the donor construct into the target polynucleotide, optionally wherein insertion of the donor sequence:
a. introduces one or mor base edits;
b. corrects or introduces a premature stop codon;
c. disrupts a splice site;
d. inserts or restores a splice site
e. inserts a gene or gene fragment at one or both alleles of the target polynucleotide; or
f. any combination thereof.

65. (canceled)

66. An isolated cell or progeny thereof comprising the modifications made using the method of claim 64.

67. A composition for detecting the presence of a target polynucleotide in a sample, comprising:
one or more Fanzor proteins possessing collateral activity;
at least one ωRNA component comprising a sequence capable of binding a target polynucleotide and designed to form a complex with the one or more Fanzor proteins;
a detection construct comprising a polynucleotide component, wherein the Fanzor protein exhibits collateral nuclease activity and cleaves the polynucleotide component of the detection construct once activated by the target sequence; and
optionally, isothermal amplification reagents.

68. The composition of claim 67, wherein the Fanzor is
a. a yeast Fanzor;
b. an amoeba Fanzor;
c. a protist Fanzor;
d. a metazoan Fanzor;
e. an algae Fanzor;
f. a fungi Fanzor;
g. a eukaryotic Fanzor;
h. a Mollusca Fanzor;
i. from an organism of the genus Eremothecium, Ashbya, Spizellomyces, Torulaspora, Naegleria, Rhizopus, Guillardia, Batillaria , Dreissena, Mercenaria, Batrachochytrium, or Parasitella
j. a virus Fanzor, optionally a Bodo saltans virus, a Harvforvirus, Homavirus, Dishui Lake Large Algae virus 1, or Yasminevirus Fanzor;
k. a Fanzor selected from or is encoded by a polynucleotide set forth in Table 1, Table 6, Table 7, Table 8, Table 9, Table 10, Table 11, Table 12, Table 13, Table 14, FIG. 20, FIG. 35, FIG. 56A-56D, or any combination thereof, or is a homolog, ortholog, or variant thereof;
or
l. any combination of a-k.

69. The composition of any claim 67, wherein the isothermal amplification reagents are loop-mediated isothermal amplification (LAMP) reagents, optionally wherein the LAMP reagents comprise LAMP primers, optionally further comprising one or more additives to increase reaction specificity or kinetics, optionally further comprising polynucleotide binding beads.

70. (canceled)

71. (canceled)

72. (canceled)

73. A method for detecting polynucleotides in a sample, the method comprising;
contacting one or more target sequences with a Fanzor, at least one ωRNA component capable of forming a complex with the Fanzor and direct sequence-specific binding to one or more target polynucleotides and a detection construct, wherein the Fanzor exhibits collateral nuclease activity and cleaves the detection construction once activated by the one or more target sequences; and
detecting a signal from cleavage of the detection construction thereby detecting the one or more target polynucleotides, optionally further comprising amplifying the target polynucleotides using isothermal amplification prior to the contacting step.

74. (canceled)

The application's sequence listing, which the Patent Office published only in electronic form, follows.

SEQUENCE LISTING (641 sequences)

SEQ ID NO: 1 - DNA, 18688 bp, Klebsormidium sp.
  variation 8162..8181: note = n is any nucleotide
  source 1..18688: mol_type = other DNA
gcttctgacccctgagaagcgccatccaacccacagtgccagtaaaatctacatgggcctttgtatagaaccccttgtcagttgcaataaagctgagcgaggacttctcgggatctttgagcatgtcaggcaggatatccttacttagagggaaaggcttgaccagctccaggacaggagaggttttgagaaaataatgctccagcacagccctggatcgacttctcttttcacaaggctccaggaatgactccaaggggcatggtggattgatgatatcctgctctgctgtttcatgatcctgaaagaatgccttgaacacaaggtctttgccatggtactttaccagatcagcctccaaagtacgaccacataactgccaggtgccccctcggacgatctgaggaaggtggagcgtctctctggtgaacccaaagtctactctctgctgagcatttcccccaatccaatacatttttaagcgcctatccaagctctccttgcagcttgaaaatgcgtcgaggcaccaaaacaaacttcgcagccatttaatctaccgcgttgtagcgctaaatgacgatttttgaccgaaactctgaagttcggacctccatgtcagggttttcgtgtcaagatccaaaccctaacagggagtaacggccttattccaacagaaatttctgagtttcacctgagtttgaccggagtttcaccggagtttgcaggtttactagcagccaatcaaagtagccggtatgtccaactcagcggtcacatggcaaggaaatgtttttgcaatcccaactcttggaaaaggacaatttctgagtttcaccggggtccggattctggcaaaaaactgtacacttatggtacactgtgatgtacagaattgatcgtgaccgtggctacggccaccgtggcatcacatgtgctccgcgcagccaatcaatgcgcggcttcaaactcaggcgaaactcagagggcttttgaggcgtctgagttttttgcccctagcttgagtttcgccggagtttgacctgagtttggaaatccgacgtggcaccgaactcaggcgaaactcaggcaggaaacgcactttttcggagttttggcaaactcaggtgaaactcaagtctgttggaataaggccgtaagtctattgcctaaagttctcgtcaaaaaccctaaatctcttggggccctttcgcgaaagagtgagtggaacttgcaggacgtttcgtgtgtccacagctcgatggcaaggacatggcaaacggcgccattcatggtgattttctgacaggtatagatgtgacatggacgtggggctcttgaccgaccaggattcgccgactcacggctttcgaacttcatctctcaataagcaaaattctcgcgaccacgatgagtttgcaataaggctggaacgccttaggtcgtttcacaccaccaccgactctctaaaacggtcacaccaagagtctgtagcaaagacattcgatgaggagatactcgcgataccgcatatcaagttgagagtgcccacggcagagaggctcaggcgtgagtgccatgatgcgaacgtgagcagggccgtgacaaagcatatggcaatctacgagtcacgtgcatccgatgctctggcacgatatcatgccttgcagaacatactgcaggaactgagggacgctggaaaattcacctcaattcgtctctgacaccgagttgtaaccattatcttctcttgtcttgtgtagtgaaggtttttgtcaggacgaacattgatggcgtcaacgggtaggcattctttggaaacgtctggatacacgagaacagaagaaagcaggcttttagaaccgtaccaagtcccaacatatgttctatgaaagaaagtcattgtgtactatgcagtttcgctacctctgttatggactccgaacaagtattatctctgtgtgcttcttcctgtaccataccgcagagtccagtacggctctctgattatgcttcactatcttatccaggaaatcagaacgtctttgcttgcctgtagcaacgtgtttagcttctgactgacgtccatgtgaacacctgaagcaccttcagcttctaccgttatgcctccgaaagtctccaccgctctcgttgtctcctcatgcgaatgaagcgctgcagagaagcgttgagtgacttgctattttttgtcgatgatgaaagtgtatgtgagcccttgcagaagaaatccatcaccgtgaggtatgttgatgctatcttaaatcctacaggaacgattgtgccgaaaagggagacatggaaaatttcactgtgaaggatagtgagatttatgtattgcaccctgcagggtggcagtttcaatgaacacaagtacttcatttggatcgcgtaatattgattattttgtttcttgagttacaatcagtgcggtacttcatggacgagcgcgctaaggatcgtgtcagagagatactcgttgcacatgatgcacgtttcgaaagcacatggaccatcctgtggcgaaaaatgataagacccaagaaagattggacgattacgtgtccgagatcgataggcgtcaaagaaccggactcatgaactcatgcgaccagtatttggcctacatgtacttggcagagagagggacactgtttcgcagattgcacgaaaagagagttacacttcgttgaaagagtcaattcactaaataaccagatcattgtggacataaactttaagcaccaaaatcaaaggtctgcagaatgcatatggcccgtcaacctatgtacacgcgccgcggcactgtggctggagagccccgtggaccggatcagcaacgatatatcgcctcctctttctatgtatctccgcaccagcgagtggtccgtagtcgatttggacgggatgccgatgacatcgacctccatccgcctcatgaagacgcacgccagttccaacttgctcttttcccctttcaaaaagagaccgagggacacgtcgcagaggtcatcctttcgtaagtccacgtgcgccacccgcgccatgtcatcggctgtcttcaggtccttgtggatgccggcggcctgcctgatgatctcatccgccttccctagccccaacttcacataatcgaaggtgttcacgtacttcgacactcgagggtcgaacgactttaagatcttatgcacctctcgctccctagcgtcttccctccgctgcgccgcacgcgccgccgctgccgctcgcacctccagcctggaaatgtacgcccgcagaccagacaccccgccgtgcttccccgcggctacttccaccaacagcgccagatcgtagcggaacccgacgacgttgggaaagccctgggcctccctgtaagcttgcaggtcgcgcgaagtcaccctcaaatacgccctcgcttccgtcacgttcatagtatccccagcatgcccacgcaacagccgcaggagccacagggcgtctgccggcacgcacgggacggaccccttgagcctttttgagagaagggcattccagcccaccgaccgcatggcatccttccagtctttgcagaccagcgccatgctcgcagcactctgctttgctaactgcatggactcctcctctgcgacggggacaggcgggtccatcagccctggggaagcatccttagtctcctccgacatcaggaccatcaccactatcttttccagaagctcggggggtatgcaccctgcataattcaccgccatcagtgcagaggagaccgggctgagctaggctgcgaatttgcgatccggaaaataaggattctcacggtcgaattccgaaggtcattcgtggacttgtctgcgaagagtcccggtccgcgatttttaaccttattgattttcgccataccccggtccaaaaatggaacgtaaaaagaccccgggcccgtgcaggttcgtacggtgagacctgaattcgcttttcggactaggctaggcagtatactggcagggaagtagtgcaccagtactacttccctacttgtctacgagtagtctgactcaactgtacctggtctttctctttgctagatcgatctcgcgctgcttgatcctttccttctctatcaagaacgtagtgtcatgaacagctgcctgaaactcggattgtgctttcgagggcgaactgcaactctccgttcggttctcttttggaagcgactcagcggtctctcgaccatcttcggaagctgcgagcgccgctccgggcgtgttattcgctctcaggatagcaagatatgcttccttcaccttagggtcctttatctgaacgtccatctcgccccctccccttttgggattcgacggtcaccccgaggtttccttaagcctctccctctcgtctcatccagacggcaaaagacgagccgcggacgtcggccatttttctaaagcactgagagattcactaagagaattactttctgtccttcagtcctctcgaaaaccaacaaaagtgaagttgtgaaaaatacagtcgaggcgatatggggtgtatccgaggaggcgtggcaggatcccggttggcatggctgtaaatcgtatgcgcgaaaagttggttccctccgctgacgggaaggacagcatgtagttcgcaggtcattcgccagtgcttcttccgcagccccggctggtctggagccgtccttccggccgcttgcccctagcccttaggatcctgccacgtggcgcgttctgactggctcaaatccctgcaggacgctccggacgccgtcgacttgggcacccactggttctccagggactgccccgcatccggtctgggggcccagcagcgggcttgggcgtacctgcaggcacgcggccatcgaatcctggccgccggcgacgcgcgcgaggattccgccacgaagaggtacaccaccttccccgacgtggcggcgctgcaggagtacgacgatcacctggcggagttccgggtggagcgcagcatgtacgaggtgctatacccggagctgcccacccgcctctacttcgacatcgagtactcggtcgcccagcgtgatgacaacggcttcgcggagcgactctctcgcttcgctgagctccgggcggccttctgtgccgaggttctgggcgtggcggcctcggacctgacttttcagaccagcacggcacatggggaatctaagggcgagtacaagcacagcatgcacgaggtgctggagggcttctatgtaaccaaccaggaagagcgccgcctattcaaggagtgcttcgagagcttcctccaggaccccccctccagcgagctcgcagagagcgtcgcgttcctggactgcgagcgtaacgggaagaccgagcggatctgggacagcggggtgtacaccaagtttcgctgcttccgcatgctgggttcctgcaagaagggctccggcaggccgctcgtccctgccaaagggagctcgcccaagctgcgcgatcacctggttggcgtctacgacgaacgacagcggaagggcttgcagaagattgacatgggaaccgctcgcgcattcctggcagtcaaggctcagccaggctctgagcgatgatcgcgctcgagtggtactccctcacgcagcgctatgtcatttggaccgtagccctttccgattcggtaactacgatccatggttcatgcatcatactcttaccacataccactcttgtctcggattttcccatgtctgggcacttttctgtgccgcaccctccaagatgaccaaacacctgtctagagtagcgacggagacctcgcagcccagactgatttgcttcttgctcgggctcaagcctctcctcttggctacgctccaaattgctgctgcagcgagcgacgctggcgtcctcccttgcagtgccacgaccccgttcaagtcggcgcacagctgtctgcattgtaagaggagactcttcgtcgcggcgacctgccctaccatgatccgcttgcagcagcggggcaggatgtctcccggccgggcgggccgccccctatagccccccgcacggcgtccctctacgaaactcgccatccgcttgcaggacgtcatcggcataccaccggccttgcaggcatagaacgaggccgcaactaccgcctcccgcctggcaccgcccctctgaacgtgctgcgacagccacccggccagatagtcgcaggcggcgtcggcgaccgacttcgaaagtcccagctgaagcgcccacgaggagacgtcgtttcgctcttctcgctcctttctcctcggccttcgatctgcgatgccagtgcctcccggcgggtccggcgaagggccgcacagagcgagcaggttgagcgcgcctctgacacgggtcgtaggagccacatgagtcctctctcagaagtcctcaccgagagagtgacggcgcttccgtatattggtcgccacagacgaacatcagtacggactgatcatgggaaccaagtaagtgcatgcgtcactcataatcgccagccgagaccgagcgccgtgccttgcgacgaagggcgacggagtgcacgcgaccataacatcatgcccacggcgagtacgtgatgcgaagagagtttgagtggcaaggctatggccgtcagattcatcagaactatcagcaagcggatgatccgttgcgtccctatacgattcctcgcgtatctcgcgcctccctagacccctggttccactaaatccacctccagctgtcttcgtcgtcgtttgacgcctgaaaaaaaagcaagaagggaagttatcgtctcaataacctgtcgtgaccgtcgagctggaggaaggaagtcacgacgggttctcgtcatcatcaaaggacacggaaaatgattagattgtagcactcacatcattcagcgcagctatcgtgtcgtccctcgccttgatctcccgcatcaaatagtcgtaacagccgcggatgagaccgaagcgctggggcgtcccgatcgggcaggcgtgggagtatctctcgctcctgttgcctctccaggagcaccccagctgcgtaccgtccggagcagcgagcgcaaatctgcagctgatggactcgcaggctcgcgcgtgagcgtctttgtccttatgggcgtacctgcggggtgggaagcgccgtgtctttatgtccgtccgagaatcgtcatagaccgttgcgggcagcatcactcagacggcgcctgtccagcccagttcaccgcgtccaagccagtccctcacctgacggagcagccgggctcgccgcaccggatcaggttgaagggacactgggacagaaggtgcgactccatgtcgttcaccgtgaccagttccgggcactgggggctggtacactcgacgagggcggtgctttttagtagcgccgtggcggtcggatccggcacggtcgaggctggcttcttgcaagtaacacaatagctctcgaaacgaggatcgagtgtgtgcgaggtgcataggtaggtccgacactggcaccgctgcaccggggcattgcagaccaacctactcacgtcgccctggtcccagccgagacagatgaagcaccgaatgtcgtacatgctcgactcgaagcctttgatgctgtaaggctcttcgtgcacgaccaccgtcgtcgtagccttgcgtttggccgaaggcttgaggagaagaggcgccatcctgctcgaccgcttgttcctggccatgtctcgtcggaatgtctcgacgcggaccgtgtcgagccacttgtaggtggacggaccagactctacgacaaagtgtccgtcggacctgtcgaagcagcccgactcttctgcgaagagtctcatcgggctttctgcgtaaacagagtctaccctacattttccggcaaagataatgaagggtggcgagtgtccacgcatcatctcgctcctcgctcggctgtcactaggctgatatgggcgcgatgacagcttccgtccggatcgtcgcaaagatcaatgacaggatggaccacctcaacgacgccatgcagacactcgggctctcttgggcgagcatcccgctagcccaggacgacgcggcggagtacgtgcgcaacggtcggacgggcgagggcgctctgctgggaaaactcgtnnnnnnnnnnnnnnnnnnnnaaacaaggattctcacggtcgaattcctaaggtcattcgtggacttgtctgcgaagagtcccggtccgcgatttttaaccttattaattttcgccgtaccccggtccaaaaatggaacgtaaaaagaccccgggcccgtgcagcttcgtacgatgagacccgaattcgcatttcggactaggctaggcagtatactggcagggaagtagtgcacaagtactacctccctactcgtctacgagtagtctgactcaacggcccgggtacctggtacctaccggtcgaattaaagttcggccgtacggcagtttacgaaaatcgcccctactcgaaagtcagtagctatgctcagctacaccagctatccttcaccaggactcgtctcgcatgactactacaacccgaaggtcaggcagatccactggggggtgcccccggccgcaccctccaagatgaccaaacacctgtctagagtagcgacagagacctcgcagcccagactgatctgcttcttgctcaggctcaagcctctcctcttggctacgctccagatcgctgctacagcgagcgacgctggcgtcctcccttgcagtgctacgaccccgttcaagtcggcgcacagctgtatgcattccaagaggagactcttcgtcgcggcgacgtcccgccctaccatgatccgctcgcagcagcggggcaggatgtctcccagccggacgggtcgccccctgtagccccccgcacggcgtccctctacgaaactcgccatccgcttgcaggccgcttttatcgatctcgacggcacccccgtcgcccgcgcgagctccgaggacgtcatcggcataccaccggccttgcaggcatagaacgaggccgcaactaccgccccccgcctggcaccgcccctctgaacgcgctgcgacagccacccggccagatagtcgcaggcggcgtcggcgaccgacttcgaaagtcccagctgaagcgcccaagaggagacgtcgtttcgctcttctcgctcccttctcctcggccttcgatccgcgatgccagagactcctggcgggtccggcagagggtcgcatagagcgggcaagtcgcgcggtgcatctgattcggagtgagggagccacatgatgtctccctcggaagttcgtcgacgagaaagcgacggtagcttccttatatcggtcgccgcaaggagcatcagtacggactgaccacgacaaaaccgaatgtcgcgtcagcagaatatagcgtctcgtggagaaatctctgtgttttttccttgattaatcccttcgtgagaatttgtacaagacggtaagacagtaagacgcattttttagaaagtttctgagatccggagacgggatctcggaacttcaggatcctgggaccgtccccagaaatgcgtctttgtgtcttgcgtctttacgaggggttatgggtgggttggtgccacgtcagcagaataaagcgtcttgtggtggaacccgatgttttttcctcttagtggatcccctagtgataagtggtacgagacagtaagacagcaagacgcattttttggaaactttctgagatctggggacggaatcgcgggaaacttcaggatcctgggaccgtccccagaaatgcgtctttgtgtcttgcgtcttacggggtggtacgggtgggtcgccttatacggggggatcccccatgtgccacgtcagcaaattatagcgtctcgtgtggagtctctgtgtttttcccttgatgataatcgtacaagagtgtaaagcttacaactgtggcatgtttcataggataatgagtggacacgacgtaccaaagcagaacgcacagtgcccccgaaaattcccaaaggggtacaccaaggaaggcatggggtatgtctctctctcgggcgcaaggcaccactttggcgtctcggggaagactctataccgatgggaggcatctggcaaagtcacagtcaagaggagcccagggggcaggcgactcttcctcatcgacgacccgctggctcaggccgagccaaggagggagtcggtcgtctacgttcgggtctcgagcggcaagcaacaggacgacatgcgacgccaggaggcgtatctacttgaccaacatcccggatccaaagttgtcagggacatcggctcgggcctcaacttcaagagagcgggacttctatcccttctggaacgaagtgaggagggacagctacgccgagttgtggttgcctcgaaggacaggctgtgtcgtttcggcttcgatctcctcgcttggcaattcaagagacacggtgtcgagctcgtggtttgcgacaaggcagataagtcaccggaggcggagctggcagaggacgtgctcgccaccattcgagttttcggtcgtcgatggaacggcaagcgaagatatgccaacagacgcgccggtgataagaaccaggaagatccgcctgctaccgaacaaggcacagaagaagctcctggatcggtggagacacgccgcgcgatacagctacaataaagcggtgttcctcatgaacgaaacggccagctacaacaagctgtacctccggaacctcatcacacccgcggaagtcaacagggacaaaccatggctcctcgagaccccgaaagacatccgagcgggagccgtgttcgaggccgccaagaacgtgaaggcggcgatcacgatcctcaccaggaacaacatcgagcacttcagtatgggttacaagggcaggaagaaggaagacgggcacggctggacgatagacgtacccaagagcgcgctgagagtgcgggggttccgccgcttgcaggtgttcggagactactgtccgtgggtgttcgagacgctgtcccgtattggaccgctcgcaatggactgcaagatccaatacgacggggtcaagtacttcctgatcgtgccgtacgagagacatgtagtcccaccgcgaagggagggtgtggtcgcgctagatccgggagtgaggacgtttcagaccgcctacacacccaagggaaactgctacgagctgggcaaggggtgttgtaggaagctggaggccctctgcgtccacctggacaggctgatatcgagggagagctccgtgcccaatcgattgcggaggacgaagtgggcactgaggacgcagatgaaaaagttgcggcggcggttgcgggacctgagaaacgagctgcactacaagaccgcggaatacttgacgaggacggcaaacatcatcctccctcccaccttcgatactagaaacatgactcgaagaacgaccagacggatacggagcaggacggtgcggaatctgtcactcctgtcgcactacaagttcaaacagcggctgaaagccaaggccgccgtacggggggtgagagtcatggaggtcagcgaacactacacgagcaagacgtgcgggaggtgcggtcacatgcacgagatgctgggagggaggagagtgttcgagtgcccgaggtgtggtgtagtactagacagggactgtaatggtgctcgcaatgtgctacttagagccatgcgggaagacccccctcgaggggggcaatgcgagatggagccacggtagatatatcgtgcttagcctggacgaacgaaggacctgagtgtctaggtttgtccagtgattgatccatcggacggaccagactctacgacgaagtgtccgtcggacctgtcgaagcagcccgactcttctgcgaagagtctcatcgggctttctgcgtaaacagagtccacccttcattttccggcaaagataatgaagggtggcgagtgtccacgcatcatctcgctcctcgctcggctgtcactaggctgatatgggcgcgatgacagcttccgtccagatcgtcgcaaagatcaatgacaggatggaccacctcaacgacgccatgcagacactcgggctctcttggccgagcatcccgctagcccaggacgacgcggcggagtacgtgcgcaacggtcggacgggcgagggcgctctgctgggaaaactcttgaggcacgccgccctcaacgagttcctcgccggcaagatacacggcgacgcgcatacattggacgcgtgccggtcgtacgtccaacacgggggcgaactcgctgagctcatcgaagtggtacggattcacgagttcttccgagtgcacgtgggctgcagtaagatcgaggacagggagcgcgcactgtacggttggatgtgtaagaacagcgtaatcagggatcttagaattgacgcctagcatcatccagtctaataggagttttgacgttttattagtacgtagagctttagcgtttgggttcagcccggtttgagattagctgcgcctcgttaacggttcgggggtgctctccgatcatcaaacaagctgaacatatatgcgggtgacggaaaaatttcttcgttctttctttcgctcgacgaagacgccattttgggatacagccatgcacgcatcatgcgctctcccgcattcgtgacgtttcgcacatgcagacttgcttgtgtgtgtcatgattgaccaatttggaactgtgtagtcgcgaaaactggtgagtaaggcagtaaaacgcattgtttcgagtatatatgtgggtcggttattgtaagcccacaccagtagtatctaatttcagagattggagaggatgcccatgagaatggccgccccgacgaggtcgacgaccaggctcgcagaacccgaggtctcgaccagccgtatgccggtctcgaggccgcactcggggttcgaccggtcggggtcgtcgtcgaccgtcctggcgacgcctccgaagcgacatttggacgcgtcttgctctccgtcctgaaagtagccattgaaggcgagggaagcgtgtctcctgaggttgggcggcgagtagcaggaagcgtgctgttgtatggacgtgcagtccgtggcgttgcaagcgaacgacagggcggcgatcagggttgcgtccgtggcatcgctccgcgcgacacagaacttgcgggcggtagcttcgtaatcgacgtcgcgcaccagggcgtacgtgcccaccatactgccgttcagtttcgagcgggccctggagtcgtagatgccccaccgtctcgcccacggcgcgtcctccgtgagagcagcggcgtctgagtccacgagctggcgatagacggctgagttctccgccccgggccgcttgggcgtcccggcttcggctccggcccagcgcgccactcctgccagaaagtttcccgccagctcgggagtggctcgctcgacgccgtcggtcggccagcccgtggtgaggatcacggtttcgtcgccgaatccgagcgcttccagagcatagacggccgcgtcgtggagcgaagagaggacatcggggtaccacaggcctcccccgtcgtcccagaacccctgcgcatccggttccatcgccagaaaggagaaggtggcgggatcgtcggcatccagggcgaggaggaacgggtacgcttccaaggagagggctcctgcggagggcagcgcctcggcgagcacccgggcgacgctcggggagaaggctcccgcagacggcggataagaaaccgagaggtccgtcaagctgaccgatacggtcacgctgatcccgagggggttcaccaggctcgccaagttcctgagggcggccggcatggattcgtaaaatcgcgccccgtactcctccgacagcggcgcctcgcccagctggaccgcatcgattcggaaccctcgagccaggggcgtcttcacctccttctcgacccactcgtacaaggccggggacggcagctccgagaactgctctatgtagtcgttcggtatcacgagcgagacgctgacgttcgattccggcctcaggaataggcagtcggcagtagagtgcacggctaggccccggaatgcaccggcaccgacgagcttcgagacgaggccgtccggaacggcgcgcacctggtccctgttcaacgcggcgaggaggcttccctgggtggtcccggcgaggagcgccaaggtcgcgaggcaagccagcgcgttcactctcatcgacgctcgcaacggtacgagtaggcggagaaaaagccacgacccctctgcgtcccgccgacccctctcgttctcgacgctaccgtcagaggggactcgacatgcctccgatctcagcatgctggcgcgcatcgcctctctcgacgccgcgcctccaagacatcttcgtcgacgcgagtctgaaggtggatcgagcgggcatcggaatcaactatcatacgcggcaggagttcgagaagtacagcctcgtccgccgcccagaccgccgcccggacagcaaccacgcagagctcgccgccatcttcgtcgcgctcctccattctagagggagcgggaagactgcagtctttacggacagccagacgagcatcgatctgatccgcaagggcacgctcgacccgcgcttcgccgtcctggtcggatgctcgcgctggctactggcggagagtgaggagacgctgctgttcaaagtcaagggccactccggggtccctggcaacgaggtggcacatcggctcgcggccatgggaaggcgcgacggcgcgatcgtactccccgactacttgataggccgcgccgagtgccgtgaccgactcatcccggcgctcatcgacgagtgcgcccgcctgaaccagtggcagatcgagtcattcaagcggacgcaggcaggtcggcttcgtcaaggtgatagcacatcagcatggaggccccgggggccttgagggacaggaggagagttccgggagatgcgatgcagacgcgggcgtctctcgtgctcgctcgcatgagcttctcggtgagcgcctccgccgtgtcggagcgcttctccagatccaccacgaatgccgccttgtaaggagcgtcctcgcaagcggagatcatgagcagcagctcggtctgcaccaagaaccggacgatgcccgccatctcgggcgaggtgtcttcctcggaagcagccagttcgcgaagctccctgacgcggctcctgacgtcgagggcctccactcccatcggttttctcgagagcgagagcaatctactgggtctcatgctcgctttcttgacatatatggatgacaatgtgtggggaacgagggctcgcttgtacggagatcatcaccgaaaatctcgacaaccttcatggtggtcattgtttttctcacgacaaccatgaaggcgtctcatgggacaatgcttttcgagggcggacgagccaaaggttccggttcagcagaagaggccaccgagcctcgagcacaggacgttcgacttcaaaccacactttcacagggcgttccaactggcagaggagatcgggagcgggagcttcggacgcacccacgtggcctttgccaggaaggtgggagatggggacggcaagcgagtggccgtgaaggtcattcccaagcgccggatgtcgagccaggtcgagatcgacgacgtggttcgagaggtggaaatcctgcgcgtgctccagcgcaatgagaacgtggtcgagttcatagacgcctacgaggacgccattaacgtatatataatcatggagctgtgcgcgggcggggacctgtcggacaggatcctggacgccggagggcggtgctcggaggagagcgcggtgcccttggtgtggcagatcctcagcgcagtcgcatacatgcacaggcgcggcgtcattcacagggacatcaagcccgagaactttctctttgcatcggaggacaagaactcgatcctcaagaccatcgactttggcctctccgactactgccgagaaggggacgtgctcagtgacatcgtggggagcccttacttcgtcgcgccggaggtactgaagaaggcatacgacctaaaggcggacgagtggagtataggcgtcatgacgtacatcatgctggtaggagcccggccgttctatggccgcacgcaatcggaggtattcaggtcggtcctagacgaaaagccgaatctggaggaggtggaaataacggcagaggccagggactttatagaaaagttactgacgcgggatgtgcgaggaagactgacggccgctcaggccctgacgcatccatggatgagagacgtccggaaccgataaacggccgtttacaacctcctgctaaagtgccccaaagtctttctgatagtagaagactgcctacacgagcagatcttcctcaaccgacgccgcccctcgagagtatctaccaggacgtagacggccctagccttccctctgcccggcgttccacctccttccacgatcgcctgctcgtgagtgtaggcagccttgtcgaaatagtagaaaacggtcatgaagtcagccccggttcgcttcggagggacgccgtatacctgcgagaagacgtgccggttcaccactcgggagcagctctcgtccaattcaagacctaaaagcgaacgcatgtcacaaacgccgaaaacgggagtgcgagactcagtcgtttcaacccacgcgtcagacaacggtctcgagctttaccttctcgagctgatggatagcccacaggttgattttcgtccagggtcggaagcctcgcccttgctttggtgcctccttgtccagggtctcccaagtaacgacgatctgaaaaagacgcacagagctctcagcatctagctcgacgtgctctgtgttgccacctactccgtattgcactcatcagcattcagagtcgactgtaagaatctggttaggtgtatcgactgttaccaagctggcattgtaacgaaccgcggagatttcatgaggagaagtgaaccgtgcagggaaagctgactaggctcagtctgtagggggtcctgacaacagtactcaccggctcgtagcccgcgccagggttccaggccagctttcgagcgaggtcgacaggagagggtctcggctgacactgcgccgatcggtctcggcgcgcctgggctctcctgaaagctgtgtagcacgtctccaattcagccttatagatcaacatggcggtcttgaattccaccaggaagcggaattcgttctggtaatcctcgatgatgctctcagagctgttagagacggatatatagaacctgaagctcgactctttatccaacagcttggagaacagactaccgaccgcttctgtaatacgcgctatctggagctccatgtaaccagtgggattttctacagcaaaggcacgcagtgcagcttccagctctctccaaggggccgctccatcatcagacgagaacggcattttatattcatgaaagtagcttcgctccaaaaagttaagcagctgtgagcaccttggaagtctcctatcagaagccactaagaaatcagcacagtcccctgccttgagtgaggtttcttgccaatgaagcatgtagccctccatgtgccctcgttaaagttgggggcaagctgcctgggattgaacgaaagctgagtcggaagcggaactgctgaaggaacccactctgagaattggaatagctcaaaaatacacttcagccgcttttatgaggcagacaagggcaaaatgagttgacgtcagctcaaatgtccacctgcgacgatcgctctgctccattcacagtgtacagttcggtaggtactgatacgccacaggtaggtgtggtccgaccgtaccaggttatcatgaccgcacgttgacgtataatttaataggtttttgcatgcaaccgtcgattcgataatttttcatttgccgactttacagaccgtcgatatcgcgtacggttactcggtagtgaaatgtttacgtcagcagtgcaaacctgtcacgattgtcgtgcatgcagaggttgacaagacgtcaacaaagttaccaagggtaagaccgcgggctgtgcgcgcatgtaggaagactgtaggactctttgtcgaagactacatctacttaaggctcattccgcttgcattcagctcattttcaaaccctgaagtctccagcattcgccatggatcgtcacgttcacatcaggtgttctttcagcccggacgactgggttcctccggaatccaagcactactctcgctttcggaacataatcagagcggcgctggggctcgaaaggctcaccgtagattcacctgggctctttgaagctctgcgtgacgcctttggaatcaagcagacggatatggatcagtacctgaatcagaaggttcccgtcatacgggaccttttcccagaacaactggcgtcaaccagcccttacctcaatgctttcgacacgagaacgtacttcaacaaattccaggtggacccagctcagctgaagaaagccatgctcaaggttgcgggggaggagggtcctcaggtcgttatcaatggggatgaggtgagagagcggtcagcgagtgagtgcacagctgacggcgagtc

SEQ ID NO: 2 - DNA, 10182 bp, Klebsormidium sp.
  source 1..10182: mol_type = other DNA
aggaacatgagaagcatcatgtctacaccatggacgacgagacggtcgtggagactggcttcctgtacgcagcccgggcgcccggatctacgataatgaaagtcggaatgtccaaacagcgggaccccagcttatacatagcgagacggtacgcattcgttctagagccattcgccatcatgggagtggccgacgccaacatggcggaaaagatcgcattccacaagctgaagccatggcacgtcacgcacgagatcttcgaggcactagattgggagttggtccaagacatattcgaagagactgcttatctagtggctgacagagaccgttgcttagaatattgcagcgaacacggtataccattggtgacagagggcaggaataccaagacgatacatcatttcgaagacttcgcactctgattgcacatttcaacgtttgatgcccaccaccctagaaccatccggcaactctacctctatgactacatcaggcggcttcgtattctctgctcgtactacgctaggtggttctacgacgggtcctgataatggcactagtgtcaacggagtcgtatcgtctctgttacaatatcctacgatcatcgcgactgcaatcagcatctctaagaaacctatacctatgcacccgtacacgaagagtctgccgggttgccgagtagatccctccgtcaggaatcctatcaccaggagcaagaacttttgacagccgaatctgacgtccgagttgtattccagacagggggatagaatgaaatagaggatgtctaagacgatgggaaccaagtaagataggggaatttcgttccccagggtggacaccaccaccaacatgaggctcgctactaccgcgtccaatgcgaagagcacggacgccagcatcatcctcctcagaagtcgtcctctacgaaatcgccgtacgtcaggcctcccttcttccccttgttcagcgtctcgatcacaccagccttttgataagagctcacgtgcgactcgaacatgttattcttggacgtcagggagattagttccataaacccgaaggggttcttgctgccgtagtgagtctcgtaaccgaggctatggagcaagcggtccgccacgcactcgatgtatgcggacatcaacttctggttcatcccaatgagggaaacagggagtgcgtcgcaagcgaattccttctctatgtccacagcccccttcacgatctccaggatcctctcggacgacagcttccgtaccagcaggtcgcggtacaggtggcaggcaaagtccgtgtggagcgcctcgtccttggcgatgagctcgttggaaaatgtcagccccggcagcaggttcttgctcttcagccaatagatggcgcagaaggagctgctaaaaaggatgccctcaacgcacgcaaacgcgaccagcctctcagcaaacgagtcggaactctctatccacctcacggcccagtccgccttcttcttcacgcacgggatgctgtctatcgcctcgaacaacctgtccttctcctcggggtccttcacgtaggtgtcgatcagcaggctgtagacctctccgtggatgctctctatgaaggcctggcaggtgtagaaagccctggcttcctgtatctgcacctccgtcaggaacctggtcccgaggttctctatgactatgccatcagctccagcgaagaaggccaagacgtgcttgatgaagtggcgctcgtccgcggacagcctatgctcccactcgtaggcgtcctgatccagctggatctcctccactgtccagaaattggcgaccgccttcttgtagaacgaccaggtcttggggtatttgatggggaaggtgcagtacctgtgaggatccgtctcgaggaggggttctcgttctgccatgtctcagaatgacgccctcgtaccttacgactgcacaacttatacacggtttcggacgcgagccgaccgtttcggacgccccgcgagaaacattctgtggaagccctttcggacgccgctttcgggcgtctcaggcttcgccgtggtagatgtcgtccaccaactgatagtccacctttttcactccatatctcctcttgaattcctcgatgagtctcccccgcaaatacttctcgttggcactcgtcatgtgcccgaaatccttgtgcgtcgtccggatcaattgcgcgaactccaagcgagagtctccctttcgggcggcgaagccgaaatcgatcaacagaactcgtccgatatatttagtgcccggtctgtacttgaatgctatgttctcccagtggagatcgccgtgagcgagtcgcttcttctgcatcttgtcgatgaatgatatgaggactttgagcatgacgtctagctcccacctcttgcgatcccgtctcagccacgatgacagcgtggaatccacctgctgcatgaggacgaccgacactttcttctgcttacggccgtgcttgatctcgtcgaagtctaatccgaacgctcgcggcgccaatccattgcgccagaattcgttctgtatgtccatctccactctatctcgtgctctgtcgagtttcttggagatctttgcgacgcgcctctggccggtcttcctgtttcggacgaggatcaccgacccactcgccccctcgcccaagtgctttacgaaagcccacttcttccaaagcttcatcgtaaagcacctctccgccgccaggcacggggccatgctgccggtgcctttctgaccgttcatagctttcttccattcggtgacggagaaccctccctcgaataagtcgcgccccatcttctgagcaccttcgaccccggcttcacacagattctgcttcacgccgagctccgcgagtccctctcccgtgatccagttcaccttcttcccagtcttaagcacggccggcttcaaggctttccttggtctcctctcgcgccgggtcctccgtctcctcgggacttcgagtctctcacggtgcactctacagtatcgatagtcgcccgacccgcaggccgccttgttcttgcaccgcgtaccgttcttggtcggagctatgcagcgtccgcacgcctttttcttacgagctcgcgccatgtatctctcgtatgattgaacgcgatatatttttcgtccgttcagtgtaatcttcgaagcaaagagatatgatgcacttcataacattcggtactcatggaatctacaatgatttcgcacgtcagctggccaagagcgcgctagcagccggcttcgacaccgcgacggtctacgacgagacggatctagaccccgcgttccgggaatctcacagggacgtgctcgcactcccgcgtggcttcggagcgtggtgctggaagagctattgtatacttaagcgtctgagtgagttggaggaaggagacgtcgtgacttactgcgactctctgtacgcgttcaagagggactttagggaggccgcggaggactggctaaagacccaagacctggtcttgttcgagaacaagccttcggagccgagctacaaggagagacactggaccaagtacgaggccttctgcatcttgggtgcagaccccgaggtgcatggacagacgtcgcaatgctggggtggatttctgatgttacgcaagactccagagaccgtgagattcatccaggagtggtacgatagatgtgccaacgtacgcctgatgagcgacgaaagaagcgttctaggagaagagcttccgggctttatcgaaccgcgccaagatcagatggtcctcagcctcgtaagcaagacgaagggtctaggatatcctttcttgcatttcccggcggatctcatgtataacgtcaggataggcaggtagcactagacgtgaaggttgcattagctgttttacggttggatgaactaacgcagacaagtgcgttcaaaccctgaccctttttctatagggatatgtcaaacacagatggggtatgtcaggttgtccgaagcagccaaccacttcggtgtatgtaccaggactctcatcagatgggaggcagccggaaagatcaaggtcgagcgtagccctggaggcaagcgtatctacgacctcaagagcctcgatccctccagcgagcgcgcctcctacatctataccagagtgtccagccagaaacagaagaacgatcttcgacgtcaagagtcatatctgcgtgaccagtaccccggacactcagttatcagcgacgtcggaacgggcctcaacttcaagaggaagggacttctatcccttctggaacagagcgagaagggacttgtacgagaggttgtggttgcctcaaaagacagactgtgtcgtttcggattcgatctgctctcgtggttcttcgaaagacacggtgtccgcctcgtggttctccaacaagacgataagtctccggaggcagagctggcagaggacgtgctcgcggtcgttcaggtgttcggttgtcgatggaacgggagaagaggttacggaggaggagaaacagaacgaagaaagcgagcaaaaagaagcagaggagttgatcaggatgcgaaaagttcggatcctcccgaagaagtatcagaagagaatgctgaacgactggaggcacgcggctcgatacagctacaacaaggccgttttcctcatgaatgagaccgcgagcttcaataagatgtacctccgagacatgatcaccccagcagaagtaaatggagacaagccacacctcttgaagacacccaaggacgtgagggccgctgcggttttcgaagcggccaagaatgccaaagcctgcttcagcaatcgagaacgtgggaacatcaccgggttccgactctccttcaagacgaggaaaagggaggactcgaaggggtggtgcttggggatcgcaaagactgctatcaagcgcaggggcgatcgcaccctgatcatctacggagattattgcccttgggagttcgagacattgggtgccatcggcgagatcaccaaggactgtcagctgcaattcgatggtgccaagtattatctcctggtgccctactcgaaagcgcatccagcaaaagtgaagggaaacgccagatctctcatcaacgagacacgagaggcagtgatagccctggacccgggagtcagaacattcctgaccgcctacagccccagcgaggcatacaaattgggcgatgggtgtgcgcaacgcctcttctcgttggctatcaccttggacagactgctcgctttcgagaagcgcattccgaaggaccataggaagaaacgaagagcagtgagattgcgaatcatcaagacacgaagaaagatagctcatctgcgtgacgagatgcactacaaggtcgcggacttcctcacacgaaaagcgaagatcattctgttgccgacattcgagaccagcgagatggttcgaagattccaatggcggatcgggagcaagagcgtcaggcagatgtcgttcctgtcacactacaagttcacacagcggctgatagccaaggctgctggaaggggagtgagagtcctgatcgtttccgagcattacacgagcaagacctgtggcaggtgtggggaagtgaagcaaaacctagagggtgcgaggatcttcaagtgcggaagctgcttcgcagtcatagacagggattgcaatggtgctcggaacatactacttcgtgcgatacgaaggaagtgattcgcccctcggggcgactgcaagatggagccatggcgaatatgtcatgcttagcctgacagaccaccggacgattgtatagatgtcacggtctgttcagtgattgatccatcagaccaagggaagccaccaaggcccagagcatagcatcagtaccactatcacccctatgagcagacccgttccccacttctcgactctcttgcctctcgccgcgacggtcgcattcgaggacctgctcatgtcccaacccacggccgtcaatacgattccgatgagtacgagcaaggtcactactgcaatggtagcaaactctaccgtacggtccatgatatatatatactacttttgaacaggaaataaaatgttcaacatctgttatgtatgcggatgaatgactacacgcttctcatccctggatttggttccacaaagacagctatagaatctataagagaaatgcttagagtaaagtgcacagggatgatcgaggtctttgactacgacacgagaggtatctgggatctcggcaactttttgcgtaatagactattcatcagcacaaagacggacaggttgacgaggctgctgactaagctctccgaaatcacgagcctgcctttggacgttcgcgtgcacatcatcgcacattcacatggggctctcttgctacacaaggctctcatgacgctgtcaatctcggctcgacaccagcttcaagtgcagaacgtcacggtggacgcatacggacctgcgaagctgatccctgcctcgtgcgagcattacgcgctccggggcgcgaccaatcactttcacgagaaggattggattctgaggttgcatggaaggttgcagaggaccgacgaacccgaattcgatcacaggtcttccgatgggaccgtctttcatatcaagatgaccaaagatccgcgttacgcttccggtagagatgcacaccaatcctactacgacgagagcatctgggacgccatgggctcttgcaagatttgagggtgggcagagccccaaaataaaatctttctatatagcaagaacgcatgtctaacatcacgatcgctccggggagtcgtgcatacgtaaaggataacgacttattcggaaccgtgacgcgtaccaatctcttaggcctgtcgaacactccggttatccagctggacgatgggaagagccaagcatacatcggaccactgaggaagaacgtggtggatgccgagaagaaggtagatttcgatggacagagcgtttcggtgccactggatgtgtttggcgtgggcagagaccaactgaccgcgttcggggtctcggcggagaagcagaaccagatgttccagaagtggagaacactgcctaagaatcagcaagaggcttacactcaaagctgggactccctggacaagaacgattctaccgctctgcaggggttccttcaagggatgatagatgctctctcctaattcatctagctcatcttcgaggctactacagctgcagctgctcgcagcacctcccgtgcactctgacgaccatctatgcggtacacctcgtcgaagtgagcttcctcgctggagaggaagtcgtgatacttcgcctccaacttcttcaaataggccagagtgagcggcgtctccgcctctctccccctcttgcgtgcgcgttcgaagcagacctcagctggagtgtccacccatatgcagatcttgggcacctccagctgctgcgtgctccggtcatatagctgcctgaaaagggcccattcctcagggtccagagttccgtcctcgtgcaggagctctccaaagacgaacctgcacgaggcgggtgatctctctatgaagctgagtccggtgcgcttgggcatagacatgaagctgcagaggaccttagtctgcagtgcaaaagcccatctcctttggtcttcataaaacctacgcaacataggtgcccactcatccacaggttccagctcgatagggcattcgaagagtcgccccagaccttcaaggagaagactcttgccactacctatggagccttcgatcgaaatattcattttcggaatctgtgtgtccgagacgcgccacacgcccctcttcttatatagactgccgcttttcgggcgctgctctcgggtccgcgtccgaacagcgtatttttcgctaccatgcacgcgacactcccgtctttagttccacgcttgccacttgtcgagacagggtgtcgaactatccgaaagtctgctggcttacatgaccctcacatggcagtggtgccacttgttcaacggtacatctaaatctctcttcttattggacgaatgtaccacctaattgtgaggaacgtgtgcgtggtacttgactggcgttgacttcgacgggattcttgcccatatctcggatatcaaccattagcgggagatattacgtcacaatatccaagtacaacattattaataacaatatcagtacggtgcccattggttcgtcatagaatgcacctgaagtacatgtcagcaaccctaattgatccgtatattctatcagaaatatatatttgctcggcagtgtctaaaattttctttcgtataccataagtccgaggtagtggtaaccgccgctgatgagcagtctgagtcacaactgagaatgatcattggcacttttcacgtgtatatttcagtttcgggcgcgatggctaccccaggcgcgttgcctatagccttctcggcttcccttccatttccactttgaagatacacataccacataaagcaagagctcaaacatcactgcttcctccagcatcgctcacgcctccacgcctcctgaaaagcgctcacctggctgacggaggagcatgccatcatggcatccgggttcttttcggcagcagacgatgcggggtgagaatcctggccgagctgtagcacacttccctctttctgtgcaattccaatcgctacgcatctgctgtgtgctagacctttgcaagagagagggtgggtggatctcaccaaattgcttctccagccctattatgtaggcagcctagaattgcattcagcagggtggtggggattaagaattgcattcagtagggtggtggggatcaagaattgcatccagtagggtggcttttaagaattgcatccaatagggtggtggggttttagtagttgcatccagtagggtggcggagtactgaatcttaagttcaaaaggtttcaccttgggtttctctcaaacaacccgtcgaccgatcagagcaaattcagattgcctacaattcagattcagattgtatatgctctaaacctgtaagcttgatctgagcagaatcgcagagttgcagggttagggttccttttccctgctctctgcttggatttcttcctagaaactcatcaaagctgcagagtggtggtgaagtctgatactttgtgtgtagggttctggattctgcgtggataaacccttctctctgcatatttgcagatatgaagctgcactcgcgattgagcacagtgtggctggagagatcaacgacgggtttgtgggtttccttctcggggatcgcttgaggctagaagcagagctggagttggccagacaggcagccgagaaggttaatgatgagaacacgcggttgcgcattcagatggagatgcgcgacgaggagatcaaaaggctgaagagcaaaagggggcgctctgatcatcttggcctggagctacctaacgccagcactcacacgcagtcaagctagataaggtcgaaagtgatcatgaggtaaccttttagcaatcgattgctatatgtgccaagcacgatcaatttcggacggcgttccgactcgcggatcagggcaaacctcttgttgtagaaggtgcaagtgtagagtcgtctgacttttgcaccgaggtttacgtggagttttggtagttgagaccacggatggaaggcagaaccggtgtttgaatagtaagttgagtcgaggtgtaacatagtttgtaacttagttgtacttgtaccaaggtttacgtggaggattggttgttggagatcacggatgtaagactaaaccggtgcttcgaatagctgggctgagtcaaggtgtaacttagtttgtaacttaactgtaagatgcgggttggggccgcgcaacttacagtggttctgtgtctgtacgaataggatagtctgatctatgctcgtcgatagaatccactcatctatagatacagtctgttcagagtaaaatggcacactcgccacagtacccagccgtatctcggattctcaccgaagtgcctagatgaactcgtttctaggcagctatgtctttcgactaattctcagtcatcctcacaatgctgctctcgtgaagtccgctggcctgccctcgcctctggctatgctcatacagatccaagctatgt

SEQ ID NO: 3 - DNA, 21146 bp, unidentified
  misc_feature 1..21146: note = Fanzor polypeptide
  variation 1088..1107: note = n is any nucleotide
  variation 5379: note = n is any nucleotide
  variation 5382: note = n is any nucleotide
  variation 5384: note = n is any nucleotide
  variation 5387: note = n is any nucleotide
  variation 5392: note = n is any nucleotide
  variation 5394..5547: note = n is any nucleotide
  source 1..21146: mol_type = other DNA
tgctggtgccggcgctccccggaagttgcgcgccggcctagttgccggccagtgcgatggtcacgaacctgctatacgaaaccgcatttcccggcgcgctgcatgcaagccgtccgatcgacagccgagcgaccagtcgacggttcgaaggatgtcagtgggttcgtgggtggtgcccaaagttttgcttacagggtcggtttacaacgtgtaactaagcttgttcagaagcctcctctggggcccgcctgttctgcctgctccatattaagatattagcaagcctggtatgcaaacaagttttcatagaaacccgcttaattcgggtcagtaagttgtgggcctcccttcgatttgtcaattggcttctgtgtaccttagtctttcgacgaatcatctgagtcaaggatctcctgtgcacacatatgtgtcgcttttaccggcctctcacacaagtcaagcaacctgcgctgccattgcagaccccgttcagtccgttctaccagctacaaagctgcagcatctagctaccagacttaccaggtctgccccgccgcctacaaatgagaattgattattagaacgaccggatcgaatggtgctattggaagcattcctgagagtagcaactcagatgcgattgtacgtgatgccgtcaccagcttttcaaataacatattcaaactgttctactgttcgtgcacaaattgttcagttcaaactcacccttaaacatgcatgtcgtgcacagattgtctgattcgaggtaccgaattcgtgaaggacaagtaagctccagcatttcagacatttcggtcacgcaatgtctgtacagacctgtccaactggtatgacttcattcaatattgagtggcagagtgcttcgtagtctgcttccttgccaggaacattacttgtccttgctcgccaagcgtcaagcgccaagatccggagcgcccccgctgcttccgcctgcacattctcatttttgctctccagcaggcccaccatcctctccaggaaccccggcacagcggctatggcactactgttggctgcatcatgagccaggctagagagcgcccatnnnnnnnnnnnnnnnnnnnnggcggctatggctatggcgcacaaataaaattcactcaggtgcgagagcaaccccgctgccgcctcctgcacaatctcgtcattgctccccagcaggcccaccagcctctcaaggctgccctgcactgtgagtaaagtacggaagtcacacttggcaacattctcaagcagaaaaagtgccgcccactgcacaacctcgctcaatcctcccaacaactccaccagcatttccaggaccgcccttcgatcaacttcgtccgtctctacaattgttttcaaaaccaacgctgcccgtttatgcgcgcctttgcctttgctcttgagcagattctccagcatctgcagcctcctcgattttatagccgcaactatgatcccttttatcctcctcctctcagcaaaatcctgcaaaagaagcaaaatcaaaatgtttaactgttgagagcttcccagaccaggacaaagagttaacttggaaaacactttgagtatgtacccagcaataaacaggaacatgataatacagctcaaaagaaacaagatgtcggaaacatgatatgatgcttcatgactttagacgttcagattgcactcgaattggagggacctttggacacgacttcagcaaccgccaacagtgcagagcggcttccaagaaaccgaatatttaaatgatggcattctgcaacaatgagatataagcttcaggttacacaggcacctgaatcttacctctacgaggcggcctcccaggatgtgcacaaagacatcatctgccgcagctgatgctccgatgtactgtggtctcagcttctcttctgtctgcatccatggaggtggtgagtagcaaaccttcttatttattcttcctgtgacttcaaaactgaaggggcctctcagatgttttgcttcgattccagtttctgacactgcttttctcttggaatcttcaacccgcttcatgattccccgaggtacatttagcaacttgttaccaggaagtccgtgcgcctcaaccctaacatagtgtccactttgccaaccatccatggctttcggactacaaaatagcagattgctcgtccgatgaaattttgtgagataggcgtagggacgcaaaaccttcacacacgtcccttaataaaggctgtcgttgctctaaacagtctgctctaagctgattgcaagtcatgagatgtctacagccatcgaggatgtgaccttgtaacgatctgtcccgcttccctgtgagggcttctgccaccgctgattgtgctacctctgaatgtttccctaaccatcttgctcttgcagccgtgtgacaaaaattaaaacatgtttgggccttttttctttttcttttttttcccgggcaccatttggcacaccggtagagcaggtaggtgcaccctgcatgccaactacgcccagggatttgaaccccggccaccttctcttcgaggaagtcgcaacccctctacctattttttcggcttcctcgggtctcgtccccgggggcggttcattgggaaaccagacccacccgggcgtccacctgaggagttacagcctggggcatccattttcctggactactatctggctgggcaggacagctctcgcgacaaacggatccccaaaacagtggccttgccgggaattgaaccgagacgcctgtggcgctacctgcgtcatgctgacgactacgcaaaagcgagcgcgctacggtcgctacgggggctaccgaaacaaaaaatcatgctgccagctaatacccggcgcgtcggacgacccgacattccatgaatgccgggtttgctgacaactacgcaaaagcgagcgcgctgccggcgctaccggcgctaccggcgctaccagaaaacctcggatcatgctgccagctagtacccggcccatcggacgacccgacgacatttcagctaatacccggcccatcggacgacccgacgacatttcaggaatgctttgcttcatttcaggaatgcaggatttcgtgagttcctgccccagggaaactgaggagcaggcgacggggtatactcctcttaaaaaagaggaggagtaagagttcccctaaggacgctcccatggaggactactgctcacatgaaagtctgcatgggctaaaaacgatggagatgctccaaagtgatcagcattataaaagcagaacagccagagaatgtttcatttccttcagctccttagggcttcgccatgcccaatctctagattcatcagagttctactgcgcttctctcggcgggctgctggacagttggtctacatcgagctggctgaacgatgccgcgaagttcaagtgtcccaatggcggacgacaacatggcggatgcccaggaagtatccgtagtgcagctaagcgttcttctgttgcagttttttcattcattgtttggggagcaagcgcatattctggagttctacgcatcggccttggcagacgacatcaccaaggcaacaagcgaagggtttgtctactgaatcctctcctgattgcagcatttgtatgttccgaattgtgtttgcgagcatgtactgctgaaagtttgggcacaaagtatccctttgatcagaagtgggactttggcaatgttcaggagtcagcctaaacttggctatggtttgcgcaagttcgattcaaactcgggttgcgccaacagcaagacatggctgccccgctgtattcgctgcagagacttcaaggtgaccgacagccagggaaagagattgccagcctctgcaatcttcacaaagaaagttagcaacaacaagtcagtggagatcattctcgtgggaatgtttgaggcgtacaacaagtatgccaaagacaagggattggagcaggtaggtttttgcgagctggatacaggcatgtaggaataacatattttgcttttcatcagacactggtcagaaagtgctatgcagccgacttctgcagcatacagcccatattcttatacgcacaccaaaatttaccaatttatcagtacagcgcctttctcatgttattctgggcactgaaacttctgtttgttcctacatgttttaccctgctgttcagcagcttcaacaagcttcttcgtacaggatggtggtcagaatgcttccaggcacacagtgtctcaaggggcactacactagcactctaaagccagacaagatctccaatttttatcgcagacaaatttttattcatgcgataagatgattctcaactgactttgcaaccagaattcaatcaatgatctgatacaatccccccttaccgtcttgccaccccatgtctgattggtgctcatttttgcagctgtactggtcggactttggggcaaagcgtggacagaaccttaagcgcagcctgatgatgtccaaattggacgtcttctttgactggtatgctgaagactccgagcttcgcaagtttacctgggatcgcctgattgaccacttgcggacacatcgcactgtggagtgcaacttgggcacccgagctcgcctcaatgctattttctcacacatggcgaacgacccagacgctctcccccagcttgacgacagttccagcagcgccccagccaacatggccgtaaacgcttcaaacagtgtgagctgctgtctttctttattgtaatctaccaataattctattatgagtatccttcgtctaatacactaaaggagaaggcaaataaggaagtacggcaatctgtttcaagaatgtgtttagcaggtttttccggttgaattcagggtactcatgcccagctaagaagagcaaggcctactctggcacctcaaagagtcggagtcctcaatttcttctatcattgcccactagagttctctttggttgcttaattttgcgcagggtctcagacaccactttgttcttgtgcagatggtggacttgaacgtcagtgaaaccggcattcccatggccgaccttgaagcgcttgagcccatttcaagggtggaaatttccacccagacttacccggaaaaccggactctactgggctcattctctgcccacgcgccggtaagagcgcataatagcgcattttggtccatcaagcttctcatgctcggagccttgtcggcaagcaggggcaggagtatcggatgcctctagcaagttgtcttttagcattctatctcacaattagccatcgttcgggaaagggacgacggaagggacccaacctacggggacggtagaggaccttnctntnggngatanannnnnnnnnnnnnnnnnnnnnnnnnnnnnnnnnnnnnnnnnnnnnnnnnnnnnnnnnnnnnnnnnnnnnnnnnnnnnnnnnnnnnnnnnnnnnnnnnnnnnnnnnnnnnnnnnnnnnnnnnnnnnnnnnnnnnnnnnnnnnnnnnnnnnnnnnngcctctagcaagttgtcttttagcattcatctcatattgcccatctcgaaaagaatgaggacccgactcggcctcagaaccttctcttctttgcagacggtgaattacaatatgagcgaagtggacgttcccgttccccttgccacacttgccttccccgaacctacccgaattgaccaggacgagtggaactgggactccttctctgcccacgcgccggtaagagcgcataatagcgcattttggtccttcaagcttctgatgctcggagccttgtcggcaagcaggggcagtagtatcggatgcctctagcaagttgtctttcagcattcatctcacaatgcccatctcgaaaagaatgagacctgactcggcctcagaaccttctctcttttgcagacggtaaattacaatgtgagcgaaatggacgttcccggtcccctcgccacacttgccttccccgaacctacccgaattgaccaggacgagtggaattgggactccttctctgcccacccgcctgtaagagctcatagcaaatcgtagtcctccaagcttctgattccatcaattgcggctcactttgcttgaaagaggctgtcaggttgccgttagacaacgggtcggctgaagttgaagtcaggcgttagtgagaatatacgggcaatggaaatacccttatacgatattccattctgccagcaggacccgcttgcggatgatccgctgctcgactgcgacgagcgtgcctcagtcgtcgaagattcgccggtcgtcaaggaaggcttattcgacttccagagcctctcaggattctagtcgatttgaagctgaaggcggcgtcgctgtgcgcggatccggcgcaaccacacctcgtcatcgtatcgtaagaggtggcagactcgtaactggttaaaagactaatggccaaccaatagattagcgcctgtcgtccaggcacaattttacgtgtgccattttattctggacagactgtaaacacaatcgagaacatgtcaagtcatgaggaaatttggaaggttagattttgcgggcaaaagcaatggcgtcctctatgtctaatctagcatttatatcatatataattcatggatctaattcatggcaatctaattcatggcgattggacggatctaaatcatagatctaatctatgtcattaatctatctatgacgccctcttcatggtatcgaaacgagttgctgaacgcatcggggaaggtccaactcgatgctaggctcgtcatgaacaaactcggtcactttccacattcacgctccggtcgagaaggatgtgaccgtcctcgagaaccaaggggacgcgatagtcactctcgattgtacgcaccttcctgacaggatacagtccgaccctaggagtggccatccgaatagcaccagggtgcatccaacgcttgatacgtctcgaggacactgcggatcggattcattccgagatcacccgactgcccgccacggagcagggcctatgccaggcggatgcagaaagcggagctgagggtgcatgatagggtccgaaatctggtgtcgaaagttcactggaagacggcacgatcttccagtgccggatactcacggatactttcgggagcctaatcttgcccccattcggaacgacgaggatgtgcactcggaatatacgtggtacacgccgggaggatcgggagagacacgagtaggaagatgtccatctggtcgcactatacttccagggcccagttggcgatgaagtgcaaggagcgaggggtcaatctgatggtgttggatgagccgtaagggacatgcacgaattgtggttggatccatgagacaatcggagggaggaaagtattcgagtgcggttggtgccgggtgaagatggaccgggacatcagtggagggaggaacatatacttgaagcatcatcagcgcctgacagggggatcggtttcgaccgggcctctggagggctctgcctcgctagggcctcgatatcgaatatcgtgattaggagctggcgaactcagccttggtgggttttgtgggccgacagtcgaaaaagtactttgacgatagaagggttacatttaggccatggaaggatacattgtttgtgaatatacagcttaaacttggcggcgaccaaagcatatgcttctggataacccaagggatgaagcgtctacgagtgcgtggttccagaccaatctcaaaaatatcggatagactaccagatcaattgccattcatatcaaccagagtcgcgaaaattcagctggtggtatgtaagcaaacatcgttctcgaaaaacgtgctggcttgtccgtttcgatcactttatgcagtcgacctttctaacagattgtttccacggcggtggccttatatagagtgagattctggtgcatcactgaaaaagacaagatgctttcagatggtcgcgcttgagcttccggaacttcctctcgtctatcctgattttccagtggcagtgttggtgagaattccatagccctttgttgtaaagcacctcaaaggaaacctcctaggaaaactccgtgaccatcctctcgatctctcgaagggcatccgccaagatctgcgggggaagatccgtcgggctcctcacgtgcatgaatgtcgtgtatataaggtatgtcctctgcttgaggtcgaagtggagcctcccgagaaggccatcggcgatgatataggccagagcacgcggtgtagaggggctacatgtgtagcacgcggtgtctcccatggtatgctcatccatttgcacatattgtcctaagtagcgactattacatctccgacgttacgcagaaccgctactgtggccatgctgcccaatgctaaggccgtcccagtcgatgcagcgagggaagcatcaccgaaccgtttgagtgcggtacacggaccgctcgaagcaactagcaaagatctccagtaaccgcgtgtgcaggtggtttgatataggtgatcggctccataccaaagtgtgtggtacgtgagaaatcccaagaccgcatatgtgtagggaaccagaaccagcaacatcgttcgacattctttcggaatgcccgacatgtaacccctaggatagaccctcgaaagcagggaccgattggaaccgcacgaaacgcgcacagaagctcgataaccgtttgactggtgtatatcaaaggggtcatggaaaagcggagcaacttccgatgcgtggaggtgcccgcggacggatcctgcatgtttcatgcgattgcggccaccctcgctggtagagacgtgacaccagacgaattgaagagagtgtcgggacggttgagagatgcggcgatcggttatgtgttgaggttttggcggtcgtctttgggaggcgtccgagggaatccgacggggagggacttggtcgaactagagtacaaatctgccgagggagaagacgcagccaagtcggtccgaggacccatatcgtatgcaaagtacatgcggcatcgcaaaacattcggcggtcacacggagctgttagctctcagtggtttgttaggtgcggtgatcgtagttcacaggagcgacgtcacgggtggttcggtctcgatcgattgtcgaaagtttttggaaagaaaagctgcctctggaaagtaccgtatcatacatatagctttcgatcctcagctactacattatgaagggttacgacggaaggtcccaataactgcttcgtgattgaatgaacaaacgcagacaagtgcggtcaaatcccacacccttttctataggggtatgccaaggtcgagtcggatgggatatgtcagactgtctgaggccgccagtcacttcggtgtctgcaccaggaccctcatcagatgggaggccgctggaaagattaaggtcgagcgaagtcccggaggaaagcggatctacgacctcaagagtctcgatccatccggtgagcgtgcctcctacgtctacgtccgagtttccagtcataagcagaagaatgaccttcgacgtcaagaggcgcatctgcgtgaccaatatcccagacactcagttgtttgcgacatcggatcaggcctcagcttcaagaggaagggacttttatcccttttggaacagagcgagagaggacttgtacgagagattgtggttgcctcaaaagacagattgtgtcgtttcggattcgatcttctcttatggttcttcgagagacacggtgtccaactcgtggttctcaaacaagacgataagtctccagaagcagagctggcggaggacgtgctcgcggtcgttcaggtgttcggctgtcgatggaacggaagacgatacggaagagatacgagctgtgccgaaaaaggacgaggacgaccaggagagcgacgaagaggaggtggagaaggaccaggagaagctaatcaggatgaggaaggttcggatcctcccaaagaagtatcagaagagaatcctgaacgactggaggcactcagctcgatacagctacaataaggcggtgtttctcatgaacgagacagcgagcttcaataagatgtaccttcgggacctcattactccggctgaggtgaacggagacaaaccacacctcttgaatacacccaaggacgtgagggccgctgcagtcttcgaagcggccaacaatgcaaaagcctgcttcactagtctcgcacgcggaaacatcgctcatttcgagctcgccttcaagtcgagaaaggaggaagattctaaagaatggtgtgttggtgtagcaaagaccgctatcaagagtagaggcaagcgcaccttgatcatctacggagactattgtccttgggagttcgagacgctgggtgcaatcggtgagattacgaaggactgtcggctacagttcgatggtgccagatactacctcctcatcccctatcggaaagctcgccctatgaaagtgaggagcgaaagcaagtcccttatcaacgaaaccaaggaggccgtgatcgccctcgatccggcggtgaggacgttccagacagcgtatagccccagcgaggcatacaagttgggcgatgggtgcgccaagcgtctcttctcattagccatcactttagatcgactcctggccttcgaaaagcgcatcccgaaggaacaccgcaggaagcgacgatcggtgcgactgagaatcatcaaggtccggaggaagatcgctaacttgcgtgacgagatgcattataaggtcgcagagttcctgactcgaaaggccaaggttatactcttaccgtcattcgagaccagcgagatggttcaaaaaatccgacgtcgcatcgggagcaagaccgtcaggcagatgtcctttctgtcgcactacaagtttaagcagcggctgatagccaaagccgctgaccgaggagtgagagttttgatcgtctccgaccactacacgagcaagacatgtggcagatgcggggaagtgaatgaaggtttgggagccgcgaggactttcagatgcggaagctgctccgcagtcgtagatcgggactgcaatggtgctcggaacatcttactacgtgcgattcgtagacgatgattcgtccctcgggacgactgcaagatggggccatggcagatatgtcatgcttagcctgtcagaccactggatgattgtaacgatgtcgcggtctgttcagtgattgatccatcggtcccataatgaccgtgtacatttgcaggatgtaaattgtctgaaaacacataggattatgtgtggtacatggtctaatcagcagctctttgatcgcgagatcgagattcggaaagttttctcgatgacttctatgtcactgaatggcttcgatcggcggagcggtcaagggcgagtgctgtcatttcatgaatttcatcagccgtggcaacatgttggatctcgccgtaggtacggtactaggtgggctgttcggcaagatcgtcactagtttcgtcgaagacatcatcggaccattcttgtccttggtatccactcacaccttagataattcgttctatactataaagaacggccccaatgcgccatacgactcgttcgaggaagcgaagaaagataaagcgttggtcgtgaactggggaccgtttgcgcagatagctctcaatttcttcatacaaggtctctgcctgtatttcttcgtcagaatggtagaccaggccaaaaaggttccagcggccctcctatcttcgacataacgccacaccgtatgtgttcgagtgtggtccccgtcgatcactaagtcacatgccgaaacgacttatggcaggatgacagtgaaagaccgaaagaccaagacgaaggccggggctaagacgaaggcaaagcccaagcccaaagctaagccaggcaggaaggggcccgctcgcagtgcactcgactttaccattggaacgaggaagaaagggctggatggcaagttctgggtgcaaatgggcatgggtgcatgcatcggacgtgagagctttctgatctcacatatgccagagtgctcgactagtgcaaatcctagcgtcctcaattcgtctttacagcctgagctcatctgtgcgctcttcacgattgtgaagctgtagattccactgctcgtgaccttgtcgtgttgctgaataaactggtgggcgtccatgcgtgcgcttatcgctaacttcctagtcaatcgttctgcctatatcgactcaagtgcttccgttgagaactgcctactgccatgaaccacacattgttcactttgctcggtttatggaaatttccccaatttttcaggcttcgatttcgaaaccgtccgcggataccacacatattcgtcgaacttccccggttggttaactttccatgacgttcaagatgggtggaccgtaaactcacccgatatgagggcacaatgctcccaaacttctcgaagccagacactagacatatttagaatatctatgaagcactgaatctgttcaccattttcgcaatatcctactttcctcccataatcctcatctacgaaagcttctcttagtcgcgtgagggctgcgatggcttctctttcgattttagctgaaagtcgcagagaaggagcagtaaacgggcaatagccgtttgctagtattcgttgtctcgctgcattctttcggagagccgtagattgagctgagacgtacagcccacacaggatgttggagagtcgcttggtgatccgaagcaataaagaggctgctgatgtacggcatgcactgaatctgccagtcagggtacgttttatccacggtgtcatggagctttcagggcacatcgaaactacctgaagagcgagctggatcaacggtgagatccagcccaacgagttcaacaaattgatgtatctagtgcattctctggctttttgcttccatataaggtgctgctctgcgtcttctagtctccacgacaataagacggtatcgatcagagcaatccgctcggaacacatatcgggaaagatctgcggtagcaagtctttcaacgagcactgaatgttgaggaaaacgatcattatccgtgcccactcagagtccgtgcatgcgagttccatgtctctctcctgcaaagatgttattttcaggtgaggaagagaacgcgacccattgggggctgttcacgcactctctatgctgaacgctccttctgtgattgccggcaggtgtcgaggatcttcagccgccgtgtctgacaacatacgtcgaaatcgcatgtcgagtctcgtccctcgtccgtctaatgagcggtacaggctgcctcccaattcctcacaaagagctagtggacgatcgtttgaaagtgtatcttcttctggaatgacactcttccaatcgaccgctttcgaaggagctgccgcgtagactttaaatcgaatttgaatctgacgttttggatgatcggaaccgaatgaactgccctccaaggggaccactctgaccttgaggtccaaggcgtccacttttccagccctgaaacaagtatccatgatcatctccatgagacagcggcggagttttaccgcatctccatacaccttcctcggaacatcgtccgtcgtattccaggttgcgcaatttatgaggtccggtcgtgactgactcaaagcgaggcggaaattctcgatggggtcgaactcgtactcgtcgatagacatccgtccggtctcagcgactccgacttcaatgagatcgtctaatctagagacgagaacttcgatgctctcccggtcgttcggaatacttccctctcctgaaaagctcaaggctgctagcggtgcccgcacctcttcttttatgcggcgtatgaaactgagtttgtggcggccagtgtcctccgcgcggtccatcgcagacgcggactcacgggtgcggtagtggagatgtgcctgaagttgcttgttcaaagtcgcgaccgtaaagttggtggcatcctgttcgcagactaaagctgccatgcatatactcgcagtgctcacgacgcatatgaagctctgttccagcacgagccaaaagaaaggagagtgaacactgccactgaacggaccctttccgttagaacttcctacaatcaccaagctcattgccagcaagattgctgcagtgacgccgcgtatgtccttgatggtagaggcgacgaagagaacgagcccgaatgcgggaaagacgaggggtcggagttgttcgctctcgaccagcccatatctattcagaaagacgaaagagaatacgatgacgatagccaggtagaccgcactcaatgagacgatccgacgtctgtccattccagtccaaggttgagtgagtgccgggactaaagcgcacgtggcaccgagacgtcctaagaatagagccgcaccatagagccctatttgcttcgcgttgctgatgcgaactgcgaccaagaggatagcgatgctgtatcccgatatcagaggggcgatgggcatcgccgcgaagaatgcgaatgcactatttctcgtgtcgaaccagttcttagtgcgtccactcagcaggcggactaatgtacaggatatggtcgcttccaagccattgatgaggccgatcacaggagcgatcgcgaggaatttaggatggcgatatcgtttggacgtgtaaaacatgacggttaaatgcaatatggaacccgtgaagacacctcctgcagcttgtatacggccaaaacgtagggccgctgccagtccgatcgcagatggagcccaaacggggacggagtgtgtgtctttttggacgagaagcctactgagttgtgccagactatagtaagctatcaggactgatagagtttgcagccagttggcaggtttcttccacgacgacggctgatgcatgaatggtcatactacgacaccacgaaaatatatggtaatcggacatgtgtgcgtggtacatctttcgtacagtttgtgttgtattgcgattttaagccttcaccgcgacgaattttaccacaaaaaaaatctagctaagtgacaagttacgaaaatggagtacgactatccatacgaacatgacacctcggatcctgatgttagcatcactggcgacccacgagaagcgtttgaacagcttcgatgccgaatgcgggttcttctgcgcgacagcccgagcaagatgaagcaagttctgaccagtattgatgaactagagaaccacctagatagaatcacttcgtggcaataggcaggttattgatccatacaacaagaaatctatcaaggaatcatggcttgcacaacctgcccaaacgcacgcgcgttcagtacaaacacaatttaacattgagcaaaatgtagaaatatgtgcatcaactgcaatatcgttgctcccttgtcacataaagtctgtgatctcctcggcatcccacggaacagatacggcgtcatttcaagtacgtttaggacactgatgacgttgatcctcgatatcaaatccaatgtaaaagatggagtgtacatcaagaatccgcgctttctgggaaagggagaggaggaactgctcaaatacctggaggacaataaccttcttcactacttgctcaaaatgtgcactgaagggattgatcatcctgctgtagtgagccagtacgtaatcaattataagtactacacacacttcacgagcaactggactcctcatcctgacatcgttcaccaattcaaagtccccttgcacctgcttacagatgaaccagagcgtctgacgaagtgcataggtagagtgaattttcaacaaacgacgatcattcttgaggaaatcgtccaaacgaatcgcttcacacgagaggccgccgaccgttactccatctttctacttccggagcagaccttttacaaacctgtagaggcaaacgtttgattctaacatgcgagcattgggacgtcagcaagactttcaatatattcgatgccataacctgatcggaagtttctcaaagttggtatagggcgtctgtatgaactctggatgggtatcctagtcgtccggcgagatctcgtgtacgaagttcgtcgaaacatcgtcgcctgatttcaaaggtaggaaggaggaacgtggtgccacgatggtcgatgagagcgaatctcgggacgacgtgcgcataaattactcgaccgaggactactcgaagaaacggcgtgtgatgacggctcgcgagtgcagggaggtagaggagaaggaacaaaaggccaaaaagatagcgaagattttggcggtggtcgaagatatcaagcagatgttgcaggagatgagggatgtcgttgcgggagtcgatgaggagggattaatcatgaatatcaaaacgacggaacttcagaagaggataaagttggaggctatgtactgcaagactgagagacccgccaatctacatgtaccagactacggaggatcttgtggtttatgtgcagaggtgttgcatctgaaggaagtttccctcatcttcgatgacggaggtacgcttcagtggatgtgcacctcatgcttcaaagagctggagaggattgtcaagaggaacgatgtactacgagagttgcgggtgcaaaaagacgcattactacaaagcctgatttgccatacggcgtccaaaccgtcgttgcatgaactttgccaaacattggaggagataatggaagtactaaaaagtgcatcgcaagctagaacgaatgaaggtgtcgaaggagagtcggaaacgacgaattccgacctggaacaagtagagaacggccttcaagaacacaacgaactgataccatttcagaacgacagtatcgaacgagatttggacccaacgacatccatcatgcaaatgacttggatcatttggagaacacccttccagaccataacgatctggtatcattggagaaagtgagtggggtgatcgacggaatccgtgggaagcgcacgagggtgagaaatcaccacatgagattctttcctgcgtatcactacgaggaactcattcgtcagagtgtgacagcacgcaatagcgatatgcgacagcgagagcgttatgtggatgtggataccgttccactagacaagtcgtcagctgtggccaagtggaccgagcaaaagggcagatgctatatctgcaacaatccattggaatggaacagacggttgtggggccgcggtgctttccctgagattgatcgtttagatgtagctgtaaatacctatgccgacaatctttcctgggtgtgcaatttctgcaaccgcggaaaaggttatttcgtagagttgtttgaatacgagaagatgatgatagaaactatacaatccgtagagagaggtttatctgaagacctcagccctacggtattagaagacaagcttagaaaggagctcgcgcggcaatcatgcggagaacctatgtcaatgcacgacgattgtcagaaaggctagagggataagtgatgccaatgtttgtgaaaatgatgaaagccctttcgaccttcataagccaacaagagaagacccccaaatcggatagatcgccaacgtgtcgaattatgtcggttaaacctcccttgtatgtcgtgtacgatgatgaagaacgtttcggaagagatgccagatacctctgcgagatacttgcggtacaggtcgtcccaaaagttgatttcagggtgtgattttgcaaattcgtgaaccttatgccggagctctacgtttttggcctctcgctttgctcgacgcgcactccggaagtagcgacaaatgtgctcgatatacacgcatgggaggcatgcgctgagtatgcagaaagctgattttcggcgaatgtcttcgcgcgggccatcggcatatgcatagtgtctatcaaattctgtcaagcaggacgtgaacatgtctacgatcaaaggcgataaagtgaatgtcgattcgacgcagcattccattcgattagggacgtggaggttcgcgaaaccatgcagcaaacaattctcagcaagcaatcccgaatttcgcggaaactagggtgcgcgcctatggtccgcgttttattttgcaaatggtatgtgaggttggcgaatggcggcaatggttccgaggccgtgggcccgcaggccccagaggccagcagggcgccgatcctggcaagccccccaaactgccacaatgtaggctttttttctcatgaaaagcccggcagcatggtaagtactagtgcgtgatgggtgcttgatcactggggaactgacttgcaatatttattgatctgccctaaggcgctaagtcgcagatttccaggtgactccgagtcaaagtccttaagcttgtttcgagtctttcttgaggaaccaaactggtgctggtgtagctgctagcaggtcggctcgtcccaattccttgcgagacagctggattgaggcagctccttggatactcgcttgctcgcttgagagcaatatgcgcgcgcgctcggcttcctgcctcctagttgactgtgtgtcgccacgtggcctcctcgaaggccaggctgcgtgcttttatctgcataccgaagctatgtccgacctctttggtaagcgtcaacgggtctagcgttcttggcaaggtcatgtcttataaaggagtgaagtgatcaatcagcgcctatcagtctatatatgttcttagtcaaggccagctccgcagggaacacggtcagaatttatgtagcctttgagcggtcacgatcgaggaaacaaggccccctggggaagattctcgtgcaagccgcgcgcgcgcgccaatcgtgaccgtccaacttcaacatctgacgaagcgagggcgttgccgcggtcgggccaacggcttcttctgcaaaagggcctctggagtgtgcgacagctggccgtttagcagaagtctgacttcttttcacaaaggatatctttccctttggtacgtccatttccgctctctcacacagctgaattcaggacgcacgcacggagatggagactgagagccgcttcaccttagggaagcggagcaggggggatgacgactcggatgtagaggatgcacatcccgagggcctcctgcagtgggtggaccctgacccatggatgatgtggcacgtcagcgtgcacgcgacgctgccatgggagttcgccttctctagcagccccatcttcagcagagccgcaggggctctcgtttcctttaggctcggctttgtctgccgggcttccacagcagtctcccaggttcagcgccgggtgacgcgtgcaattcagcggatgatccagttggttgcctcgagcagccccatcgctctcatgggactcggatatctgcacgatgtggtggtgatggcgcctcaggcgcccgcagggagtccagttgtcgcatacagacctgtggaggacaccggtactcttggtggtgagtcacctctggtccttcacctcctgctttgctagctataacattgagtgcaatccgctcattaggctccttcctcggttggcccatcatcctgtcgtacgctctgttttgttttcactcatgatgaattgagacctttcagccgtctgcagtccagccttgtggtgactttggatgttcattcaggtgtcaattccccaaagtagggtcctttaacctttttttgggtcaagacctggcctactctatggagcgtgagcgtccagatagattcggtctggtcatacagcatcttgctggatgaacaaggattgctgtggaaattcaaggggatttcagaagcagagcttgaggagcacttcaaggcttccaaagacgtctctgaatgcattgaaaggcttctgctcttttgtgtcgataatgctttcatgccatcggcaaaaccttcaacctcgaaaatgataatcacagggcctatgagaccactgtacagctgtacaaaaggagttgtcatgcttctaacggtgatcaaagccatcggtaaaatcaaaagtcctgtttttcacgttgatgcaagtgacactttataaggttgagtgcctgttgcagtgaaataccgcctgaacttcgaggctcatatgttgaccggcaaagttccgcattctgcgatgagttgttcgcatagcggtctggctctgaacacgatgatgcatctttggaaagaagccaaagattgacccgacgcaacagaaacacgcaaaagttgtcctgaaggaagttgcgacgcttttgaaagcagaagaccctccccagtcagcgtatgacggtttttccgtcctccttcaggcctcacagctggcctggggcaccaggcaccccagccagtcaccgacctacagctgctggctgtcgtgatcttccgggcgggtgagtactgcgctctcctccagccttgctcgacccatccgaacctccagcaagttcggataaagaatgaatcatagctacgcttctctctgacctgatttgctttgttgctcgctgttccgcgcttgcttatcttgcaaacgtgtacagttcaaccacctcgcttaatcgcgtctggtgccagactatcttccatttacgtattgttgtcaatctctatgtctatcaacctgattttagccgtcacaacttgcttgcagagggcctctactggcttggacaccaggtggcagccttccagaactacctccaggcacaccccgcccccggtccttaggaacgcgttttcgatgtagtaaatatgctgttcattatgtcattctgtcatcattttgtctaggttcatgtttagctactccgatagcgtcttaaactgccatgatcgattcgaaaagagaccatcaatgctagttcatcggcatcaacctcccaagttctgctcaatttgccgaacacatcctcatactcatctgatcgaatccagatcgttatcaaaatgcctcatgcatgcaatgatgcacgagttccgccgggcggcaaactcacgttagcaatgtaatgattcgattgcgcaacaattctcaaatttcgcgcacactgcttgggcccttttcgtctctaaaaggtggcgccgggagcgatgcatg

SEQ ID NO: 4 - DNA, 21329 bp, unidentified
  misc_feature 1..21329: note = Fanzor polypeptide
  source 1..21329: mol_type = other DNA
ggagtgttttcaacaaatcagtaattagggactttttaaaaatgcacggataatacgggtaaaggcttgcacctagtcaaaagagagtttttaacttagaggaaacacattttaccacatatggacccagctgtgtctgcttaaagtctgattctactcttaagacatcagaaagttgtatttgtagagttccatatttcttgactgaatggcttccatatcaattttattactgttgttgtgaattacttattaatattttggaagtggccaaaggcttcagccactgggggctcattgtgctatgtgatatagaaacacttgataaggacctgttttttaaaaggtatttagacattgctgcattcagcattgcaacgcctcactgatttaggagccttagtctcattttcaaaaggtatataggcactgaggagccaaaatcccactggaatttaggctctaggggcctacatcacttttaaaaacgagacttaggctcctaaatcggttaggcattgccgcaacactgaccacagcaatgtctaaatactttttggaatttctggtgcactcaaaatgtcaaaatttcaagttttcatcttgattcaggacaagaacaaatttgaaagttggaatttcctgtaggatggaaattttaattttctgaccagctttgttacacacatttgttggatgtgggtatgagtattcacatgtataataaatagtacacattgtctatgctcagctgtccctccacatgtccattattagtaggctagtttcttgtaggtttcatggaagagatggatattgagtaaggatttgaagaaggaaaaggctttatagattattttaggtagggtaagggatggaaagacacttgcggcagaaatgggcagctgcacagtcaaagaaaacttcattggccaaataaaggaggtggagaggcaacaaaagttgcagaggtgagcagaaatgtaatgtattaaaataagtctgtgctgttaaataaactgttccctgaaggtagggacaaggcacttgaactttaatgcagtggaacaagaggaactaatggaatgatcacagagggacgtaaaatgttcagaagtacagacaagaaaggtgaactttacaactgattttttgttatgagcacaaaacgttagggagatgattaatgtgggcaagagatttagctgtttggactgaaaaaaagttcagattttagaccctcctcgatgtgcaagttaaaagagatggaagactcaaacatggctcccagattatgggccagcatgacaggaaagatgggctatgttgtcaatgggggagagtctgagcagaatgatcacaagctaagttttggctacacagaattaaaattgatggccagatgtctctttgtggatgtcttacacaggcggagatggccatttggatcaagtgaaaagtgaggactggagaagtagattcatgagttattagaataaatgtggttgctgaagctctgtgagcagatgagatcacttcaggagaaaaaagtgtgaagagagagaagaggaccatggtggagctgtgtatcatctcttcagagactggtagaggggaagaggatccactgaaagagaagctgaacaaattataatgaaagtcttgggtgggacagctatttagaagaacgttttaatcaacaaggtcaaaagcagtagagaggtggatgaggatagagtagaggaccttatatttggatgggaagatgccactggaggtttgggtgaatgcaaataagcaatggagagaagtgggtgtgagaatcaataaaagtcagaaagcagtgcagttgggcaagtagacatggtcaaaaaaatgcagaacgtttgcaaaacacttgaaattgtttggatggggtgggaacaatcaacacgtcaaaaaattgaaaaggttcaacaagttctatttgacaatgtagagggttgaagtggaggagaagatgaatttgttgtggaggaagtacatgtagttatgagactttctccaaaggcattcagtatgacaggagcagggatagaagaaacagatgatggggatgagcaataggcagggatctgtgggatggactatgtgtttggacagagttggtggaagagcagagtgagtttacaattaaaatgacatgtatacatacgcactcacacacacatattgtgtgtgaatacatgtatcaccactgataaaaatttggcaaaacactttctgccccggtcacatttatgccaaaccattgttataagattcaaatgaaacaacataagtgtgacttgaggcagaattttgggtctgcatttcaaatttagtcaacaattgtgctgatgatatgtgagtgagaatagaactcttctcactctcccagaactatgctgaatctgtatcaattactagaggaaaagggataaatatgtatgtttatcactaaaagtaaacagatgtgactgaattttgcacaaggagctgatctatgtggtaagaaggtgccatttttacactgtcacttttcagaagagaaccacatttcaaaaggatcagcctctcttcctcctaatatgttacttagtatattaagtatcatggcactgtacttcatcttcatgcattgatcaacatttgttcttccagaaattatttttttcaataatttacttaagcataacaaaaaagtttgaaagttattgtctattgcaacatctttaggttggagacccttatttgaagtcatttattttgtgatcctcttacatctactataaaagaaagaggaaaacatgtatcaatgataacatcaataagaccgtataatttatgtgtgtgtgtttcgagaggttgacagagaatacttgaccttgaagggtaagagcatgtggggagtgggaagggatattttgtatttgtaataatattttcggtgcctcatgactgcactgattgtctttcattacctccctgggtatggcaaccaagtgttgagaaacacttgtctattgaaactgaaggggaaacaaagacgtacacacacacaccttagttacttagttagaaaagtaattaaacaaatgattactactaataatgagataataaaaattatctacagccatgcacatatgaatgcattctcccattattaatggaatatttaattatccttattttttaatttgcctggaatgtgttaacatttcatatcagaaatgtaacttgtacttttcttttagtataaaattaatacagacattttgaattcaaaatgtagaagagaaagcatttcataatatataatgtatgacaagtgacttagcttcttttgctggaagagaaatcaggatgaaaatgatcttgtgtgaaagaacttgactatttacttacagtatatccagaagagtgaaaaattagcattccagcactgacatgcacttaatctggtgtgctggagaaagagtgcttatggaagaaagctaggggcaggtactgaggagattctacgaacagttggtgcacattaagagcatgattttcatatgtatggagcatttgaagctacccatgatttcaaatagactagtgtgtggtcattgcttctgaaaaatcaggctcaaaagacctgatcttaagaggtgcttgagcaacccctactgatacctgctggatgttagggaactcagtgactagtataatcaggccttaatcatctgggtcctgaaagtcactaagtgccttagactcccattgacttctgtgggagccaaaaatgctcagcacacagcaacctgcaggaagaccatagcatcactattgactcagtcttagttcatttccatggcctatatctttttctctctattgtcaaaataatgattagcacttcctgattgtgtcctttattggtgcttatatgttatcttttacaaaacaaaatctataccctattctcagcaatttaccagaaagaaaagatacaaaagaaatagagatgggctgtaactacaatgtaagttctgaaaacctccttctttaggttacttcagatacatattcaaattctgtaccttggacttgtgtctaatgggaagtgaaaatgtattttctcttcaatacgtttattcatgtggtcatctcagctctttcattgcaaggtcattgcaagggttatagatgtattaggcataaccccacttctcaatgatgcatatattttaaaagggaggggagatagaccttggaataagaatgcacacaggtattttatttttttgttttgaatttttctgtataccacttctctctccttcagttgacaatataatacatgccataaattccagagatggaattatattaaattatgcattattgacatctgaaggctagaataccatgcacacgtgtattgtacccatcaagtcacctaagagatttgttcaacagacaaaaatgtgtataaatcaaaaagatcttaatactcatcttgcccaagaccttgaagggggtcattatttataccagtgtgttttgttattttcacgtcccgtaatgtgggaataatttcttaataatttccaataatttcacttgatcatatttaatattatatttcactgttatttttcattaaattaattttagatgaaaactactccatggtgttttcttgcctttattctaaaacattcatttttatatggtcatatatccatatactttgactttcatctgctatcaacccagtgttcttgaggaagcagagaggctcaggcttcaataaaatgcttgcatttatcaactgcataacaattagggttgccaactttccattttttcaaaaccgaacactgaaggctcccctgtcgcttactccccctgccctgggactcacctgccgcctgcaaagccaggatgggaggagttgacacggatcctgcgtgcccaattggggctcagcatggtgggcggagtctctgttgatggagtgaggggccggagagagctggggtcccgggaggctgagaaggtgggatgggccgtcacaggcagcaagcccagctgccggctatgctcctcaagcaccatggactatcagaatccctcctccttcagcagcagttgctcttaccaccctccaatggcacttactgcggtaaccagacttttggtgtccagtcaacagtgctgaccggacactgcacaggtccccttttgactggactttctggttgaaaactggacatctggcaaccctaataacaatgttggatagaaatggattcagtatcttagtcaaagtatccctaaactctgtctgcctacatctctctctctagtctactgccggttagtaaggtctagaatcagaaagctgtccttccctagaatactaatatgtaacccgttgggatttgtgctgccaaacctcttcccccttagaatcgtagaatcataggatatccaggttggaagggacctcaggaggtcatctagtccaaccccctgctcaaagcaggaccaattcccaactaaatcatcccacccagggctttgtcaagcgtgaccttaaaaaccaataaggaaggagattccaccacctccctaggtaacccattccagtgcttcaccaccctcctagtgaaaaagtttttcctaatatccaacctaaacctcccccactgcaacttagatgaaggctctgaaattgaggaagacaggtggaggcctacctgaccaaagattcctctttcccaaaagcagacagtggagggaggaaaagggagctcctgtttaagtctgggaaatccaggtgtccctccatagatatggatatggagcccacagtaactgaagggacaatgagtggggttgtaaaaatctagataaagaggaccaggattaggaggcatctgttttcctctttgtgtagtgaagcaggactggacaaacttctgtgccttcagaagctccagcatagcagagagaactgaagccaagacaggggagtgcaggagtccatttacatgagttccccattccctgagtaggcccacaactctcttatgcaaaactgtttccacctccatccctgtgtgacctttcaaagcaaactttcccttgcctatgttggcacccagtgcagcagaccctctctctttctctctctccccccgcacctccatattcatgaatttttctggaaagagtcttccttctttaaaaataatataatttacttatgtagtgacaaagtgctatcggaaagggcatttcaaaatgactgtaaaaccagtgcttgaattgttgccatttttaaactgatgcagcagctaaagaatgttataagtgaaatttccaagcattcgtgacagctggaggaccaatgcagaacacaatagctgtttttccagttgaactcggttcaatatattgatttgtaaatacatcttctgtgaaagggagagctcattgtgtaagcaggtttcagaatatccagtgtttgtttcctcttcttgctcagggtttcgcttatcagtgtttgtgtgatatgggatttgtaagaataaactaggtaaacagataattccttaatatatttgcgctacaatataatggacaattaaggctcactttcttagtctcctcttcatataaactaagaaaacaatggaaggggaaagaggagaaccccagacgtgcatacatagacacagagctgaaggaagaaataattctagcaatatactagggaggaggaagaaatataatccactagctggagcctctctcgcacagatactattgtggtaggtacctgattacagatgtgagttgtgtgcataaagaaagcatatcatacttctgaaaactgtatgtgagagaggatgtaatatatttgaatgcatttatggccatatgactaactcctttgaaacaaaatcaggacatcaatggaaacaaggtaatagcaagaaaattcctgcattgtgctctgcaggtggtaacatctactgttcttttatcacctgaacgggagtttcacagtttaaggatagttggcaaaaataccctgtccttctctctcacaggcttgaccactgaggttaaccatgccacccttcctctggagcaaaactgtgctgggaggacctgttcccatatcaagaggcataactgcgatgggccttaaagatgagcccttctaccttgaaattaacctagtgtgctatgggaggccaagtagttggcagagtgccagagtggtgtgctgtcagtgattggtgttggtcagtagatgtttgctgtattttggaccatctggaatttttaaagaactttatgctcattaccaagtatacccccacagacacaaaggtgtagatcaccatgaccaggtcctcatttgacaatgggagtcagagccttcttgccagtcatagataaaagaaaatgatgtttggcaactgtagctattgaagtatcctgaaacagggaagagtccactgatctcctagccaatggactgaggtgactaattgacaatagacttcttcagtattggtaggtgcttttttggaagatagctcttcaaatgtttccttctccccatgtgccttgcttgggcttagtttcagctacctacttttcattcacttgctgatttcagccatgcagtgagagactgatgatggaagttgatcttaatgataataaggtattctctctaaccagcaaaggttttggtcatttggattcagtccattgtccctgtctgtgtttgatttgcaatccctatcatgtctgaatgatttaacagcaccatttgcatgccttttcaaatgtatttcagtactgtagattacaaaagtgactgtgtctatgcctagcttgaaggaaaataaaaggacgggaactgtaatccacttaaaaaaataacaaagtggctgacaatatacatgtttggagaaccacagtcaagaaattactaatagtcaaagagggattggatgtttatatgaatagcaagaatatccagagtaaaactattaatgaaaacaaaaagttctggaagggataaaaatctcatgatttaggatttaagtcaatctctaactatttagggattgggacaagaccgtcatgggacacattatcccacagttgccaactgtgggcttcttgcaccttcctctgaaactggctattggcttctgccagagatagggtacttggtctaaatggaccacaggtcgatccaaaattaatattcttatcttcccatgcgaggatacattggaaatatgcacgaatgagaaccttgcctatgtgaaagcaatcacttcacactgcccagtacaattttggtcatattttagttattggctatgtctaatatgccaccaatttttactgaacccattagtggtcacttaatatcaacctcacttaattaataaggtgttaaaaatgagaatctgtttcctaagtaattacaatctgtgcttaattatgttatcagagctgtgtttattgcagcattcttcattgagtgaagaatgacagcatttcatgcaactaatttctttttgttctctcctctctgcacgagatgttaatgataaaattcatagctgagaagtgcacatatcacttttcttgataaatgaaagtgacagcattcatttgttttaagatttcacataatttgttttgcttaaccttcacgtagggaagtaaatcaagtagattcttctctggcaaagtctgtcttaaaaatgccacaagatggcagtgtttcagaatattactgttatatttgggtaaggtatttcttagttcaaagtcagtgttgtatgcttgcattgtttaagggctaatggtcagcagtcagcactaatatgatgagcatagtaatattctatactttcatccagaatggtgtcctttgtgcaccagcaatgccactcatccactcactggctgaaaacccaattcatttttttcaaaagaggaagaggtggacaaagctccaatgctaatatactcttgtgctgagacatgcaagactgaacccaggggaagcttgagggattatctcattgttgcttgactcatgtgttctaggccacttaaaatatctttcggttttcaggccactttgaacattcttggctttctttacttcaaaggtctggtctacgttaggaaaataggttggcccatgtgtgccaaactgtgtaaatccttcacattttatctttaaacactggggctaatttgcttttgaaattcatactatagtagcccatcagggtcaaatgaagtctgtttagtgaactagtcaagtaagagggaagtcctagagaaggtcatagaaggataagaacaaaaggaaacaactttcacaaaagtcccctactctccccatcttcttgttctgtttccttgcaaatggttggttgatcatcaggaaggaatgttatcatatcctgacttcagcaaacacagccgaagagactagcagctattatactgatttaaattatacatctgtgggccaaacactgaagagtcattagtgctgtaacgagtgagaaaatacaatatgaattttcaaggctgttaccatggagtagctgattcacatgcagacacacatctgtgggatatgggggcaaaaagaagttagtgggcatcacacagtgacgagcactctcgagaaaatagggtaattttcttaatcagtttgtcttggactccctcacgttaggtgcgttagggtcaaaagagtctcacagatttcctccccagtttctgttgcagggaaagtaaatgccaaatcacttaccattaaaacctcaaatttagggcctgatcctgcaacccttactctctcaagtagtcaatttaatccctgcaagctgcatggacgcttttcaaagacaccataatagaggcccaacttaaatgtatacccccaaattaagaaacacagtaaaagaactaaaaaagagccaccgtggcttaacaaccatgtaaaagaagcagtgagagataaaaaggcatcttttaaaaagtggaagtcaaatcctagtgaggtaaatagaaaggagcataaacactgccaaattaagtgtaaaaatgtaataagaaaagccaaagaggagtttgaagaacagctagccaaaaactcaaaagataataaaatgttttttaagtacatcagaagcaggaagcctgctaaacaatcaatggggcctctggatgatggagatacaaaaggagcgcttaaagacgataaagtcattgcggagaaactaaacaaattctttgcttcagtcttcacggctgaggatgttagagagattcccaaacctgagccggcttttgtaggtgacaaatctgaggaattgtcacagattgaagtgtcactagaggaggttttggaattaattgataaacttaacagtaacaagtcactgggaccagatggcattcatccaagagttctgaaagaactcaaatgtgaagttgcagaactattaactatggtttgtaacctgtcctttaaatcagcttctgtactcaatgactggaagatagctaatgtaacgccaatatttaaaaagggcaatagcggtgatcccaacaattgcagtcttgtaagactaacgtcagtatcgggcaaattagttgaaacaatagtaaagaataaaattgtcagacacatagaagaacataaattgttgggcaaaagtcaacatggtttctataaagggaaatcgtgtcttactaatctattagagtactttgaaggggtcaacaaacatgtggacaagggggatccagtggacatagtgtacttagatttccagaaagcctttgacaaggtccctcaccaaaggctcttaagtaaagtaagttgtcatgggataaaagggaaggtcctttcatggattgagaactggttaaaagacagggaacaaagggtaggaataaatggtaaattctcagaatggagaggggtaactagtggtgttccccaagggtcagtcctaggaccgatcctattcaatttattcataaatgagctggagaaaggggtaaaaagtgaggcggcaaagtttgcagatgatactaaactgctcaagatagttaagaccaaagcagactgtgaagaacttcaaaaagatctcacaaaactaagtgattgggcaacaaaatggcaaatgaaatttaatgtggataaatgtaaagtaatgcacattggaaaaaataacccctaatatacatacaatacgatgggggctaatttagctacaacgaatcaggaaaaatgatcttggagtcatcgtggatagttctctgaagacgtccacgcagtgtgcagcggcggtcaaaaaagtaaacaggatgttaggaataattaaaaaggggatagaaaataagacggagagtatcttattgcccttatataaatccatggtatgcccacatcttgaatactgcatacagatgtggtctcctcatctcaaaaaagatatactggcactagagaaggttcagagaagggcaactaaaatgattagggatttggaacaggtcccatatgaggagagattaaagaggctaggacatttcagcttggaaaagaggagactaagggaacgtctacacttacctccgggtccgacggcaggcaatcgatgttctgggatcgatttatcgcgtcttgtctagacgggataaatcgatcccggatcgatcccagaagtgctcgccgtcgacgccggtactccagctcggcgagaggagtacgcggcatcgacgggggagccttcctgccgcgtctggacccgcggtaagttcggactaaggtacttcgaattcagctacgttattaacgtagctgaatttgcgtaacttagtccgaagtgggggggtagtgtggaccaggcctaagggaggatatgatagaggtatataaaatcatgagtgatgtggagaaagtgaataaggaaaagttatttacttgttctcataatacaagaactaggggccaccaaatgaaattaatgggcagcaggtttaaaacaaataaaaggaagttcttcttcacacagcacacagtcaacttgtggaactccttgcctgaggaggttgtgaaggctaggactataacagcgtttaaaagagaactggataaattcatggaggttaagtctattaatggctattagccaggatgggtaaggaatggtgtccctaacctctgtttgtcagagggtggagatggatggcaggagagagatcacttgatcgttacctgttaagttcactccctctggggcacctggcattggccactgtcggtagacaggatactgggctagatggacctttggtctgacccagtacggctgttcttatgagtaagggttccaggactagagtattagcgagggcttggaacagactgtcttattaagctataagatcagggctgttatgaaaatagtaatggcttctgaagaactgcttgaccagagtgctgtttcaaagtggaacattttgatgaaatgttaagagttttgtctggatctctcctctggtaacaccctacttaccagaactctgtccttctgatctttgagcaattccttaaaccacagggcactggaaaatataatcctgacattccatccaattatctgtaaaacagacaatttacactaaacgaaaaaaggctacaattacactagcagacatgttatgacttggtacacttgtaaacaaggcagagattttaaataagaaaatggcaagagaaaatacaacttctatttggactagctccagttctcaaatatctgtcttgggccagtgagcccatatttttctctctattcatccatattatctgtcttatctagctaatctattaattatattccctggctagggtagtggaagtgtgaaaggtcacacttgtttgtataatttgcacttcaggagaaaagcagaccacaataagtagttcatcagactgatacagagcgatctggatcacttggtaaactgagtgcaagcaattaatacatgttttaatactgctaaatgtaaagctatacatctaggaacaaagaatgtaggccttacttacaggctaggggattcaatcctgggaagcagtgactctgaaagagatttggaggttggggtggataatcagttgaacatgagctcctagtatgacactgtagccaaaagagctaaggcgatccttggatacataaacgggaatcttgaggaggagtagagaggtaattttacctctgtattttgtactggtgtgcctactgctggaatactgcatactgttctggtgtccacaattcaagaagaatggtgataaattggagagagttcagagaagagccatgagactgattaaaatattagaaaacatactttagagtgatagattgaactctttgagtctatttagtttagcaaagagaaggttgaggggtgacttgattatagactacatggggaacaaatatttgataataggctcttcaatctaccagacaaaggtgtaacatgatccaatggctggaaggtgaaactagacaatctgagactagaaataaggtgttaatttttaactgtgagagtaattaaccatcgaaaccaagaagtttaccaagaattatggtggattctccatcactggcaattttaaaatcaaggttggatgtttaaaacaaatatctatctatctatctatctatctatctatctatctatctatctattgttttgggaaagatctatggcctgtgatatgctggaggtcagactagatcagggattggcaacctttggcatgctgcccatcagggaaatcccctggcgggccaggacggtttgtttacctgcagcgtccacaggtttggctgattgcagctcccattggccacagttcaccgttccaggccaatgggggctgcgggaagctgcggccagcacatccctcggcccgtgccgcttcctgcagcccccattggcctggaatggtgaactgcagccagtgggagctgcgatcggtcgaacctgtggacgctgcaggtaaacaaaccggcctgtcctgccagcggatttccctgatgggccgcgtgccaaaggttgccgatccctggactagatgatcataatggtcccttctagtcttgaaatctatgaaactgtgaaacagcctttgaagcttcaaaagtgctgcagtgatttttataatcagctaagcttacgctagaaaggaaaataacatttgttcagcaagtctgcagtttaccagtttacccaagatttgtctgataatccaaggttcaagaaaaatttttggatgagatacatgttgtcgttaagatttgcaaacaaacatataaaaagaaattgaacatgttcttcagttccattgtacacatttacagttggaggttttcatgatcaattgcttctgacattgcagtcgatacaaatttgcaacaaaatgaagtgtcaaagatggcattgtaattttactgtgtcaatcaccaacaggaaaaacatgtttttttcaatgagatcctaatattataattagcaaattcaggtgattcagatgattttagcacaagacacagatttgcatctttgtaagattttggctaagaaagttttctaaaagcattctgtgtgcataaattacatcagacaaagtaaaattggatcataaaaaaacatcatgttgggggagagttgtctataacagagtaattatttaaagagctcaacagatttcctgcatcagtatgattggattccatgtgggaaagaagattctcaaatgtctaggcttatccttcaaagtatgacctcaatgaaagcccttaagcaatggtaatctgcttcagtcctgaagctttgtggagcaagttatctggcttgaagctttcagggcatctgtggccatgcctccaggagctccctgcatgacaataaagcccaggagtcattataggtacttgtgtggcatttgtgttccaaagtttcttgacacaaggctgcaaagggccagtgggtaggcactggaccattacctaatacacagcccacatctgtaaagtggttttgcataatggccttcaacttgagatgctgtagttaagagttgttctttgttgatttttgtaaaaaaagcaatactctttgtctggaggcattgaatgtagatgattgtgttaagtggagcagctaagaaaaagcctgttcctctcaaattaaatcttgtgtcctggctctgtgccaatactacgttagtcaaaagctttgaacattcatgaattgaggcaatcctgagctgactcctcagcacagaatctagagtgcaatgacacttagctttatgacgcagatctaaaccgcaaagttaccctgcattcaacctgggaacatttgtatcaaggcagcttcctgatatacagcacatcaatactttggttccatggtgtggtcctttgcttatcccattcaccttgcaccttacctctgtgcagatcctatgaggtaatactacactgattgcctgagttggaacctgcagttccttagcacttaggcactacaatggacaaggtataaatatctagataacttggctttgctccaacaacacccccttccttctctctcccccctccccctcctagcagcattgatagttgccattctgcatcaactccctaaaatgagtcggtaacccaaccattgttttgctttatggcacagacatacatagatgtcccttgataggagtcctatatgccaatgcctcctgcatcaaaggactgcagtgcataaatggtatgtggtcattgatgtattgccactttggctttgtgatgcaagtctgcaccagtgcctcctgcccaaagcttgatagccttaactctagtagctgatgacagtcctggcttggctgggaaaatgctagggttttggaaagctccacggttaactgccaacatcccaggactattggcaactattattcctagccttaagagctcagcttcccattcctcccatttttgccacattgagagctgacatcgtcataactatgtttcctatatggcagctttgtcatctgtcactgggaggattgaggagtatccccagaatctctcttgctctcttcattaacctcatgtgctgggataagaactggccctagaaatgtttgggtttgtattgattttagtaactatgacaaatgctgatccttcttgcagcaatgaggcaagatgctgcctatactattctgcggttttgcctgctgagaaaatgttgcaggatagcatggtaataaccctccttttatagctcttacattgtcttattactactacttttgtcagtttcacagtgattcataaatcacagagggaaacatttaatcaaataatgagtcacactattttatgcttccaactcgttatctttaaacaaataattagagactcagataaactttttgtggcagaacagtctgtatgcatgctgacaatgcatttgccttttaatatataatgagtctggctctacttgctttttctgcttatttcatgtttacactgaataagacttgttttgaacagaggaaaaggtagtggaactcttgctgctttgttttgattgtatactgcaagttttcaaagtagagctaagcaaaatttgtttgcatcctatttggagacaaaaacttgaaatgttgatattttccaggaagtggatcttccaaaaatgtagattcagaaatacataatatttggaaaaaaatacataactgtaagggtagttaagcactgggacaaattacctagagagactgtggaaaagccatcattggaggattataagaacaggttataccaggggtcagcaacctttcagaagtggtatgctgagtcttcatttattcactctaatttaaagtttcgcgtgccagtaatacaatttaacgtttttagaaggtctctttctataagtctataatacataactaaactattgttatatgtaaagtaaataaggtttttaaaatgtttaagaagcttcatttaaaattcaattaaaatgcagagccccctggacgggtggccaggacccgggcagtgtgagtgccactgaaaatcagctcgcatgccgccttcggcatgcgtgccataggttgcctacccctggattagacaaacacctgtcagggatgtctagataatacttagttctgcttcaatgcagggtactggactagctgacatatcaaagtccctcccaggcctacatttctatgattctataattcctgtaacagaattgcttcagtttgtctcgtcacatttttcaacattaaattgcatttccctgttgctttatgggaattgtagttctggccccttttctatcctattggtcaagctccagggctggactacatcttccataatgtaccaagagtcgtgtgactcccatgatgcaccacacagggaaaatgctttttaggagatgtactgctagggagtatggcccagaggagagaatgaggaccaaactacgactcccataaggcaatagttaaatgcagtttgatggctttttaacaaatttgaaagtaaatgtgttgggtcactttaaaaatgaaatattccaattcaggttgaactgacccaaaatgaaatatttcatttagttattcctgatggacgatctatctatctatctatatatatatatatatatttttttacaaaatcaaaattgtcctccaggaaattgatttttttttgcagggactgcattttctgtaggaaattatttctgatggaaaattcccaaacaactctatttaaaaggagctttttaaaatgaaattaaaagagaacaccaatatattctgaatgactacaacaattcatgcacagtcatttttgtaaagaagcagtatggttttactgagaaaaagagtctttgaaagagcaaactacaatattttagtatccaatttcactgttaatgttagtaaacaaaatttgaggtaattttgaacagatcagaatttttctctcaaaacatttttgatagaaaatgcatttttatgaaaaaatacatttttattgctttcatcagtgaagaaatcccaaatccaaatattttagggttttttcaacccctctcctcccaattccctcccaccaaatgaaaattaattttttcaatgaaaattttcataaaaggccaaaaaccaaaccaaccaaccaccaaacaaacaaaaaatcagccagagaacagcaaattgagggaatacccctgccccttcagtcagaacacagtcaaacttggcatgaatgtaatcaaagaattccatagactggctaccaccgatgactatattctgcccctagtacccgatagtctaaatacgagactctccagcttcatcattcctttggattattgttgtcttttgggatagtgatagggtatcagtggtctctgaggtagctaaatcaatatcattaaggggtttgtagttcaaggatagtacttggagttttgttctgatacaaatgagacaaatgtgaagttgtgttctcaccaacttttcttgcttacctatatcagtcacaagatgacactgctattccaaaggtagtatcccagagtgtactgaagttatcatatgaacagctgtctcaccactaaaacagcagtattctgaaatggttgtataaataggtaacaatctatctgaagattgcttttctgtgggtgaaaggaacgactgtcctctctcattctacccgtaacatgcaaagttgctcagaagttgaaaatttcatggacacattaggcactgaaaatcactttgatgggtgtatgtctagaggggatttcagactgataatgaaaactggtttaaagataatttcaacactatcagatttatggtagctttgggcaataagttaagtctgaagacccagtggtaactttttcagctttcagcagggtatttttccattacaagagtgcactatcacagctgcacctttcattaaaactgaagctaagtgtccatcactctttccattataaactcaattttccacaggtttaaaactcagccataaaaattcagaaaaggccacaaagtcacaggtatgagggaagattttatttctgttttccaggaaattatgttgaccatttgtaagcttaaaaagtgataaaggctccagcctgctcctattgaaatccccccatcgtccctcctcccagttcatttcagtggtctagattgtggccttttgcccaaaacctgctatacagctggatccccttgttggagaggtcatggaaagcttgtcctccaaggacagacagtcccttctgaagctccataatgtgaaaggggagtaatgcagactagatttttttttttttactatgtaaaaagggaatgaaataatgtttatttgatactctagtgactggtgccccataagtacttattgtagatatttcacattgcaaaccggtacctgtgcatatacaggccgaattttatagattttattaaggttacttatgcctgcatttctgttatagcattataatcatattttattatatagtgagcacaaattgtgtgctctgaactgtacaatacatagaacaagatacagggtgaaatcccagccccattgaagtccatggaagatttaccattcatagaatcatagaatcatagaatatcagggttggaagggacctcaggaggtcatctagtccaaccccctgctcaaagcaggaccaattcccaactaaatcatcccagccagggctttgttaagccgggccttaaaaacctccaaggaaggagactccaccacctccctaggtaacgcattccagtgcttcaccaccctcctagtgaaatagtgtttcctaatatccaacttagacctcccccactgcaacttgagaccattgctccttgttctgtcatctgccaccattgagaacagccgagttccatcctctttggaaccccccttcaggtagttgtaggctgctatcaaatcccccctcattcttctcttctggagactaaacaatcccagttccctcagcctctcctcataagtcatgcactccagacccctaatcatttttgttgccctccgctggactctttccaatttttccacatccttcttgtagtgtggggcccaaaactggacacagtactccagatgaggcctcaccaatgtcgaataaaggggaacgatcacgtccctcgatctgctggcaatgcccctacttatacagcccaaaatgccgttagccttcttggcaacaagagcacactgttgactcatatccagcttctcgtccactgtgacccctaggtccttttctgcagaactgctacctagccattcagtccctagtctgtagctgtgcatgggattcttccgtcctaagtgcaggactctgcacttgtccttgttgaacctcatcaggtttcttttggcccaatcctctaatttgtctaggtccctctgtatccgatccctaccctctagtgtatctaccacacctcctagtttagtgtcatcggcaaacttgctgagagtgcagtcgactccatcctccagatcattaataaagatattaaacaaaaccggccccaggaccgacccttggggcactccgcttgaaactggctgccaactagacatggagccattgatcactacccgttgagcccgacgatctagccagctttctatccaccttgcagtccattcatccagcccatacttctttaacttggcagcaagaatactgtgggagaccgtatcaaaagctttgctaaagtcaaggaataacacatccactgctttcccctcatccacagagccagttatctcctcatagagagtcaggatttcacctacagtatctatcctaggaagttaacagcttaaaaagataaatcaagacacagtgaagctcccaaatcattagacaacaatgtggtgaagttggtgcagtaggggcttttttgtctgtatatttatttaattagctgtatttatttttattgtggttgtgcctagtgttaccctgggtgttctcaatctgaaactattgtaacttatattttcttatct

SEQ ID NO: 5 - DNA, 21329 bp, unidentified
  misc_feature 1..21329: note = Fanzor polypeptide
  variation 13637..13646: note = n is any nucleotide
  variation 20588..20597: note = n is any nucleotide
  source 1..21329: mol_type = other DNA
aatgttggatagaaatggattcagtatcttagtcaaagtatccctaaactctgtctgcctacatctctctctctagcctacttccggttagtaaggtctagaatcagaaagctgtccttccctagattactaatatgtaacccgttgggatttgtgctgccgaacctcttcccccttagaatcgtaaaatcataggatatccgggttggaagggacctcaggaggtcatctagtccaaccccctgctcaaagcaggactaattcccaactaaatcatcccagccagggctttgtcaagcctgaccttaaaaatcaataaggaaggagattccaccacctccctaggtaacccattccagtgcttcaccaccctcctagtgaaaaagctttttcctaatatccaacctaaacctcccccactgcaacttagatgaaggctctgaaattgaggaagacaggtggaggcctacctgaccaacgattcctctttcccaaaagcagacagtggagggaggaaaagggagctcctgtttaactctgggaaatccaggtgtccctccatagatatggatatgaagcccacagtaactgaagggacaatgagtggggttgtaaaaatctagataaagaggaccaggattaggaggcatctgttttcctctttgtgtagtgaagcaggactggacaaacttctgtgccttcagaagctccagcatagcagagagaactgaagccaagacaggggagtgcaggagtccatttacatgagttccccattccctgagtaggcccacaactctcttatgcagaactgtttccacctccatccctgtgtgacctttcaaagcgacctttcccttggctatgttggcacccagtgcagcagaccctctctctttctctctctctctctctccccctcccccccacattcatgaatttttctggaaagagtcttccttctttaaaaataatataatttacttatgcagtggcaaagtgctattggaaagggcatttcaaaatgactgtaaaaccagtgcttgaattgttgccatttttaaactgatgcagcagctaaagaatgttataagtgaaatttccaagcattcgtgacagctggaggaccaatgcagaacacaatagctgtttttccagttgaactcggttcaatatattgatttgtaaatacatcttctgtgaaagggagagctcattgtgtaagcaggtttcagaatatccagtgtttgtttcctcttcttgctcagggtttcgcttatcagtgtttgtgtgatatgggatttgtaagaataaactaggtaaacagataattccttaatatatttgcgctacaatataatggacaattaaggctcactttcttagtctcctcttcatataaactaagaaaacaatggaaggggaaagaggagaacctcagacgtgcatacatacacacagagctgaaggaagaaataattctagcaatatactagggaggaggaagaaatataatccactagctggagcctctctcgcacagatactatagtggtaggcacctgattacagatgtgagttgtgtgcataaagaaagcatatcatacttctgaaaactgtatgtgagagaggatgtaatatatttgaatgcatttatggccatatgactaactcctttgaaacaaaatcaggacatcaatggaaacaaggtaatagcaagaaaattcctgcattgtgctctgcaggtggtaacatctactgttcttttatcacctgaacgggagtttcacagttttaggatagttggcagaaatactctgtccttctctctcacaggcttgaccactgaggttaaccatgtcacccttcctctggagcaaaactgtgctgggaggacctgttcccatatcaaaaggcataactgcgatgggccttaaagataagcccttctaccttgaaattaacctagtgtgctatgggaggccaagtagttggcagagtgccagagtggtgtgctgtcagtgattggtgttggtcagtagatgtttgctgtattttgggccatctggaatttttaaagaactgtatgctcattgccaagtatacccccacagacacaaaggtgtagatcactatgaccaggtcctcatttgacaatgggagtcagagccttcttgccagtcatagataaaagaaaatgatgtttggcaactgtagctattgaggtatcctgaaacagggaagagtccactgatctcctagccaatgaactgaggtgactaattgacagtagacttcttcagtattggtaggtgcttttttggaagatagctcttcaaatgtttccttctccccatgtgccttgcttgggcttagtttcagctacctacttttcattcacttgctgatttcagccatgcagtgagagactgatgatggaagttgatcttaatgataataaggtattctctctaaccagcaaaggttttggtcatttggattcagtccattgtccctgtctgtgtttgatttgcaatccctatcatgtctgaatgatttaacagcaccatttgcatgccttttcaaatgtatttcagtactgtagattacaaaagtgactgtgtctatgcctagcttgaaggaaaataaaaggacgggaactgtaatccacttaaaaaaataacaaagtggctgacaatatacatgtttggagaaccacagtcaagaaattactaatagtcaaagagggattggatgtttatatgaatagcaagaatatccagagtaaaactattaatgaaaacaaaaagttctgaaagggataaaaatctcatgatttaggatttaagtcaatctctaactatttagggattgggacaagaccgtcatggggcacattatcccacagttgccaactgtgggcttcttgcaccttcctctgaaactggttattggcttctgccagagacagggtacttggtctaaatggaccacaggtcgatccaaaattaatattcttatcttcccatgtgaggatacattggaaatatgcacgaatgagaaccttgcctaagcaaacctatgtgaaagcaatcacttcacactgcccagtacaattttggtcatcttttagttattggctatgtctaatatgccaccaatttttactgaacccattagtggtcacttaatatcaacctcacttaattaataaggtgttaaaaatgagaatctgattcctaagtaattacaatctgtgcttaattatgttatcagagctgtgtttattgcagcattcttcattgagtgaagaatgacagcatttcatgcaactaatttctttttgttctctcctctctgcacgagatgttaatgataaaattcatagctggaaagtgaacatatcacttttcttgataaatgaaagtgacagcattcatttgttttaagatttcacgtaatttgttttgcttaaccttcacgtagggaagtaaatcaagtagattcttctctggcaaagtctgtcttaaaaatgccacaagatggcagtgtttcagaatattactgttatatttgggtaaggtatttgttagttcaaagtcagtgttgtatgcttgcattgtttaagggctaatggtcagcagtcagcactaatatgatgagcatagtaatattctatactttcattcagaatggtgtcctttgtgcaccagcaatgccactcatccactcactggctgaaaacccaattcatttttttcaaaagaggaagaggtggacaaagctccagtgctaatatactcttgtgctgagacatgcaagactgaacccaggggaagcttgagggattatctcattgttgcttgactcatgtgttctaggccacttaaaatatctttcggttttcaggccactttgaacattcttggctttctttacttcaaaggtctggtctacgttaggaaaaataggttggcccatgtgtgccaaactgtgtaaatccttcacattttatctttaaacactggggctaatttgcttttgaaattcatactatagtagcccatcagggtcaaatgaagtctgtttagtgaactagtcaagtaagagggaagtcctaggcctggtctacactaggcgtttatgtcgaatttagcgctgttacattgaattaaccctgcacccgtccacaccacgaggctatttagttcgacatagaggtctcttaaattcgacttctgtactcctccccaacgaggggagtagcgctaaattcgacatgaccatatcgaattaggcttggtgtggatggaaaacgacgctaatagctccgggagctatcccacagtgcaccactctgttgacgctctggacagcagtccgagctcggatgctctgaccagccacacaggaaaagccccgggaaaatttgaattccttttcctgtctgggcagtttgaatctcatttcctgtttggacatcgtggcgagctcagcagcactggcaacgatgcagagctctccagcagagatgaccgtgcaatctaatagaaagagggccccagcatggactgatcgggaagtcttggatctcatcactgtgtggggcgatgagtccgtgctttccgagctgcgctccaaaagacagaatgcaaagatctatgagaagatctctaaagccatggcagagagaggatacagccgggatgcaacgcagtgccgcgtgaaaatcaaggagctgagacaaggctaccagaagaccaaagaggcaaacggacgatccggatcccagccccacacatcccgtttctacgaggcactgcattccatcctaggtgcggccgccaccactaccccaccactgaccgtggactctgaggatgggatattgtccacggccggttcctcggacatgttagcggacggggaagatgaggaaggagatgaggaggacgaggcagtcgacagcgcttacaacactgatttccccgacagccaggagctcttcatcacccttacagagatcccctaccaaccgtccccagccgttaacccggacacagattcaggggaaggatcaaccagtaagtgtttcaaacatctaaacttttatttttaacagaactggaatattaacaataacaacaatgggttttgcatgatttgtttgccctaggtgcttaactattcagtcccaactatttaaaaaaaatctaacaatgtccggttttgcatgattctgctgccaaatacgctccactctttagtccctgccagtgcagctatatgaaaaggcggtctatatgtccggggatagagctgcaatcctccatggacatctcgaggaagctctcctggaggtaattcgaaagcctgtgcatcaggttcctggggagagcggccttatttggtcctccgaagtagcagacgtttccgcgccaggagatcatcaagtactccgggatcatagccttgcacagcatggcggcatacggccctggtctttgcaggctttcccttagcattcgttccttatcgctgtctgagatcctcatgattgtgatgtcgctcatgatgacctgctttgaattaggtaggggactgttagtattgggactgcttgcccgttcctttacagaactgtaaccgccggtttacagccacgcggtggaggcgggagaggggcagcatacagggatctttcccggggacagccgcgagggggtgggacaggggcagagtttatgcttggccgattgctggcagcagagactggcattgctttcaatgtgaaaggaggccagtgctactattaaacttttaagcagccacaagtcaacggcttaccatgtctgcctgctacagaaattccggtgtcctgccccgcttcccagatcggcagtgcaagaccccaggcactgaaggcgaggtccgaaaattcgaccttgtcctgagtgcgcatgtgataggtgcagtgcatggtgttgttcacagagaaagactatgttctttgttcacaactacatttatctttctgaggaattcactccctttttctcattcccacagccacatctgcgactgtctcccaacccagcctggcatcacactcccagaggctagcgcagattaggcggaggaagaagaagacgcgagaggacatgttctcagaactaatgggctgctcccgagcccaggcagcacagcagaaccagtggagggagaatttgtcccaaatgcaccggacacacatggaacgtgaggagaggtggcggcaggaagaccagcaggcgactcaaacgctgcttggacttatgagggagcaaacggacacgctccggcgccttgttgatgttctgcaggaatggaggcaggaggacagagccccgctgcagtctatcaggaaccgccctcccccgccaccaagtcccatacccccctcgcccaaagtccaaagaaggaggggcggcagagtccgtgaaaactctcactccacccctgcagactgctcaagcaccagaaggctgtcattccccaaaatttgaaaagtcctttccttcccgcctcacccaagcccccgtccaagtttcaccccccagtttcatgtgtggttgttaataaaaaatacgtttctgttcattactgtttccatcatgttcttttggagcagagtctgtctgaagggggggaaggagcttggtaattggacaggacagtcacctttagcagggtacagaggcggaggcaggtccagcagcagggcacatacacagtgcagtgactagttaccctggtcagtctgggaggtggttttcatgttctgtgtgtgtgggggggttgctctgtgactttgtggcgggggagggcagttacagatcttatgcagcggtccttttcctggatcacagagccacgcagcaggggatctgtaaccgtcctccccctgccataaagtcacatagccaccacatacatgcagtcccgctcaggagggctggcaggctccgttgaaacaagcaggccaccactgcggagcctgtcattcctgtagtttagaagcgtcatttgcatcagtacattacacccgctccccaccacagtccgcgtcccaggtttaaaacattcccgcccgcgaaaacagtaataaagacaatggtgttcattaacaaaatataactgattttatttttttggaaggaggtgaagggggtatgaaactggagaggatagtcaacattaactgggtaaagaaacgggggcaggttcagcttctctgtacacaaattgaaaagtcactggtcaccctgctcactgtggaacctagctttcaaagcctcccggatgcacagcgcgtcccgctgggctcttctaatcgcccggctgtctggctgggcgtaatcagaagccaggctatttgccttaacctcccaccccgccataaaggtctcccccttgctctcacagagattgtggagcacacagcaagctgctataacaatggggatattggtttcgctgagatcacagcgagtcagtaaggttctccatctccccttgagacggccaaaagcacactccaccaccattctgcacttgctcagacggtagttgaacagttctttttcagtgtccatggcgccagtatagggcttcatgagccagggcattagcgggtaggctgggtccccgaggatcactgtaggcatctccacatccccaacagttattttgtggtccgggaagtaaataccttcctgcagccgtctaaacagaccagagttcctgaagacgcgagcgtcatgaaccttgcccggccatccgacgttgatgttggtaaaacgtcccctgtggtccaccagtgcttgcagcaccattgaaaagtagccctttcggttgatgtactggctggcctggtggtccggtcccaggatagggatgtgagttccatctatagccccaccgcagtttgggaatcccatcgcggcgaagccatctatgatgacctccacgtttcccagaaaaaataacaggagtacttgtggtaccttagagactaacaaatttattagagcataagcttttgtgggctacaacccacttcttcggatgcatatagagtgaaacatatattgaggagatatatatacacacatacagagagcatgaacaggtgggagttgtcttaccaactctgagaggccaattaagtaagagaaaaaaaacttttgaagtgataatcaagatagcccagtacagacagttgataagaagcaagtgtgagaatacttacaaggggagatagattcaatgtttataatggctcagccattcccaatccctatttaaccctgagttgattgtgtctagtttgcatatcaattccagctcagcagtctctcgttggagtctgtttttgaagtttttctgttttaagatagccaccctcaggtctgtcaaagaatggccagacaggttaaagtgttctcccacgtttcccagggtcactacctttgagagcagtaattaacgattgcgttggctacttgcatgacaacaacccccacggtagatttgcccacgccaaagtggttcgcgactgactggtagctgtccggcgttgcaagcttccagagggctatggccactcgcttctggacagtcagggctgctcgcatcctggtgtcattgcgcttcagggcaggggacagcaactcacaaagttcaaggaaagtccccttccacatgcgaaagtttcgcagccactgggattcatcccagacctacagcactatgcggtcccaccagtccgtgcttgtttcccgtgcccagaatcgccgttccacaacatccacatgacccattgtcaccgtgatgtcctcggcgctgggtcccgtgctttctgacaggcctgtgctactctcagacttcaggccctcaccgcggtgccgtagcctcctcgcctggtttatctgcatctgcctctggtaaaggtgtatgataagctgtgaggcattgagaacggccacaactgcagcgatggtcgcagcgggatccatgctcgcagtgctgtggcgtccgcgctgtcactgaccagaaaagtgcacgaactgatttcccgccggcgctttcagggagggagggagggcggtagtgacggacggatgacgacaattacccaaaagcaccctcgacacattttttttacccagaaggcattggcggctcgacccagaattccaatgggcagcggggactgcgggaactgtgggatagctgcccacagtgcaccgcttccaatgtcgatgctttccccattagtgtggactcacaaagtcgaattactgtccttagtgtggacacacacgttcgactttgcaatatcgattccacatattcgatttaagtgaaatcgaactaccctcgtagtgtagacatacccctagagaaggtcatagaaggataagaacaaaaggaaacaactttcacaaaagtcccctactctccccatcttcttgttctgtttccttgcaaatggttggttgttggatgatcatcaggaaggaatgttatcatatcctgacttcagcaaacacagccgaagagacttgcagctattatactgatttaaattatacatctgtgggccaaacactgaagagtcattagtgctgtaacgagtgagaaaatacaatatgaattttcaaggctgttaccatggagtagctgattcacatgcagacacacatctgtgggatatgggggcaaaaagaagttagtgggcatcacacagtgacgagcactctcgagaaaatagggtaattttcttaatcagtttgtcttggactccctcacgttaggtgggttagggccaaaagagtctcacagatttcctccccagtttctgttgcagggaaagtaaatgccaaatcacttaccattaaaaccccaaatttagggcctgatcctgcaacccttactctctcaagtagtcaatttaatccctgcaagctgcatggacgcttttcaaagacaccataatagaggcccaacctaaatgtataccccaaattaagaaacacagtaaaagaactaaaaaagagccaccgtggcttaacaaccatgtaaaagaagcagtgagagataaaaaggcatcttttaaaaagtggaagtcaaatcctagtgaggtaaatagaaaggagcataaacactgccaaattaagtgtaaaaatgtaataagaaaagccaaagaggagtttgaagaacagctagccaaaaactcaaaaggtaataacaaaatgttttttaagtacatcagaagcaggaagcctgctaaacaatcaatggggcctctggatgatcgagatacaaaaggagcgcttaaagacgataaagccattgcggagaaactaaatgaattctttgcttcagtcttcacggctgaggatgttagagagattcccaaacctgagccggcttttgtaggtgacaaatctgaggaattgtcacagattgaagtgtcactagaggaggttttggaattaattgataaacttaacagtaacaagtcactgggaccagatggcattcacccaagagttctgaaagaactcaaatgtgaagttgcagaactattaactatggtttgtaacctgtcctttaaatcagcttctgtactcaatgactggaagatagctaatgtaacgccaatatttaaaaagggctctagtggtgatcccaacaattgcagtcttgtaagactaacgtcagtatcgggcaaattagttgaaacaatagtaaagaataaaattgtcagacacatagaagaacataaattgttgggcaaaagtcaacatggtttctgtaaagggaaatcgtgtcttactaatctattagagtactttgaaggggtcaacaaacatgtggacaagggggatccagtggacatagtgtacttagatttccagaaagcctttgacaaggtccctcaccaaaggctcttacgtaaattaagttgtcatgggataaaagagaaggtcctttcatggattgagaactggttaaaagacagggaacaaagggtaggaataaatggtaaattctcagaatggagaggggtaactagtggtggtccccaagggtcagtcctaggaccaatcctattcaacttattcataaatgatctggagaaaggggtaaaaagtgaggcggcaaagtttgcagatgatactaaactgctcaagatagttaagaccaaagcagaccgtgaagaacttcaaaaagatctcacaaaactaagtgattgggcaacaaaaatggcaaatgaaatttaatgtggataaatgtaaggtaatgcacattggaaaaaataacccctaatatacatacaatatgatgggggctaatttagctacaacgaatcaggaaaaatgatcttggagtcatcatggatagttctctgaagccgtccacgcagtgtgcagcggcggtcaaaaaagcaaacaggatgttaggaatcattaaaaaggggatagaaaataagatggagagtatcttattgcccttatataaatccatgctatgcccacatcttgaatactgcatacagatgtggtctcctcatctcaaaaaagatatactggcactagagaaggttcagagaagggcaactaaaatgagtaggggtttggaacgggtcccatatgaggagagattaaagaggctaggacatttcagcttggaaaagaggagactaagggaggatatgatagaggtatataaaatcatgagtgatgtgaagaaagtgaataaggaaaagttatttacttgttcccataatacaagaactaggggccaccaaatgaaattaatgggcagcaggtttaaaacaaataaaaggaagttcttcttcacacagcacacagtcaacttgtggaactccttccctgaggaggttgtgaaggctaggactataacagcgtttaaaagagaactggataaattcatggaggttaagtctattaatggctattagccaggatgggtaaggaatggtgtccctaacctctgtttgtcagagggtggagatggatggcaggagagagatcacttgatcgttacctgttaggttcactccctctggggcacctggcattggccactgtcggtagacaggatactgggctagatggacctttggtctgacccagtacggccgttcttatgagtaagggttccaggactagagtattagcgagggcttggaacagactgtcttattaagctatcagatcagggctgttatgaaaatagtaatggcttctgaagaactgcttgaccagagtgctgtttcaaagtggaacattttgatgaaatgttaagagttttgtctggatctctcctctggtaacaccctacttaccagaactctgtccttctgatctttgagcaattccttaaaccacagggcactggaaaatataatcctgacattccatccaattctctgtaaaacagacaatttacactaaacgaaaaaaggctacaattacactagcagacatgttatgacttggtacacttgtaaataaggcagagattttaaataggaaaatggcaagagaaaatacaactcctatttggactagctccagttcccaaatatctgtcttgggccagtgagtccatatttttctctctattcatccatattatctgtcttatctagctaatctattaattatattccctggctagggtagtggaagtgtgaaaggtcacacttgtttgcataatttgcacttcaggagaaaagcagaccacaataagtagttcatcagactgatacagagcgatctggatcacttggtaaactgagtgcaagcaaataatacatgttttaatactgctaaatgtaaaggtatacatctaggaacaaagaatgtaggccttacttacaggctaggggattcaatcctgggaagcagtgactctgaaagagatttggaggttggggtggataatcagttgaacatgagctcctagtatgacactgtagccaaaagagctaaggcgatccttggatacataaacaggggaatcttgaggaggagtagagaggtaattttacctctgtattttgtactggtgtgcctactgctggaatactgcatactgttctggtgtccacaattcaagaagaatggtgataaattggagagagttcagagaagagccatgagactgattaaaatattagaaaacatactttagagtgatagattgagctctttgagtctatttagtttagcaaagagaaggttgaggggtgacttgattatagactacatggggaacaaatatttgataataggctcttcaatctaccagacaaaggtaacatgatccaatggctggaaggtgaaactagacaatctgagactagaaataaggtgttaatttttaactgtgagagtaattaaccattgaaaccaagaagtttaccaagaattatggtggattctccatcactggcaattttaaaatcaaggttggatgtttaaaacaaatatctatctatctatctatctatctatctatctatctatctatctatctatctatctatctatctatctatnnnnnnnnnntatctatctatctatctatctatctatctatctatctatctatctattgttttgggaaagatctatggcctgtgatatactggaggtcagactagatcagggattggcaacctttggcatgctgcccatcagggaaatcccctggcgggccaggacggtttgtttacctgcagcgtccacaggtttggctgatcgcagctcccattggccacagttcaccgttccaggccaatgggggctgtgggaagctgcggccagcacatccctcggcccgtgccacttcctgcagcccccattggcctggaatggtgaactgcagccagtgggagctgcgatcggtcgaacctgcggacgctgcaggtaaacaaaccggcccgtcctgccagcagatttccctgatgggccgcgtgccaaaggttgccgatccctggactagatgatcataatggtcccttctagtcttgaaatctatgaaactgtgaaacagcctttgaagcttcaaaagtgctgcagtgatttttataatcagctaagcgtacgctagaaaggaaaataacatttgttcagcaagtctgcagtttaccagtttacccaagatttgtctggtaatccaaggttcaagaaaattttttggatgagatacatgttgtctttcagatttgcaaacaaacatataaaaagaaattgaacacgttcttcagttccattgtacacatttacagttggaggttttcatgatcaattgcttctgacattgcagtcgatacaaatttgcaacaaaatgaagtgtcaaagatggcattgtaattttactgtgtcaatcaccaacaggaaaaacatgtttttttcaatgagatcctaatattataattagcaaattcaggtgattcagatgattttagcacaagacacagatttgcatctttgtaagattttggctaagaaagttttctaaaagcattctgtgtgcataaattacatcagacaaagtaaaattggatcataaaaaaacatcatgttgggggagagttgtctataacagagtaattatttaaagagctcaacagatttcctgcatcagtatgattggattccatgtgggaaagaagattctcaaatgtctaggcttatccttcaaagtatgacctcaatgaaagcccttaagcaatggtaatctgcttcagtcctgtcctgaagctttgtggagcaagttatctggcttgaagctttcagggcatctgtggccatgcctccaggagctccctgcatgacaatgaagcccaggagtcattataggtacttgtgtagcatttgtgttccaaagtttcttgacacaaggctgcaaagggtcagtgagtaggcactggaccattacctaatacacagcccacatctgtaaagtggttttgcataatggccttcaacttgagatgctgtagttaagagttgttctttgttgatttttgtaaaaaaaagcaatactctttgtctggaggcattgaatgtagatgattgtgttaagtggagcagctaagaaaaagcctgttcctctcaaattaaatcttgtgtcctggttctgtgccaatactaccttagtcaaaagctttgaacattcatgaattgaggcaatcctgagctgactcctcagcacagaatctagagtgcaatgacacttagctttatgacgcagatctaaaccgcaaagttaccctgcattcaacctggggatatttgcatcaaggcagcttcctgatatacagcacatcaatactttggttccatggtgtggtcctttgcttatcccattcaccttgcaccttacctctgtgcagatcctatgaggtaatactacactgattgcctgagttggaacctgcagttccttagcacttaggcactacaataatggacaaggtataaatatctagataacttggctttgctccaacaacaccctcttccttccccccccccccccccagcagcattgatagttgccattctgcatcaactccctaaaatgagccggtaacccaaccattgttttgcttcatggcacagacatacatagatgtaccttgataggaggcctatatgccaatgcctcctgcatcaaaggactgcagtgcataaatggtatgtggtcattgatgtattgccactttggctttgtgatgcaagtctgcaccagtgcctcctgcccaaagcttgatagccttaactctagtagctgatgacagtcctggcttggctgggaaaatgctagggttttggaaagctccacggttaactgccaacatcccaggactattggcaactattattcctagccttaagagctcagcttcccattcctcccatttttgccacattgagagctgacatcgtcataactatgtttcctatttggcagctttgtcatctgtcactgggaggattgaggcgtatccccagaatctctcttgctctcttcattaacctcatgtgctgggataagaactggccctagaaatgtttgggtttgtattgattttagtaactatgacaaatgctgatccttcttgcagcaatgaggcaagatgctgcctatactattctgaggttttgcctgctgagaaaatgttgcaggctagcatggtaataaccctccttttatagctcttacattgtcttattactactacttttgtcagtttcacagtgattcataaatcacagagggaaacatttaatcaaataatgagtcacactattttatgcttccaacccgttatctttaaacaaataattagagactcagataaactttttgtggtaggacagtctgtatgcatgctgacaatgcattcgccttttaatatataatgagtctggctctacttgctttttctgcttatttcatgtttacactgaataagacttgttttgaactgaggagaaggtagtggaactcttgctgctttgttttgattgtatactgcaagttttcaaagtagagctaagcaaaatttgtttgcatcctatttggagacaaaaacttgaaatgttgatattttccaggaagtggatcttccaaaaatttagattcagaaatacataatatttggaaaaaaatacataactgtaagggtagttaagcactggaacaaattacctagagagactgtggaaaatccatcattggaggattataagaacaggttagaccaggggtcagcaacctttcagaagtggtgtgctgagtcttcatttattcactctaatttaaagtttcgcgtgccagtaatacaatttaacgtttttagaaggtctctttctataagtctataatacataactaaactattgttgtatgtaaagtaaataaggtttttaaaatgtttaagaagcttcatttaaaattcaattaaaatgcagagccccctggacgggtggccaggacccgggcagtgtgagtgccactgaaaatcagctcgcgtgccgccttcggcacgcgtgccataggttgcctacccctggattagacaaacacctgtcagggatgtctagataatacttagttctgcttcaatgcagggtactggactagctgacatatcaaagtccctcccaggcctacatttctatgattctataattcctgtaacagaattgcttccgtttgtctcgtcacatttttcaacattaaattgcatttccctgttgctttatgggaattgtagttctggccccttttctatcctattggtcaagctccagggctggactacatcttccataatgtaccaagagtcgtgtgactcccatgatgcaccacacagggaaaatgctttttaggagatgtactgctagggagtatggcccagaggagagaatggggaccaagctacgattcccataaggcaatagttaaatgcagtttgatggctttttaacaaatttgaaagtaaatgtgttgggtcactttaaaaatgaaatattccaattcaggttgaactgacccaaaatgaaatatttcatttagttattcctgatggacgatctatctatctatctatctatctatctatctatctatctatctatatatatatatatatattttttacaaaatcaaaattgtcctgcaggaaattgattttttttgcagggactgcattttctgtaggaaataaattctgatggaaaattcccaaacagctctatttaaaaggagctttttaaaatgaaattaaaagagaacaccaatatattctgaatgactacaacaattcatgcacagtcatttttgtaaagaagcagtatggttttactgagaaaaagagtctttgaaagagcaaactacaatattttagtatccaatttcactgttaatgttagtaaacaaaatttgaagtaattttgaacagatcagaatttttctctcaaaacatttttgatagaaaatgcatttttatgaaaaaatacatttttattgctttcatcagtgaagaaatcccaaatccaaatattttagggttttttaaacccctctcctcccaattccctcccaccaaataaaaattaattttttcaacaaaaattttcataaaaggccaaaaaccaaaccaaccaaccaccaaacaaacaaaaaatcagccagagaacagcaaattgagggaatacccttgccccttcagtcagaacacagtcaaacttggcatgaatgtaacactggtctacaatttttgagaagtcgtctgcttcagagataaaatgtgctatttattatgtattttgatgtgctgaattcaaatatgacaattaaaacaactgattggctactgtttctaagatatttaagtttttacattttatgtctatgtatattgtgtagatagtagagttttaatcataaattgtaaacctaggtcttttcatgtgtttatggttgctttacatgataatatttcacctgtcctgtttatgtaacactttaaaaatcagcaaaagggttatataaataaaattgattatgaaacaaaaggcaaaaaactattctgtacatagtttagtcctattcagtgtctactcggcgcttcttggcttgtctcttgtattccttaaatggagcatctcttgtcactgtccagcaatagtctgcaagaattgatgggctccatttgccctgatagcgtttctccattgttgcaatgtcctggtgaaatcgctcgccgtgctcgtcgctcactgctccgcagttcggtggaaaaaaatctagatgagagtgcaaaaaatgtatctttagtgacatgttgcaaccaaggcttttgtatgccttgaggaggttttccaccaacaacctgtagttgtctgccttgttgtttcagagaaaatttattgccactaactggaaggctttccatgccgtcttttccttgccatgcagtgcatggtcaaatgcatcatctcgaagaagttcacgaatctgaggaccaacaaagacaccttcctttatcttagcttcacttaaccttggaaattttccacggaggtacttgaaagctgcttatgttttgtcaatggccttgacaaagttcttcatcagacccagcttgatgtgtaactcactcactcatgcccgtcaccccaatcggggtatgggccgccaaccacagatctccagagtcctttatcctgggccgtttgctctagctggttccaggtatagactcatacatggtcttcacgttccatgtaccgatggtaatcctcctggttgcaagaagggtaatcggcttagtggcttcctcatgactttcaccacccagcgtcatgcgtcttcgagttgaagacccttcttttccaggctaaaagtctctgttatctctattgttggcatttctgtagcaagttgattttttacggggtggagttgctagccccacgcccaaccctcctcctttatcctgacttgggacaggcagatggccccaaaggacctctctggtggagttcttgatgtgtaagggtggtaacaaaatcttccttgattcaacaagtggtggatgctgaacacttttcctcccaggctccaatgactgtcggagtggccaatctttcttgatgtagtgggaatctcttgcacgactatcccattcgcagagaaaacagcagtactttgtgtatccagtctgcagaccaagcaagagagcaacaaccttcaaatcaacacaaagctgccactgatgttggtcatagtttatgcacctcaaaagttgtttcatgttgtcataggtttccttcatatggactgcatgaccaactggaattgatggcaaaacattgccattatgcagtaaaacagctttaagactcgtcttcgatgaatcaatgaacagtctccactcatctggatcgtgaacgatgttgagggctgccatcacaccatcgatgttgttgcaggctacaagatcaccttccatgaagaagaatgggacaagatccttttgacggtcacggaacatggaaaccctaacatcacctgccaggagattccactgctgttgtctggagcccaacagctctgacttactcttgggaagttccaaatccctgacaaggtcattcagttcaccttgtgttatgaggtgtggttcagaggaggaggatgggagaaaatgtgggtcctgtgacattgatggttcaggaccagaagtttcatcctcttcctcttcctcatctgactcgagtgagaatgattctggtgcaaaaggaaccagcggtccttctccgtggggtactgggcgtatagctgatggaatgtttggataatgcacagtccactttttcttctttgacacacctttcccaactggaggcaccatgcagaagtaacaattgctggtatgatctgttggctctctccaaatcattggcactgcaaaaggcatagatttcctnnnnnnnnnnaaaggtgataggctttcttaaccatagtggttatactgcgcttttgtgatgcaaaagtcacttcaccacaaacagagcagaagttatctgcactgttcacacaagtacgaggcatctctgctcactttggctaaacagaaatgtgtccctttgcaaaatcaaacactgacaaataagagagcacgacactgtatgatttctagagctgatatagggcaatttgttcagcagagtgatgtaagcttcgttatgattgcatcatccatgacttctaggaataaaatgatgcaattcatatcatgtatgacgcaatgccagcttcagattgcatcattcattgttttgcctaaaaagcaagtactgtccaaacccagtcatagatttattcatagatccagtcaaagatgtattttagtcatttctggtttaaactgagatcccttccctttataactcacttatcctccgccattcccaagtcaagggtcgtatatactgacccaatagcatatcttgaaaactagagccaatcaacaattttaagcatcattttcgttctcagtgacccagaattagtaaagtttgactacatttatttcagaagcattttggctgtagagcagtgtaatcaaagaattccatagactggctaccaccgatgactatattctgcccctagcacccgatagtctaaatacgagactctccagtttcatcattcctttggatcat

SEQ ID NO: 6 - DNA, 9279 bp, unidentified
  misc_feature 1..9279: note = Fanzor polypeptide
  source 1..9279: mol_type = other DNA
tcaaaatacagcaaaaataaggttaggacggttaggacttaatcaagcaactatatatgcgatcgtttgccatctacaggatgtacacgtactactaatgtacttccgacaaaatgttgcgcctttcagtgaagtacatgcatataagattggtctccttaagtctatactccatgtcatctccacctgaaagaagaaatttttcttttagaatttttttctttggaaattttatattttccaaaaaattttttttaataattttcgaataactcccaaatatttccctcttttgtcgcaagttttatttttcaatttgaattttaaaaagtttcaaatttaatgaaattgtcttgtaaacaatgtagacttgagaaatattttaattcctacaatttatagaaaataatgaaattaaaattttgaaacaattatgtgataaaatcagaggcaatgaaaagtattttaaaatttttagaatatatgaaaatgcccatttatactttaaatatctcaatgtcgaaaaaaaatttaataaatttgaatacttattatttcattagaatttataattcaaaaaatttccattaaacaaattatcatttttaattaattaatttttatttagcaaatttaaaaggaaaaatttattccttaaattgaagactggataaaataaaactttgaaagaaaatgtatatacttttaaaaattaaataattatttatattttttaaattacaaactgttgatgactcttcactttcgttttcgtattcccttaaaaacaattcctttattaacaaatgattccgctgagaaattattaaatagttaacatttttaaatgaacggacattttgttattaaatgttgtattacaagaaatatcatatttatttaaattatatttaaaaattattgatatttatttaattttcattacttacaaatccacaagttgctcttaaattcgacattatgttcctcaatggctttcttttgagtattatcaaaagtgtctctttaatacaatacgaaactaatttgttcgatgtcattgtcatattgtcattcctcgaactaaatttgcgatataacacatattcttaggactatatttcacattttcctccacgtgacaaacaaactgtaaataatcaatcaatttaaaaatattcactcgcaattagtaaaattttaacaaaaaattaacttattgctgattttctttcttcaccatagtggtttgaatagcggataaaatttttcattatttcgttcaaaaatcttgaaagtctttacatattggcagtttgtgtcacaacaactaaatttgtctggagcaattgttttcccaataatcgttgtacacaatttgttaaattatgcatttcacaatttcagaaaatacaatttttaagacacaaactttaataccgttttcttaaaaaagtatttacataataagaatttgagtaaaatgaaataaaataatacataaactaaatcagctgctatttattggttatatcaactttctgtaagtaacaaattttaacgaaatctaatattttctttttctcagcaaagaaattcggtcgtctcgcacaagccgttcttcaacgtccgtgctgcttgtataaaagtagcgcacgcacactgggagcttcacttgcctccagtgtcttacacgggaaggaccttaccaacagtgcacgcgcactaacaaaacctccacgtcgaaggtgctcttgtcgagcttgagttggctctcagcaatatcttttctaataaatttttttttaaatttgttacagagcctttctagtcgaaaattgtcgagttgttaattctacaatcgcttcgctccagtgtcttacacgagaaggatctatctacgaaacctccactgcaacggtgctctagtcgagcttgattttaagctctacaaggaaattcattcgtgtctttctttaacgtccgagccttctttgcaaaaggtaaacatattttatattactataaatgcattttaaatgtttcttgacatcttgctatatttaaaaattcaaaatttgttatctaaaaatatattttctaataaaattttttttttaaatttgttacagagcctttatagtcgaaaattgtcgaattgctaattctacaatcactttgctccagtgtcttacacaggaaggatcgaaccatcaatgcagcgcactgtcgaaacctcctcatcgtttctcgtcaagatcatcatagggatgaatactttttaattttgcgaataagactagcataatttactttttaagaattgcgttttttgttttttttgcgttgttttcgatattttgtatgtctaatattggaaaaaccagtgaaaacatttggatctcggaattttttttatgtttgcgtttgtttttttaatgaagcaatgaatagtgacggagttggtgcaccattcaaacctttgaatgttggcacttcatacagtggtgtacaaaaaaacattggttccggtctaattcaactaaaaaatcctgatgcaacggagaagagaaaaatcattcctgacaatgatgaagaaccatcttgtagtgcacctaaaaaacgacaattggataaagagatggaaatggaagttgtttatgagaacattcgtctcgaagatcaaaatggcagtgttgatagtgataacaagaaagggaagaataagaagaaaaagattattggttctggtcttattcaagtaaaaaatccagttgcaacgcagaagagaagaatcattcctaaaaatgatgaagaaccatcttgcagtgcacctgaaaagcgaaaattggataaagatatggaaatggaaattgttaatgagaacattgatatcgaagatcaaaaagaaaaagaagccgcaaatgtcgatgttgatagtgataagaagaaagggaatagtaaagaggaaaaagaagacaattggttcgaagaactggaattaggcaaattacttaaagaagaagagcagggaaatatattttgtgttaaaacaggtctcaaagggttttgtaaaagtcaacaagtggtagaaatcattaaagaagatgttacaactttgtctccaatgctaacggaagtgtcatactttgctaaattttgcttgctgcatgacaaaaatccctggcttttgcaacattgggctacaacagacattgatcatcgcatgttaacacctttttttaaagtaactaatccgaaagaattgaatcgtataagaaacaaaaatccagaacttaccttattatttgatgaatactccgaaataaggggttcaactcttcaactttacgattttacaaaccgggatgtactcgtaagtcaagcaacgaggcaaatggattcgaatttgagaatacaactatgtgtaggcggaccacaatttctaaagaaattatttttaaattattcagcagaagaaaatgtccaacaaccagttgatgatgaagacgccctgctggaagtaaagagatacaaagagatagaaaaaaggggataaaaaaagattagaaggtataatagtttggggatgcaaaatggatacttaaaggagatacaaattgtttatctctttctattaccttatttatatctctttttatcccttctaatctctttatatgtagttttagatatagaagtatatagaaaaattgcttgaagtaaagagatacaaagagatagaaaaaaggggataaaaaaagattagaaggtatattagtttggagatgcaaaatggatacttaaaggagatacaaattgtttatctctttctattaccttatatatatctcttcttatcccttctaatctctttatatgtagttttagatatagaaagagataaaaaattagggatacaaagtggtgaattgaagtagatagaacttttctatctctttctattcctacatttctatctctctctgtatccattttcatatctcttctaatctaaataaaggcaaaaaagagatatagaaagggatatactagtagattagaagagataaacttattatatctcctcaaatccccatattcttaactttttctatctcttttaaatgaagtaaggagatagaatatgggattgaaagaagattaaaagaataccatttggaaaagaagaatgataaaaaggaatagaaaaagtttatcgctttgcagtctcccatttccatctttttctatctcaacttatatctcttttgcatttctaataaaaaaatgaaaaagatgaaaacgaataacttcactaccgctttaagcgaatgttatcaatttttattaagttggaaatatttttttaatttctgcagtcatttatagtaagaatattttactaacttctttgtggacatttagaaggacatttttctcttatgactctttaaaattaatttttaaatgagaaaagcctaattatcaaaagtgatataataaaaaaatattcttattttttaaaaaatgtcacaaattaaattaaatattttaaaaggcgtgtttttatgtaaaaataaaggttttttgtaattattgttatttattgacataaaattgtaatttacaaaaaaaattacagtgaaatacgaaagttaaaatcaaagttaatatatttaaaaaataatatttcttcatgttgtaagctcaggtattttttccaattccttatccactacgtctgtatcattctcctataaaaaataatattgttatgaaattaatccattaacattttaatgtttcgaataaagattgtgaagaaatttaataactgtgaacgccaaaaatggaatactcaaacttttgtataatacttaaaaagtaatttaaatttatacaattattttaccattgagttttcattcaattggtgaacttctttttcagtttcttcagtattttcctgctggtgctgaatgtttgtcgggtttactgcattttgaccgtctataaaaaattattaattttataagtcatacgcttaatttgaaatattatatttacttataattaattgaattaacttattaaagtaattatacttactgttggcaattcttttgcagtgcctttcccggagttttgttatgtattggcttaaaataattggcacatcatttttaaaaacatttattgttgacttatcatacggaggagtgcatttttcggcccaattttcgaatgattctgaaaaataaattatatattaaatataaaattattttctttatgtactataggtgcatgtaattattattttacataatttaccttgaatagcacatattttttggggatcaaggcgcggacgtgcaattgagttaattttccgagtcctgttcgatactttccctgtaacgctgctatttataagtatttgaaacccaaagcacgcctcagctaatttatttataaaaatttttggtgtcctggatgtaattgcaacgaaaacaacatcaacaacaagatttgtttggtcaattaaataaacaaaaccgggaagctcttggctgtatatcaaaaaaggacgtagattttaaaaatagtttgaacgcgaaattaaatgataaagagatgacagttgaggaagtgaacgaagaatatttaaaaagatttttcaaggttaataattttctcaaaggagaacgtctaaaaaataccaaaattcgcgcattttcgtctaatggtgtagatgtctcgataatctacgaaaagaaaacagttaagaaatcgataaatactgctactgctacctcgtccaaatcatcggttgacaaaaagacgggtccatgtaaatataagcgtttcgttgggctagaccccgggaaaaaagcaagtgttgcaggcgtcgaacgcttaggcgaaccgcatccagcgcaacataatataaacaaggacgataaacctatttacgctcgaagttcaagtgttaggtggttatgtggcgaggcaaaacggaaaagaatattgagaacaaagtgtcgtgatattgatgaacagtacaatgtatttcgcgaacaagatgaatttaaaggtattaatttaaaggattcatcagactttaggcgtataacaaagtggcgattggaaatttttaaaattaaaaaagattgtcttctgcgttcgtgtattactcgtttaaagtttaataaatacataaggtcgaatagtgaaatcgatagattagtaaattttattgtaggagacaccgacaaattgccgacgttagttgtacttggacaaacaaaaatttcgccaataatgaagggatacgtcggaactagacttacattaattgaaaaacgcttaaaagaacgcgctaaaatattaggggcagatactttcaagtcataaatgttcacgaaggttttacaactaagcagtgcagtacctgcaattccacatgcaaagtctcgaaaagagcacaccggtttgtcttttgccaaaaatgccatatcgtgtgggagcgtgatgtgaatgcgggccggaacattttgaacgttggattagtaaaagaaaatattattaatcggaacgaactgccggattccaatgttttcactgctttatctaaatcataaattaggctgtttgctatatattcgacagcccgctacaacatagcatacactgtttaaaatatgcctcaaactttacactaaaaaaattgaaacgttatttcaataggactgcaacttaaaaatatagaataatttcacattacattttggttgaaaatgattttgttttaaatttaattttttaattttaattgaaaaactgaagtcctattgacttgaattgattttaatgcatttatatcctcctacccaacttgaatagccttatctaatcaaatgaaaatactcacacttcttgagatttaaagtacagtagaatccgcttatagcgacttcgcttatagcgaccgactggttataacgacgtacacaaaccttttagtttggtttacattgaatttagtatggagatgagtccggttataacgacttcgcttatagcgaccaaccgtttatagcgacgtcttttttcagatgtgtccggttgtaacgacgaattttaaagtatacaaacaataactatgtctgagccatacattcttttgtcttgtttttcccaatattcaattcaatcaagtttagaaaacagtattatattgatagttactcaagagtgatcgttaatattaacaggagtaaaaatgacatcgattagagtctggagactcaaattcttctcttgcaaaagagtttggcgtgtctcactctacaatctcaactatttttaagcaaaagaagaaaattgaatcgtcatttaatgaaaatgttttgaaaccgaaacgtttaagaccgtgtgatcaaaaagaagttgatgaagctttattaaaatggttcaaagtgcaacgaaatcgagggattccagttagtggacctatattagaagtaaaggcgaatttctttgcttcggaatttaatattgtagactttaattgcacaccgagttgggttaatagattcaaaatgagacacaatattgttgctggtcaaataagtggagaatcaatgtcagtcgataaaaatattgtaagtgattggcaggaaaaagtgtggcctaatttacgtgcacaatatactgatgagcaaattttcaacgcagatgagactgggttgttttataaattaacaccaagtaaaactttgaaatttaaaggagaaacatgtgcgggcggcaagttatcgaaagataggataactgttatggttgcaaccaacatgagtggttcaattaaaaaaaaactgttaattataggtaaatctaaaaacccaagatgctttaaaaatgtacggtcgttaccagtggattataaaagcaacaaaagaacgtggatgacgtcagaaatttttacagagtgggttcggtcttgggattgtgaattgattaaagaaaaaaagaagattctacttttggtagacaactgtccatcacataatgctatcaaagacttaaaaagtataaatctagtattccttcctgctaacactacttctatattgcaaccaatggatcaagggataattcgagcattgaaaacaaattttcgtaaaagtcttgttttaaaaataattgactatctggatgaaatctccagctgtagtgacaaaaaaattattatttctgtactcgacgctatattgatgatttacgatgcgtggtcaaatataacacaacaaacaatttcaaactgttataaacatgcaggatttactagagtggatgaaaattatcccagtacatcaacggatttaactaacaatgacgaagtttctttatcgacttggatgaaagttatgctacccaacaatactgaggtaagtgcagcttaataataaaatcttacctttcttcaaaaaaattaaatataaattataaattctgttatagggcagtatggatcatcagctatctttaacaagcaaaataattgaacaatatgtagatgtcgattgcgatgttatcacatgtgaagatttatctgataagttaattgtccaggacatacagaacacaaaataccagagtgacgacaatgaagacgacgactcagaaattcatgacgacgaacttagtcggattccaaacgcatcagaaaccttaaaggctgctgatgtactgaattcatttgtacattttaattttagtgatgaaaatattaaaaatgctatgtctcgtattcataatgtgatacgcaataattactatgagacaaaagtgaaagagaaacaaactaaaattacagatttctttcgctcatagaaccatttaaatttaaataaaaacgtaataaatttctgaactgatgtttgatttttcctctttgacgcttataacgacgtccgattataaagaccaaaatcctccgtcccttgaatgtcgttataaccggactctactgtatgtaattttcaatctttcggtgtaaagttggtgtccgatttttaacagtgtaatgtgcattcttcaacattacttcccgatgcttttgatctgcggcaatctgccaatcttcttcgatatatttaaaacatttggcaacaaacttcgaaaggctcataatgtagaaattagtgggacctgcgatttcaattttttcacgaacttctttcatttcgtagagggcggacagaacatttg

SEQ ID NO: 7 - DNA, 9279 bp, unidentified; identical to SEQ ID NO: 6
  misc_feature 1..9279: note = Fanzor polypeptide
  source 1..9279: mol_type = other DNA

SEQ ID NO: 8 - DNA, 16680 bp, unidentified
  misc_feature 1..16680: note = Fanzor polypeptide
  source 1..16680: mol_type = other DNA
aataattaattattttttttaattatatttactttttctcttttattggataataacaatttgattaagaatttcaaataattatgatacacagtttaaatctaatattattatcctagtcaatttgactattttttcctgattgcatctactaattttcctagtcactttaactatgcttgaattttattactttgactaggattctatagttggctcctctcgtaactagaaaacctagtcaattcctggtatacgggtcctaggcatttttttcggtgtatctctcaaaaatattaaacaaaaacaattacaaattgcattattctatagaaaaattatagaaaaattatattaataactatagaagaattataaagtgagtataaaaattgtaatataattaagaatataaatttattggcaaaaaaattattttattgccaaaatgcagacgacaatcgactcgagctccaggaaaaaaataaaattgcaaacgaatataaataagatctgctcttgttttgttgaaaacttcacgcttccaagcggatttttaagattaaaagtcgattttcggctgcattttggcagaaaattctacacaatttctatataatattggagtttactgatttgtctttttttaaattaatccttggagttttgcgcatcaatacatggtgatttaatattaaaaaaacattgcgaacattcttcaatttccaataattgtttaaaagaattttcaataacaattataattataatttagtgtcagaaatttgacaaaaaaaggagtaaatagtatagattttagtagatgagtgcgaagcctgcttttttatatattacgtttccaaaaaaaaattatttttcaaaatattactgtttttaatataaataccattaattataaaataaaaattggaataatttttctaaacttccgtaatatttaaaactttataagaagtcttatcatttctaaaagtatgaacgtgaattcagaaaaacttttacgttagctaatttaaaaaattaattaaatgaaattcaaattagaaaatagaattatattcaatattacaattgttaataaattatattttatttgtcttcaagaaaacttaagtactttctaaatttaaaataaatgcaattaatttataattatgaaagtaaaattaagtataatacaataaagaattcttaatctcgttatttaattaaaatacaaactaattctataaaaataaagagcttttgaaaatatcaaaaaatcttattattaaaggaattattaaattattccaaagaaaaaatataaataaaaacgatttaaaaataaaatgtttcataaattagttattaaaaaaaatttccacatatttctttaaacaataataataatatttattattataatttttattattattaatataaaataaaaacagcaacttacctcaaaaatgctatccgtaattgatatagaacatttaattaattaccagttaattaacacttcacttaaatttattttcactatatacggagcgaaattggcaagaaattgaattcacttgactaatttctataccaagaacacctagctccatctctcgaacaaacttttcactttcctcaaatatgacaaatgtggggcctttgtccagtggcgcatttgaccggtggcgcatttgtccagtggcgcatttgagaacttacctttttcccgccatttacttttgtgtgggtactaatatacaaacgtttatttctatatatattattaaatagaaaaaaccgttaaacgttttcattatttttatatagactgattaaaaaagtgtagataaaaatggacggtaaatataagtgtatttaataattttacaaaattgaattataactttcaaatttatttaatttaaactgctaaaaaatttttattgatttaaatgtattgtatttccatgttatttagaggaaggtgcagcgaataataatcaacatatcgttgattctgatttgatttgtacgttggttctgtgcaaaaaggatgaacctggattctttttgggagatcgtaatatatgtgagtttattttgtcctttaaattttctctacataagtactaattctttttttttctctttccagatgaaaatttgataacatcagaatcgctaagaagaataattacatttttggagtcaatggaaatgctgatttattttaaacgtgtttatatcaaaaaataatattaaggcaccaacttcacctgtgaaggcaccatctccaattaaatattgatctcctttctcaaaagcaatcggcccttttcagggccccaaagtcaggcttctccttcgttgtgaactcgcaaagcacgtcgtctgtgaaggcaccaatacttgtcaccaagtacaccatctccaattaaatattaaacacctttctccaaaacaatcggcccttttcagggccacaaatctttttacgaaagaattattgagttcatttagtattaattaatttacttgaatagaagtgaaaaagatatttaaagagatttaattgttttcaaaaaaaaattcgaaattcaattatttttaatatttactattttcatcaaaatttcgcaaaaaatttagtgatttaaaaaaaaattaattttttctttttgtcaattttttaatatttatcacaagaattgaaagtaacaaattctttcttggaaattcaattatattagaaataattgtaataaaatcattcgcaataattcaattatattcataaccggatttattaatgaaaaaaaaacatttttgctaacatgaattgaaaaaagaactctctacaaatgttaataataatgcgtatttttacaatataaaaatttgagctatcttaactattcgagagaaatcacagcgaaaaaaaaattattatcatccaaaaggaggacgagacgaaacaataattaacaagtatataaatcataatagatttgcatcgtatagactatagtacgtataaagtacataattcgcagcttttttcctgaaattctacatcgagtttacaatcgtgactcttttctttttgtagatttttttcttgctttctttttttttgtcgtgtaaacacatgatgtagtctgaatataattttgttttttcaatcagtcgacatttcttccttcgcttattctcgtcaattgattaattgtttcatcatctaatgtgtgtttttccaaaagtctgcgagaaaaatgtgtatttccttcagttgaaaattagaatcgccaagttattgaataataccagcgacgtgtatttctctctccattttttaataattgctcagctttgtctaatttcctgtcgacgaatctcatctcccaaggagtatagacttaaggagaccaatgtagtgtgtatgaaatcaaccattttatgtcggaagttcatagttctgaatcttctcgtatagcgcgcaacgatcgcatatatagctgaagttttaaaatgaacatggatttctataagtttactaattcatgtatatactatatattcaaattataaatataataataataagataacaaaacaaagtctatattatagggctcggattgtgcgactttttttgtgaaaaaatgtgcctaatcgactttttacagatttttttgattcaggagtgtcaatcgcttgacataacctcaaactaaaaagtgatttttaacagcaaataaaaccataattaaaatgatttcaccaaattctgaaagatccagttgtacaattatcagaaataattaggttggaccaaaatttgttgtaaaatcataattgttaaacattatgtgttttttctttaagggtcagtaaccaattaaaatttttaaccaattttgataaataatagctcattctactctttgaaacattctctacatttccactcgttgaattttgtttaaaatattttgtttaaaagttattaaaaaaatttttttttattttatttgcttaacttttgaacaaaatattttaaacaaaatttaacgaatgttattgtaaagaatgttttaaagaacagaatgagctattatttgtcaaaattgttagatcactttttagtttgaggttatgttaataacctcaaacctcaaattatagtaataattaattttactataaaggtcatgttattcagagccacgtgcctattaaaactttattaaaattattgatagaacattaaactcttttaatcaattttattataacttttataaataattaaatttcttgaagaatttcttttttttttttaaattgaatcctttcgtgaagttttatagaaattgtattaaaaataattaaattcttccgaagaatattattatttatgaaagtagaattcattgtcataattttatattacctatttattatttgaaattacttttaatttcaaaatacagcaaaaataaggttaggacggttaggacttaatcaagcaactatatatgcgatcgtttgccatctacaggatgtacacgtactactaatgtacttccgacaaaatgttgcgcctttcagtgaagtacatgcatataagattggtctccttaagtctatactccatgtcatctccacctgaaagaagaaatttttcttttagaatttttttctttggaaattttatattttccaaaaaattttttttaataattttcgaataactcccaaatatttccctcttttgtcgcaagttttatttttcaatttgaattttaaaaagtttcaaatttaatgaaattgtcttgtaaacaatgtagacttgagaaatattttaattcctacaatttatagaaaataatgaaattaaaattttgaaacaattatgtgataaaatcagaggcaatgaaaagtattttaaaatttttagaatatatgaaaatgcccatttatactttaaatatctcaatgtcgaaaaaaaatttaataaatttgaatacttattatttcattagaatttataattcaaaaaatttccattaaacaaattatcatttttaattaattaatttttatttagcaaatttaaaaggaaaaatttattccttaaattgaagactggataaaataaaactttgaaagaaaatgtatatacttttaaaaattaaataattatttatattttttaaattacaaactgttgatgactcttcactttcgttttcgtattcccttaaaaacaattcctttattaacaaatgattccgctgagaaattattaaatagttaacatttttaaatgaacggacattttgttattaaatgttgtattacaagaaatatcatatttatttaaattatatttaaaaattattgatatttatttaattttcattacttacaaatccacaagttgctcttaaattcgacattatgttcctcaatggctttcttttgagtattatcaaaagtgtctctttaatacaatacgaaactaatttgttcgatgtcattgtcatattgtcattcctcgaactaaatttgcgatataacacatattcttaggactatatttcacattttcctccacgtgacaaacaaactgtaaataatcaatcaatttaaaaatattcactcgcaattagtaaaattttaacaaaaaattaacttattgctgattttctttcttcaccatagtggtttgaatagcggataaaatttttcattatttcgttcaaaaatcttgaaagtctttacatattggcagtttgtgtcacaacaactaaatttgtctggagcaattgttttcccaataatcgttgtacacaatttgttaaattatgcatttcacaatttcagaaaatacaatttttaagacacaaactttaataccgttttcttaaaaaagtatttacataataagaatttgagtaaaatgaaataaaataatacataaactaaatcagctgctatttattggttatatcaactttctgtaagtaacaaattttaacgaaatctaatattttctttttctcagcaaagaaattcggtcgtctcgcacaagccgttcttcaacgtccgtgctgcttgtataaaagtagcgcacgcacactgggagcttcacttgcctccagtgtcttacacgggaaggaccttaccaacagtgcacgcgcactaacaaaacctccacgtcgaaggtgctcttgtcgagcttgagttggctctcagcaatatcttttctaataaatttttttttaaatttgttacagagcctttctagtcgaaaattgtcgagttgttaattctacaatcgcttcgctccagtgtcttacacgagaaggatctatctacgaaacctccactgcaacggtgctctagtcgagcttgattttaagctctacaaggaaattcattcgtgtctttctttaacgtccgagccttctttgcaaaaggtaaacatattttatattactataaatgcattttaaatgtttcttgacatcttgctatatttaaaaattcaaaatttgttatctaaaaatatattttctaataaaattttttttttaaatttgttacagagcctttatagtcgaaaattgtcgaattgctaattctacaatcactttgctccagtgtcttacacaggaaggatcgaaccatcaatgcagcgcactgtcgaaacctcctcatcgtttctcgtcaagatcatcatagggatgaatactttttaattttgcgaataagactagcataatttactttttaagaattgcgttttttgttttttttgcgttgttttcgatattttgtatgtctaatattggaaaaaccagtgaaaacatttggatctcggaattttttttatgtttgcgtttgtttttttaatgaagcaatgaatagtgacggagttggtgcaccattcaaacctttgaatgttggcacttcatacagtggtgtacaaaaaaacattggttccggtctaattcaactaaaaaatcctgatgcaacggagaagagaaaaatcattcctgacaatgatgaagaaccatcttgtagtgcacctaaaaaacgacaattggataaagagatggaaatggaagttgtttatgagaacattcgtctcgaagatcaaaatggcagtgttgatagtgataacaagaaagggaagaataagaagaaaaagattattggttctggtcttattcaagtaaaaaatccagttgcaacgcagaagagaagaatcattcctaaaaatgatgaagaaccatcttgcagtgcacctgaaaagcgaaaattggataaagatatggaaatggaaattgttaatgagaacattgatatcgaagatcaaaaagaaaaagaagccgcaaatgtcgatgttgatagtgataagaagaaagggaatagtaaagaggaaaaagaagacaattggttcgaagaactggaattaggcaaattacttaaagaagaagagcagggaaatatattttgtgttaaaacaggtctcaaagggttttgtaaaagtcaacaagtggtagaaatcattaaagaagatgttacaactttgtctccaatgctaacggaagtgtcatactttgctaaattttgcttgctgcatgacaaaaatccctggcttttgcaacattgggctacaacagacattgatcatcgcatgttaacacctttttttaaagtaactaatccgaaagaattgaatcgtataagaaacaaaaatccagaacttaccttattatttgatgaatactccgaaataaggggttcaactcttcaactttacgattttacaaaccgggatgtactcgtaagtcaagcaacgaggcaaatggattcgaatttgagaatacaactatgtgtaggcggaccacaatttctaaagaaattatttttaaattattcagcagaagaaaatgtccaacaaccagttgatgatgaagacgccctgctggaagtaaagagatacaaagagatagaaaaaaggggataaaaaaagattagaaggtataatagtttggggatgcaaaatggatacttaaaggagatacaaattgtttatctctttctattaccttatttatatctctttttatcccttctaatctctttatatgtagttttagatatagaagtatatagaaaaattgcttgaagtaaagagatacaaagagatagaaaaaaggggataaaaaaagattagaaggtatattagtttggagatgcaaaatggatacttaaaggagatacaaattgtttatctctttctattaccttatatatatctcttcttatcccttctaatctctttatatgtagttttagatatagaaagagataaaaaattagggatacaaagtggtgaattgaagtagatagaacttttctatctctttctattcctacatttctatctctctctgtatccattttcatatctcttctaatctaaataaaggcaaaaaagagatatagaaagggatatactagtagattagaagagataaacttattatatctcctcaaatccccatattcttaactttttctatctcttttaaatgaagtaaggagatagaatatgggattgaaagaagattaaaagaataccatttggaaaagaagaatgataaaaaggaatagaaaaagtttatcgctttgcagtctcccatttccatctttttctatctcaacttatatctcttttgcatttctaataaaaaaatgaaaaagatgaaaacgaataacttcactaccgctttaagcgaatgttatcaatttttattaagttggaaatatttttttaatttctgcagtcatttatagtaagaatattttactaacttctttgtggacatttagaaggacatttttctcttatgactctttaaaattaatttttaaatgagaaaagcctaattatcaaaagtgatataataaaaaaatattcttattttttaaaaaatgtcacaaattaaattaaatattttaaaaggcgtgtttttatgtaaaaataaaggttttttgtaattattgttatttattgacataaaattgtaatttacaaaaaaaattacagtgaaatacgaaagttaaaatcaaagttaatatatttaaaaaataatatttcttcatgttgtaagctcaggtattttttccaattccttatccactacgtctgtatcattctcctataaaaaataatattgttatgaaattaatccattaacattttaatgtttcgaataaagattgtgaagaaatttaataactgtgaacgccaaaaatggaatactcaaacttttgtataatacttaaaaagtaatttaaatttatacaattattttaccattgagttttcattcaattggtgaacttctttttcagtttcttcagtattttcctgctggtgctgaatgtttgtcgggtttactgcattttgaccgtctataaaaaattattaattttataagtcatacgcttaatttgaaatattatatttacttataattaattgaattaacttattaaagtaattatacttactgttggcaattcttttgcagtgcctttcccggagttttgttatgtattggcttaaaataattggcacatcatttttaaaaacatttattgttgacttatcatacggaggagtgcatttttcggcccaattttcgaatgattctgaaaaataaattatatattaaatataaaattattttctttatgtactataggtgcatgtaattattattttacataatttaccttgaatagcacatattttttggggatcaaggcgcggacgtgcaattgagttaattttccgagtcctgttcgatactttccctgtaacgctgctatttataagtatttgaaacccaaagcacgcctcagctaatttatttataaaaatttttggtgtcctggatgtaattgcaacgaaaacaacatcaacaacaagatttgtttggtcaattaaataaacaaaaccgggaagctcttggctgtatatcaaaaaaggacgtagattttaaaaatagtttgaacgcgaaattaaatgataaagagatgacagttgaggaagtgaacgaagaatatttaaaaagatttttcaaggttaataattttctcaaaggagaacgtctaaaaaataccaaaattcgcgcattttcgtctaatggtgtagatgtctcgataatctacgaaaagaaaacagttaagaaatcgataaatactgctactgctacctcgtccaaatcatcggttgacaaaaagacgggtccatgtaaatataagcgtttcgttgggctagaccccgggaaaaaagcaagtgttgcaggcgtcgaacgcttaggcgaaccgcatccagcgcaacataatataaacaaggacgataaacctatttacgctcgaagttcaagtgttaggtggttatgtggcgaggcaaaacggaaaagaatattgagaacaaagtgtcgtgatattgatgaacagtacaatgtatttcgcgaacaagatgaatttaaaggtattaatttaaaggattcatcagactttaggcgtataacaaagtggcgattggaaatttttaaaattaaaaaagattgtcttctgcgttcgtgtattactcgtttaaagtttaataaatacataaggtcgaatagtgaaatcgatagattagtaaattttattgtaggagacaccgacaaattgccgacgttagttgtacttggacaaacaaaaatttcgccaataatgaagggatacgtcggaactagacttacattaattgaaaaacgcttaaaagaacgcgctaaaatattaggggcagatactttcaagtcataaatgttcacgaaggttttacaactaagcagtgcagtacctgcaattccacatgcaaagtctcgaaaagagcacaccggtttgtcttttgccaaaaatgccatatcgtgtgggagcgtgatgtgaatgcgggccggaacattttgaacgttggattagtaaaagaaaatattattaatcggaacgaactgccggattccaatgttttcactgctttatctaaatcataaattaggctgtttgctatatattcgacagcccgctacaacatagcatacactgtttaaaatatgcctcaaactttacactaaaaaaattgaaacgttatttcaataggactgcaacttaaaaatatagaataatttcacattacattttggttgaaaatgattttgttttaaatttaattttttaattttaattgaaaaactgaagtcctattgacttgaattgattttaatgcatttatatcctcctacccaacttgaatagccttatctaatcaaatgaaaatactcacacttcttgagatttaaagtacagtagaatccgcttatagcgacttcgcttatagcgaccgactggttataacgacgtacacaaaccttttagtttggtttacattgaatttagtatggagatgagtccggttataacgacttcgcttatagcgaccaaccgtttatagcgacgtcttttttcagatgtgtccggttgtaacgacgaattttaaagtatacaaacaataactatgtctgagccatacattcttttgtcttgtttttcccaatattcaattcaatcaagtttagaaaacagtattatattgatagttactcaagagtgatcgttaatattaacaggagtaaaaatgacatcgattagagtctggagactcaaattcttctcttgcaaaagagtttggcgtgtctcactctacaatctcaactatttttaagcaaaagaagaaaattgaatcgtcatttaatgaaaatgttttgaaaccgaaacgtttaagaccgtgtgatcaaaaagaagttgatgaagctttattaaaatggttcaaagtgcaacgaaatcgagggattccagttagtggacctatattagaagtaaaggcgaatttctttgcttcggaatttaatattgtagactttaattgcacaccgagttgggttaatagattcaaaatgagacacaatattgttgctggtcaaataagtggagaatcaatgtcagtcgataaaaatattgtaagtgattggcaggaaaaagtgtggcctaatttacgtgcacaatatactgatgagcaaattttcaacgcagatgagactgggttgttttataaattaacaccaagtaaaactttgaaatttaaaggagaaacatgtgcgggcggcaagttatcgaaagataggataactgttatggttgcaaccaacatgagtggttcaattaaaaaaaaactgttaattataggtaaatctaaaaacccaagatgctttaaaaatgtacggtcgttaccagtggattataaaagcaacaaaagaacgtggatgacgtcagaaatttttacagagtgggttcggtcttgggattgtgaattgattaaagaaaaaaagaagattctacttttggtagacaactgtccatcacataatgctatcaaagacttaaaaagtataaatctagtattccttcctgctaacactacttctatattgcaaccaatggatcaagggataattcgagcattgaaaacaaattttcgtaaaagtcttgttttaaaaataattgactatctggatgaaatctccagctgtagtgacaaaaaaattattatttctgtactcgacgctatattgatgatttacgatgcgtggtcaaatataacacaacaaacaatttcaaactgttataaacatgcaggatttactagagtggatgaaaattatcccagtacatcaacggatttaactaacaatgacgaagtttctttatcgacttggatgaaagttatgctacccaacaatactgaggtaagtgcagcttaataataaaatcttacctttcttcaaaaaaattaaatataaattataaattctgttatagggcagtatggatcatcagctatctttaacaagcaaaataattgaacaatatgtagatgtcgattgcgatgttatcacatgtgaagatttatctgataagttaattgtccaggacatacagaacacaaaataccagagtgacgacaatgaagacgacgactcagaaattcatgacgacgaacttagtcggattccaaacgcatcagaaaccttaaaggctgctgatgtactgaattcatttgtacattttaattttagtgatgaaaatattaaaaatgctatgtctcgtattcataatgtgatacgcaataattactatgagacaaaagtgaaagagaaacaaactaaaattacagatttctttcgctcatagaaccatttaaatttaaataaaaacgtaataaatttctgaactgatgtttgatttttcctctttgacgcttataacgacgtccgattataaagaccaaaatcctccgtcccttgaatgtcgttataaccggactctactgtatgtaattttcaatctttcggtgtaaagttggtgtccgatttttaacagtgtaatgtgcattcttcaacattacttcccgatgcttttgatctgcggcaatctgccaatcttcttcgatatatttaaaacatttggcaacaaacttcgaaaggctcataatgtagaaattagtgggacctgcgatttcaattttttcacgaacttctttcatttcgtagagggcggacagaacatttgagagaattgcacaaaccatgaggaaacaggcacatatgtttagaaaaaatttaataactttcttaaatgaaaaatcgtgagaattaaatggccataagccgagaattaatgctagaatacgacaaaggtttatagtgaattttacatcttttctatacgattcattactatttccatcaagtttgatagacattcttctttctgcaattcacttcatactgaacttacttgcatcaaagattcaactttccgttgcgcttgcgctgtgcctgcttgaaaagaaattcaatgcaataattattgtccatcattttttcagtttaatgatagagtataagagtccatattaatatttgtaaataaaaatatgaatgtgttttggattttgaatattgtatatgaggcattccatttcaaaacgacctccttcgtaaacaattgccaatgtaagacaatttttaaatgaatatttcttccattctatagaaccaaattactttttatattagtgatttcgaaagtagaatttctgaattttctaataagaaaaaaaatatatttttttaataatttaatttaaatagaaaattgagtttaaaagttaaactttgaaaaatctcaaaacacgttacctccgattttaataaaattcatatcaaacgataataatggacatttcagtagattttgagaaaataattaaattttacaaacattttaaaggttatattgagaaaaccatttattaagtacagggcggcatttgtttttcccaatttatgcataaaaaccttctaaatgtctgtaaaatttaattattttctcaaaatccactgaaatgtccattattatcgtttgataaataaaaataagaatattcaagctttcgtttgatatgaattttattaaaatcggaggtaacgtgttttgagatttttcaaagtttaactcttaaactcaattttctatttaaattaaattattaaaaaaatatttttttttcttatcagaaaattcagaaattccactttcgaaatcactaatataaaaagtaatttggttctatagaatggaagaaatattcattttaaaattgtcttacattgttttgaaatggaatgcctcatataatatccaaaatattaatacaaaattagttaattaattttctatgtattttataaaatctttgacaatcgcttgacgtctatcaattctagaaaatgacatccaataatatacatgtaaatatttaacaattttgattttttaattgataaaaaaagttttcttgaaaaatttgaaaaggtggtgtttgttataatttttctatatattatactttaaaattgaaattataatactcgttgactcggagtgatcgttaaattaaatttctaattaaattataaaagttttaatttcaaagtatgtgagaaaaacaatagtattttaaaattgtttgacaagcaaagaacaagaataaaaaattctagacttcgaggaaaattgtaactttacagttatgttttttcaatagttacgtaactttatcaaactttaaaagaaacgaacaaatatttaagtgatttagaaaaaactatctttaatatacagtaaaagttttaaacaattttttccaaaggaattaaaaatcttaattctgtgttacattttccatataatatttaaataggctgcggctgatttaattatctgaaaaaaataataaatcattaggaattctaaataatagcagtatttctaagaatataaaactgagacaaaacacttttgattctttttttgtctcaatttaatatctgctgaaaaactgtaaacaattagttttttaaaaacaaattgcataggaaaagagagttattttaacactacatttggtgtttaaataacactatgtgtgtttaattaatacgcaattttattgagttttgaatttgcagacactgaaacttgcaggaatattggaaattttgagaaaatggcaatattgatgcaagttttggtgcaacattttccagactattgaatttatgtaattgaagggctacataaaataaggggacgaacgcgaggcttggaagggatattaccagtcgggtagcagtgacaagccgtgagccgctcactgctacctgactgatattatccctttcaaccacgcgttcgtccccttattttatgtagaccttcaattgattcaatattatgattaaatgtataaaaagaaattataaatttaaaaacaaactaactgcggtaaacgttgtcatagacagaaaaacgacttttccagctgtgactctgattggaaattgacaaacttgaatgaaaaaggacaattccaaagaaatatttcttggcagtttataccattctatcatatatccagtatttccaactttttccgcctatgttaaaaaaaaattatatatgttcagtgattagtgaaaattttcactttaaatttactattttaataagtattatgtttacttgaattgtaagaagttctccaaaatatgcatatataaaaatgttgaaaataaaaacattcagaagaattgcgtaatttatgaagttaccaagatttcctgccttccaattctattgatcattgatgaaaatgtaataatgtattgacttttctacatgaaaatcattaatgataaaacgcccaagccttctggactccatttcggtcttctagaaggccgaattttcgcatttaaagccttaatcgatggtgccttggacgttctatcataaaataaaatagaaaatttttagttaataataatttgtgttttaccgtcactgagaaataacccaaaagactcaaattgatggcacatcccaatatttcgacaagaaatatttcacaaa

SEQ ID NO: 9 - DNA, 21083 bp, unidentified
  variation 1093..1592: note = n is any nucleotide
  source 1..21083: mol_type = other DNA
tccaccacgggactccggctttggagtccatcgcgcccagggcaacatgcacttggtgcttgcgagcaagacgggggtgagggtgcaccaacccgttccccgtaaaatcagttacaacatcaacgtgcgccaccgagttggggggcaacgtgactttgcgggctaaacgcagggtagcagtaaacccttccctcaccgaacaaacaggcttcgactgtgagactgtcacaggagccacagacattcccttaccaaggatggggatagtctccccattcatcaacttgacccagtactcagggccacaaatcaaaggcacttgtgtaacaacataaggggtacccagaagcaggggtaccgatatattctcaactacgccataggtcacgtcgacctcatgggtccccaacctagttggtagggtcacggcaccaacgatgggaagtaccccaccattgacgtcaatcatatggtcagctttggacctccagcgttggagcttcacctcctttggtaatagcgacttgcgtatcaaggaggctcctgacccggtatcaagtacgatacgggcacaacaggcacggccgggggctagttgcacccgtccagccacctggaagtttgcacccgtcagcaccgcgatgacccgacgtgggtttacgttcttggggagtcctacccgaggtgggcggactcccttaggtcgccgcagtatccggcacggctggttcgtcctcctggcccacttggccgaggctgccgttgtgagcttcggacgaccagccccaacggtcattcgtttcccgccgacttggcgtccgaatctgagggcggggaggaagacgacgagtccgaggacgacgtgtccgcctcctccgccgagggtgtggcgaccgcaacgaccggtcgagacccaccctcgcgggtgaacgtacttcgttcgtagccgactttttactcgcattcctaaacaagttgttggatgcgtttactcaacttggggcaaatcatatgcccagtgaccatcggagtttgcagttccaacaccgatggtccgttccgggaggggacttcccaactggggaagacgaannnnnnnnnnnnnnnnnnnnnnnnnnnnnnnnnnnnnnnnnnnnnnnnnnnnnnnnnnnnnnnnnnnnnnnnnnnnnnnnnnnnnnnnnnnnnnnnnnnnnnnnnnnnnnnnnnnnnnnnnnnnnnnnnnnnnnnnnnnnnnnnnnnnnnnnnnnnnnnnnnnnnnnnnnnnnnnnnnnnnnnnnnnnnnnnnnnnnnnnnnnnnnnnnnnnnnnnnnnnnnnnnnnnnnnnnnnnnnnnnnnnnnnnnnnnnnnnnnnnnnnnnnnnnnnnnnnnnnnnnnnnnnnnnnnnnnnnnnnnnnnnnnnnnnnnnnnnnnnnnnnnnnnnnnnnnnnnnnnnnnnnnnnnnnnnnnnnnnnnnnnnnnnnnnnnnnnnnnnnnnnnnnnnnnnnnnnnnnnnnnnnnnnnnnnnnnnnnnnnnnnnnnnnnnnnnnnnnnnnnnnnnnnnnnnnnnnnnnnnnnnnnnnnnnnnnnnnnnnnnnnnnnnnnnnnnnnnnnnngcacagtatgcccggaccttctcagcgggaaggtcctccacatagtcccacgtatcatccttggctttgtagccaaaccaacgcaccctcaacatgaggcggtcagtgtcttcatcccatccgtggtcgatgaacttatcaaacacgtactcctgcgggccctgtttggccgcaggcagtgagggaggtgctacgcttccaaagcacgcgcccaagctgggtcgcctgcaggcggtggtgcaactttgaccacgtcctgtccgttcactgtgcggaccccatcgtcactttcgatggtgaagcgccgcccatcagtacgaaggacctggtacggtcccttcgtctggaataccagcttacccccagttggggtgtgcgagtgtaccagcacccagtcaccctgctcggggacatgtttagcattgcgcacctttttgtcaaaggtacgcttgtagcgcttttgtgctttgtccatctcagccctgactttagggatgaggtttttcaagcctagcggcgaactccgccttactctcagtaggagtaggcgtactgccaccatcctccctagttgggagcgaccgccgcacggcaatagaccgcacgcgacggggggtcacaaaagcgaggggtacttcccctgtagatgagtgaacctgcgaattgtaggcagtagtaaggatagaaatgtattggtcccacgtcttcacgtgctcactcacatagtggcgcagctgcctaacaatagttttgttgaagcgctccacctgcccattagtttgtgggtggtagggggtggcatagtttgccttaacccccaacatatccagcactccctgaaacagtacagacgcaaattgcggtccattgtccgatagtgtactatctgggatgccatacgcggcaacccggtaatctaggaaggctgacacgacgacatggccgtgatctctgccagtgggatcgctcgcgtaagtttcgtgaagcggtcacagatgaccaggaggtactggttgccctcctcggtcacgggcagtggcccaaggatgtccatcgccaacgcggcgaagggctccttggccgggaataatagcatagccgtactaggccgccgttccatcagacggttctgtgcacaacttgtgcaggcagccacccaactgtagatgtccaccaccatggacggccagtagtacctggtcctcagggtctggtacagtttactagaccccaggtgtccacccgtgggagcgttgtgctccctctcaaggatactgtccttgagggatgcggggacgacaagttgttcggtcccctggaatacccccctcctcatgaggaggccatcgtctcccagaaagaaacgcgtctctaccactgtatccagtatatccctctgcgacttgcagaagggatcctcggcctgggccttcaccacctcctccagggacaggggcaagtacttcttgttccctggcgcctcggggttcaacgcctgacccgagcgcgtgactacccccacgatggggatgtcctcatcaactgggttagtgtccagcccctcggtaggtacccgagagaggccgttggcaagggcatgttgcctgccaggtcggtactcagtatcaaagttgaacggtgccagtcgcaccctccaccggttgagacgagtgttcgttcagtccgtcttgcagataaactgcaacgcgcggtggtcacagcggatgaggaacttctcaccctctaggtagtgacgaagtgacgtcaccgcccacaccactgcgagtccctccaactcgttgactccgtagctcttcttggccgagttcagccctttactgaagtatcccaccggcaagtactccttgtccggctgctgctgaagcaacacacaaccaagttggtcgtagctagcgtccacatccaggatgtagtggcctcccaacctgggaatagccaagatagggggcttcagcagtaggtcccgaagagtctcaaagggttcctgctccacccgacttagggaaggcaggttcttcggtagcgtcgagctaactagctcagtcagtggcttagccaccttggcgaagcccttggtgaaacgtcggtacacgctacacatcccgaggaagctcctcatctgggtctgggtccgggggtactgagccttacgaatggccctcaagatcttctcgttaacactgagacgccccggatggacaacatgtcccaagtactccacctcttaagtaaagaggtggcacttactcgccttcagtgacacaccggcgtccgcaagtagcttgaacacctggccaagatggccaatgtgttcctccggacttcgggagaacacaatgatatcgtctaggtacacaagacagatctgccaccgtactccggccagaatcatgtccatagcgcgctggaaagttgccggcgcgttacacagaccaaacggttgtcgcttgcactggcaggtaccacagtgacaggtaaaggtagttttatgcctgtcttcctgggcaatgggaatttgccaataccccgcgttacagtccagggtagagaacacttttgcctcccccagagagtccagacagtcatccatcctaggtaggggataactgtccttcaccgtgctctcgttgagcttacggtagtcgatacaaaaccggggggtcccatcaaatttggggacgataaccaccggactcgcccactcggcgttgctggcctcaatcacatcgagggcctccatgcgagcaacttgctccttaacgagggcccttgaacgaggtcctcccctatacggttgttggcgtatagggggtgcaccgggcttcaactcgatccggtgttgggtggctctcatgagtcccaattgaccatcccacaacttgtgatattggtccaagaggcgttcaacttgaaccctcaacctgggggggacaccctccatgttcacatggggccgaggagaggcggccgacttggcttgatgcttctcctttccggacttcgggtcgctacttgcgcccgcgttgagggtgagcgctactaccggtccctcgtgttggtcgatatagccgaacttggctcccgacttgaagtacttgggcgtcgggctcaggttcatcacctggatccaccacgggactccggctttggagtccatcgcgcccagggcaacatgcacttggtgcttgcgagcaagacgggggtgagggtgcaccaacccgttccccgtaaaatcagttacaacatcaacgtgcgccaccgagttggggggcaacgtgactttgcgggctaaacgcagggtagcagtaaacccttccctcaccgaacaaacaggcttcgactgtgagactgtcacaggagccacagacattcccttaccaaggatggggatagtctccccattcatcaacttgacccagtactcagggccacaaatcaaaggcacttgtgtaacaacataaggggtacccagaagcaggggtaccgatatattctcaactacgccataggtcacgtcgacctcatgggtccccaacctagttggtagggtcacggcaccaacgatgggaagtaccccaccattgacgtcaatcatatggtcagctttggacctccagcgttggagcttcacctcctttggtaatagcgacttgcgtatcaaggaggctcctgacccggtatcaagtacgatacgggcacaacaggcacggccgggggctagttgcacccgtccagccacctggaagtttgcacccgtcagcaccgcgatgacccgacgtgggtttacgttcttggggagtcctacccgaggtgggcggactcccttaggtcgccgcagtatccggcacggctggttcgtcctcctggcccacttggccgaggctgccgttgtgagcttcggacgaccagccccaacggtcattcgtttcccgccgacttggcgtccgaatctgagggcggggaggaagacgacgagtccgaggacgacgtgtccgcctcctccgccgagggtgtggcgaccgcaacgaccggtcgagacccaccctcgcggcgtgaacgtacttcgttcgtagccgactttttactcgcattcctaacaagttgttggatgcgtttactcaacttggggcaatcatatgcccagtgaccatcggagttgcagttccaacaccgatggtccgttccgggaggggacttcccaactggggaagacgaagggataccctgggaagttcccacggcagctactaccctctccttgcggattcggcgtgcctctctcaactctctggcctggcgcgcctcctcccgttccttggccaagtcggcctgacgctcctggcgttgttcctcccgcaacttgcggtaggcctcgcctctgcgataggcgaacctggccaactcggccagggtcgcccgggcagtgttatgctcccgggtctccatccggactgaccaatggagtccctccacaaaccgactcttcaccacagcttgtggatgaagaaacctacaaagattgttgagcttacggactcgctccgcaaaggagaactcgtcctccgcctcttcctgatgggcttgcgtaaactcctcgacttgagaagccaacgctgcctcatcaaccatggctctcatcaaccagttgacgagctccaaataggacgtcacctccccagcgcctccacttaaggggctgggcatgacggacataagttctgtccgtaggtcgcccttcgtaaactcctgtagcatgtaaaaagccatgccttcatttatggcattgtcgtcgcagccttttgtgaaacgacgtaggaactcaaagacacggagggggggagttccatcccactccgctttgtgccgaaaagcatgaagtgcattcttcttggcacggcccatggctcgggcctggtcaggaccatacgccaccgacttgttgtggagggcgtaggtctcacagtcaaagatcctctggtagaccgggttggctacctggatcttgggcggcacctcacgttgagggaaaagccgctgtggcactggggtaagttcactctcagtgcctgtagtccggcgcggcgcgcttggtgtagccgccggcgtttccggggcgaactcccccgtgaagggcgtacgccccaccgagtatggtgtggctccctcgttgggagtcacaggtgtcgcccccagttcggggcgaccagagataggcgtaaggggggattacccctgcgcctgcgggctcgaaagccccaatccggtttggacattaaggccatctggcaaactcgccacaatctgattcagaatagtattcttcatcgtgaccaccaggtccggcaaagtctgccgcaacacattggtcgcctcccgacggacaatttccgcgaggagtggattgacgactccagttgagtcccggtccgcctccgggagtccacctgaggggtaaccacgttcctcaggggtctcaaccgggggcatgggcgcgagcccatcgccgaccaacggaggtccgccgtcctccgaaagcctagttggcgacgactcctagccaaagttggctccaaccagagtggaacccgcggggacagtcctcaccccttgggacgttcccgttgagtataccacacggtggccagacttcggcccacccacatcagaagtgtcacccgagtgaactcccgactgagtcggggtggcctgttgcccgcccgtacttccagtcctgctggcttgagcgacctctagtccctctgcgaccccaggtacacctacctgtgtctcaccaggatttgaaggcactgaagtacgtgcgtcacccgtgtactccccggacgacggggggtccgaactagccatgttggctgacgatccgtatgacacggtccaagaccaccgttcctctgagacagaggaacccctacacccgggtgcacccggaggtaaagtttacctctgtcccctgctgctccaccaaatgtggcaaaaaccactagcacacacggcacccaagttggggcggtgtgctagggctgcctcccgtgtcgggggaaccggaagaagtgcaagtcgcacacactctgtccctgttgtggggcaaaccccccacggacaaacaagaggatggtgtgtggtccaacagtttcttggtcgggacggggacgccgggccaagccccgctgtccctccccttatccccccagggtccactcagaatctcgccactcagaatctcccatcccagcacctgcccaccgggccacacgaaaattcaagacgataaatgcagaaaaccctggaatccaagttggatttactactaagctaactatcccaaacttagggaatatggacccaaatgcagggggaggaacggatcaggctagtggcctgccgccccttgcatggcacgtgttgcccccttacctgggggtcaatactgccacacaggcggccaaggatgaggaggcggcgggccccctcgacggcgccggcgaggacctcgtcgcggccatcacaggcgcggcagaggcgttcagcgtttactgcggtggccgggcggcggcaagcgagacagaggtggagctcgccgcacgtgccaagacggccgctggtctgattggcgtggccgccgcgggcctcccccggcgcgaggctccctcggacgcatcgcgcgcccgcaaggggcggacgcaaaattgtggcggatgtggcaagccggggcacagggccagcttttgcaacgcccctgctggtgccgttccggcagcctcggccgccgtcgctggcccggcggcggccgcgtcaaagtgtcgtgactgccttggaaggggccacagccgcggggaccacgcctgtccggtgcagcggcactgtgggggtgggtcggcggcgtaagaccgcggcgtcgaccccgactgcaaggacccgcggcaaagcagtggacggcagacgcgggcgtgtatcgtgcgggtgggcgtcctctctagggcggtgtttagggacgacaaggacgacgccgaaacgcgtgcggcggtggtgacggtgctgcaagcagagctgggggaactctctggggcggctaccgagctccgcttcctcatgctccgcgtccccggcggggcattgcggcgccttgtggcagccgtcgcggacgcagccggcgacaccgactggacggcggccgtgctcgcaaactggacgcccgtttggccgtgatcggggtacgcctgcgactgcgagggtgcgtcttgcagtcccctcaagaccggcaccgtgtgtgcggggtgtggcaaggggtgagctaacacgcggttggcgcgcgcccactccgtggtgatgaagagccacccgctgctggcagaggcgctctcctacgccttgacgcaggtgatggccgtcacggcagccgcatgtgacaggtaccttccggcaagcaaaagcacggcacaatgggagcccgtcgcaaccatcggggccacccatgccgagcggtgggtgaaggcggcgtgtcgcaaactgggcgccaaggcggtctaggacgtgctggccacactccctgctgccactgctgatgcgcgcggcgcctgcggctctcgctgggacacagagcggcggctaacgcggtgggcggccgcgcgcttccgtgcgggtgccgcgagccaggcaaggccgggccggtggggcctcgacagcgtctcccaaaacctcgtccaggcgctggtgcaacgggtggccgtcatgtgggcggccatgccaccctctgtggcgagcctctttccagcaacgcctgcaaagaagcgccgctggtggcgtacgtgccgtttctcctccacgtcctgaatgtgggtgtggatagcccgtacgccctcatcccgggcgtccgggatgtgcatcaggggcactgcacgctggagccgagaaagatgctcgcgctgtagcgggcagtggcggacgccacaggcgtgggggtgcgtggccgacccagtcttcgggcatggccagaactacaaatagaaggtgcagcagtgctgaccgccatggctggtgtcggttgccgcgccaaccgtgccgcctcccagctgtctacccacggcgaggccgtgacgtaatttctgtcgcgacccgacacggccccagaggccgaggcgcgggcggtgccctgggcaaagaagctgtgcggcggtagacctgcacagggctgcagtgtcaatggctttgcgtcccgggagggggcgctgacgcagctggggtaggctgccctgccgttggcgctctgttgaggctccagacggtcggcggagacccagaacggtctcccgtattgtcgggagccgcgggtgagcgcgtggcgacggcagacctccccgcccgccccgtagttgacgcgatgcgcgcctcgtgttcccgccctatgggcctggccgcgctcaaccgtggcgctactgcgtggtgcgggcgtccaagacggggtggcagcagacgaaggcatgcccgggggccgcttacccagtgggtctaggaagcgggcggccgcgggcgccccggctgcaggggcggcgagaagagggagggagcgctccaagcggcaagcgcggcggtcgtcacttgcgaggagcaatgatgcggcggcggtggccccggcagcgggaggtgaggcggcggcgggtgcggcgccccccccggcgatgacttaccagacgggcagccccagcagtggcctcgggcgtgtgcggcgagggccacaggcgtcgatcgaacggggccgccgcacccagctcgccacttcggtgcggcgcgtactgcgtctcacgcgcctgtcccggtggactgtgccccgtcacgaggcggaaaagatggcacggtggctggtggaccccactgcctaccgcgagcggttcggcgcgaatgccacgcgacaactgcaggcgatgcgtgtgcgcaaggccatccagcgcggccgcttcgctggcttggtggcgcgggacctgaccggcggcctccttcgccaggtccgtggcggccgcgcggtcttcgtggccatgggcagcgagcacgtgcgcgcgggggacgcctggctccgccgctacctccgaccgctgtgccggtttatcgaccaggacgacttcaacacgagccaggcgtgctcagagtgtcatgaaaagatggtgctcatctactcgacgggcgtctcccgccccaagattccaggggagcagtatgggccacccatcggcccgctgccgtcgacacggcgtgtgggggtggcggccagatcgcgtcgggggcggccaaagcgggccatccactctgctacccacgtgaagcggcgaggggtgcaccacgacgcctaccgggcggccttcccagccacttcccgttctgccgctgtggcgcgaagcgcggccgcgctggccgcctgtgccgttgaggaccgcgccgtctatgctgacccgagtgtggtataaaactcgatccgctcagacacgtgtctatatccctcggggaaaagggacaggtaacacagaaagaggaactaagagagtggtacgcctgttgcctcccgttcctgtcggcagggccaccagatacgcacggtagtgtacacggggaagaggaaagcaaacgcgcagttgtctttttccttgagggcgcgggccaagcgcgcctcgcagtccctctcaacgtgcatctggggaagcctcggcacgttggccaggtagccccctcctacccccgagtgttcccgacccgaatctaacctcgtcaggtcgggggccgctatcgcaactaattctattctccctcattaagctcacactcaatttctatcaggtcaagtcccccacaaatatgctgccacccatcagaagtccctctctcacgtgtgcgtagcgtagtccaccgcatccccgtgccgggcacaagctacggccgccaaccatccccacacggcgggcgtgttctggcacctggtgtcccctggtcgccttctcgggtcgacgccaagtcagggccagggatgctacatagctccctccctagtccggcacgtcctcgggccgtaccaggttccaccgtgcacagcctcgagcacgcccacaccggtgccgaggtcgagcgtccccaccctgcgccgtgatcaccttcctcttgcccccgcctccttcttccttcatcttggccttcccgttccccttgggttctggacggcatttccagcaccgagattcaggttgggcccgaggctcctgtggcgggtcccgcggagaagaactcgggtggtcttgcccctctcctgcctccggttcctggggtgtcggcgcggacacccgtcgtcacagcggaggatgcggatccagagcccccggctccggcgtcgcgcccgatcgagaccccccccgtgggtctcccggagatgcttatcggtcataatcccctggcggcccggcgctacaccacggtggtcgggaacgtcagcacttgacctgtgacctccgtccagagatggtcgctcgggagccgcccttcttgacctcgaagtactcaatgctgtcgccggctcgtgagcaaggcgagcttcggaggcgccaacgggactacatcgtaagctgcaatcaccaagcgttctggaagctcgacatagccaaccaggcggcgcactaccccacgttcatcccgcagcagcatgaaattgacatcccggttgtgttcgcaccatcgaacatccccttcacctggtacttcttggacgccctcaaccaggcgtcgatcaagggcttctcccactcgatcccgtacatgatgtacacctccgagatgacggtcttggcggccaaccactggcttcacgaggtcttggtgtccatccggctctggctcctctcgaatctcatgattgtctgaattgtcgagaagctgacggtcgacttcttgtgcagccaggatgtagagtacaaggagctctttgtggggtaaaactcgatcctctcagacacgtgtcaatatccctcgggggaaagggacaggtaacacggaaaggggaactacgagagtggtatgcctgttgcctcacgtgcctgcttgcagagcaaacagatacgcacggtagtgcacacggggaagaggaaagcaaacgcgcagttgtctttttccttgagggcgcgggccaagggcgcctcgctgttcctctcaacgtgcatctgggggagcctcggcacgtcggccaggtacccccccatacccccgagtggccccgacccgagtctaacctcgtcaggtcgggggccactatcactactaattctattcccactcactaagctcgcactcaatttctctcaaatcaaatccctcacaagtatgcaaaaacccatcagaaatccctctctcacgtgcggatagcgtagtccaccacatcccagtgccgggcacgggccacggccgccaaccatcaccacacggcgggcgtgctctggcacctggtgccctctggttgcagtcccgggtcggcgccaagtcggggccagggatgctacactcttccaagcgatgatcgacttccggcgtcaactcccggtgcacgacgggacattcttgagctcgatcgcggataagaatagtccgcgtcgggatggctcgggtgtggtgcaggtaatcaaccagacttctcctgccaaggtgcagctggcaatgccgttgccggcgtggccgcagctgggatgtcctcctgcgccggccgccttggacctgctgccacctggtccggcggtacaagagtcggggtgagctgcggcgattggtcgggcgtctgcgagtgttcaagttcctctggttactcctgctgcaccggtggcttcgccttcgcctttgccggcccttgcgcaccaggcccttcctccaccggttcttcaggttcctccggcatcgtttttgccggctgcggctctcggcgtcgctcccggcagtaccatccggtcgcctgctaccccaggcgctcctcctcgtgtgacttcctcggctggtggcgtctcggtgcccaccctcgagttgggtagtcctgtttccggcgtcggtcctagccgtccgggtgtggcgtcatcaggtctgtttgaaactctggcgccgacgctgcgcctttcccgcttccgggtgcccgactggtacctgacgcaaggtggcctgtcgtgtgaccggtacgatgtgggcatgattaaagatcagctgagccgacttccggtacaggttgagggcgtcgagtcatccttggtgatgtgcacgtatgccagcgtcttggacgacgtggtcgacagcgtgtttgcttgtgcagacagcggccagacgtcggacagtccggtggttgctgaggacctttcgaccttgacccggcatggcttggcccagggctggtcagggaccttcacgagtttccaggagcgtcggcgggtgtacttggaggagcgggagcatccggtggtcagtagtgatgttccgttagcggagtacgtcgaggcgtcttgaccgctggactacgtcatccggtcatcctctgggtcccgtcgtgctgctgacgaggcgctggaggacgttcctgcggcgcagcgcgcgcgtcgggattaatacttgagggcgaggaaggtaggagtcacgggagaaaggaggagagacagcgaggcggagagacgggttgctcgagcgggtgcttgctggtttttctagtagttccatgctcgtactgcttgcttccttgatacacaagttcccttttcttattcttcttgttccgcgtccgttgcggccgagctcgcttcgtccagcaaaccccggtcagctccttccttctcgtcatcctccgagtccgactctaggatcttcccagccctggccaccggggtgccctcaatcctgttccgccgtgcgtaggcgcagacatcagcaatgggcaaccggttggagggctccctggtatcattagatgggttaataccgaaccagcgcacccgcaggtacaggcgtccctccatccaggcatggtctacaaacaagacgtagacgtattctcggccttcttgtcgggacaaccagggtactgcggcgcgcttacgccgggtcaagtcccgcttgcttggcggtggagctcgagtgacgtggtcactgctcaccaagtacggagatatccacgtctcggagtaacttccagccttccgtgctcagggtttcaaaaggcccatccgtcgtggagtccagcttcccccgggtcttgctggagttatccacgaaaaccgagtcgccatcacccagttcctcgttcttttcccggacacccttgtcatagtcccgcttgtatcgctcctggtttttcgagattgactccttgactcgtggtgtaaggagctttagttgttccagaaactcatccttttccttgggcccggcttcagggcaggctgtgcggcagtattgaccccccggtaggcggcaacacgtgccatgcaaggggcggcaggccactagcctgacccgttcctccccctgcatttgggtccatattccctaagtttgggatagttagcttagtagtaaatccaacttggatttcagggttttctgcatttatcgtcttgaattttcgtgtggcccggtgggcaggtgctggggtgggagattctgagtggtgagattctgaggggaccctcgggggataaggggagggacagcggggcttggccttgcttccccgtcccgaccaagaaactgttggcccacacaccatcttcttgtttgtcagtggggggattgccccacaacagggacagagtgtgtgcgacttgcacttcttccggttcccccgacacgggaggcagccctagcacaccgccccaacttgggtgtcgcgtgtgcgagaggtttttgccacatttggtggagcagcaggggacagaggtaaactttacctccgggtgcacccgggtgtaggggttcctctgtctcagaggaacggtggacttggaccgtgtcatacggatcgttagccagcatggccggttcggatccccggtcgtccggggagtacacgggtgacgcacgtacttcagtgccttcaaatcctggtgagacacaggtaggtgtacctggggtcgcagagggactagaggtcgctcaagccagcaggactggaagtacgggcgggcaacaggccaccccgactcagtcgggagttcattcgggtgacacttctcatgtgggtgggccgaagtctggccaccgtttggtatactcaacgggaacgtcccaaggtgagaggactgtccccgcgggttccactcgggttgaaaccaactttggctcggagcagtcgccaactaggctttcggaggacggcggacctccgttggtcggcgatgggctcgcgcccatgcccccggctgagacccctgaggatcgtggttactcctcaggtggactcccggaggcggaccgagactcaactggagtcgacaatccactcatcgcggaaactgtccgtcgggaggcgaccaatgtgttgcggcagactttgccggacctggtggtcacgatgaagaacactattctgaatcagattgtggcgagtttgccagatggccttaatgtccggaccggattggggctttcgagcccgcaggcgcaggcataatccctcctcacgcctgtctcgggtcgccccgaacagggggcgacccctcggactcccaacgagggagccacgccattctcggtggggcgtacgcccctcacgaaggagtttccctcggaaacgccggcggctacaccaagctcgccgcggcagacgaccggcactgcgggccaactcacccaattgcctcagcggcttttccctcaacgtgaggtgccgcccaagatccaggtagccaacccggtctaccagaggatctttgactgtgggacctacgccctccacaacacgtcggtggcgtatggtcctgaccaggcccgagccatgggccgtgccaagaagaatgcacttcactcttttgggcacaaagcggagtgggatggaactccccccctccgtgtctttgagtttctacgtcgtttcacaaaaggctgtgacgacaatgccataagtgaaggcatggctttctatatgctacaggagtttacgaatggcgacctccggacagaacgtatgtccgtcatgcccagttcctcaagtggaggcgctggtgaggtgacatcctatttggagcttgtccactggttgttgagagccatggtggatgaagcagctttggcttctcaagtcgaggcgtttacgcaagctcaccaagaagagactgaggacgagttgtcctctgcggagctggttcgtaagctcaacaatctttgtgggtttcttcatccacaagctgtggtgaagagacggtttgtggagggactccattggtcagtccggatggagacccgggagcataacactgctcgggcgacactggccgagttggctaggttcgcctaccgcagaggttaggcctaccgcaagtttcgggaggaacaacgccaggagcgtcaggccgacttggccaaggaacgtgaggaggcgcgccaggccagagagctgagagaggcacgccgaatccgcaaggagagggtagtagctgccgtgggaacttcccagggtacctcttcggcttcccaagtcaggaagacccctccgggaactgacaatcggtgttggaactgcaactccgatgggcactgggcatatgattgccccatgttgagcaatcacattcaacaacttgttaagagtgcgagtaaaaagtcggctacgaacgaagtacgttcacgccgcgagggtgggtctcgtccggtagtggcggtcgccacaccctcggcggagggggcggacacgtcgtcctcggactcttcgtcttccccttcgcactcggattcagacgccaagtcggcggaaaacgaatgaccgttggagctggccgtcctaagctcacaacggcagcctcggccaagtgggtcaagaggacgaaccaaccctgccggatactgcggcgacctcagggattccgcccacgtcgggtaggactccccaagaacgtaaacccacgtcgggtcatcgcggtgctgacgggtgcgaacttccaggtggctggacgggtgcaactagcccccggccgtgcctgttgtgcccgtatcgtacttgataccgggtcaggagcctccttgatacgcaagtcgctattatcaaaggagatgaagctccaacgctggaagtctaaagctgaccatctgatcgacatcaatggtggggtacttcccattgttggtgccgtgaccctaccaactaggttggggacccatgaggtcgacttgacctatggagtagctgagaatatatcggtacccctgcttctgggtaccccttatgttgtaacacaagtgcctttgatttgtggccctgagtactgggtcaagttgatgaatggggagaccatacccatccttggtaagggaaagtctgtggctcctgtgacaacctcacagtcgaagcctgtttgctccttgagagaagggtttactgctaccctgcgtttagcccgtaaagtcacgttgccccccaactcggtggcgcacgttgacgttgtaactgattgatgatacggggaacgggttggtgcacccttacccccgtcttgctcgcaagcaccaagtgcatgttgccctgggcacgatggactccaaagccggagtcccgtggaggatccaggtgatgaacctgagctcttcgcccaagtacttcaagtcgggagccaagttcggctatatcgaccaacacgagggaccagtagtagcggtcaccctcaacgcgggcgcaagtagcgacccgaactccgggtaggagaagcaccaagccaagcaggccgccactcctcggccccatgtgaacatggagaatgttccacccaggttgagggttcaagttgaacgcctcttggacccgtatcacaagttgtgggatggccaattgggactcatgagagccacccaacaccggatcgagttgaaacccggtgcaccccctatacgccaacaaccgtataggggagggccccgttctagggccctcgttaaggagcaagtcgctcgcatggaggccctcgatgagaccgaggccagcaaccccgtgtgtgcgagtccggtggttattgtccccaaagttgatgggaccccacggttctgtatcgactaccgtaagctcaacgagagcacgttaaaggacagttatcccctacctcggatggacgactgtctggactctctgggggaggcaaaagtgttctctacccaagactgtaacgcggggtattggcaaattcccattgccccggaagacaggcataaaactacctttacctgtcactgtggtacctaccagtgcaagcgacaaccgtttggactgtgcaacgcgccagcaactttgcagcgcgctatggacatgattctggccggagtacggtggcagatctgtctcgtgtacctagacgatatcattgtgttctcccggagtccggagaagcacattggccatcttggccaggtgttcaagctacttgcggacgccggtgtgtcactgaaggcgagtaagtgccacctcttcactcaagaggtggaatacttgggacatgatgtccgcccggggcgcctcagtgtcaacgcgaggaacttgagggccatccgtaaggctcagtacccccggacccagacccagatgaggagcttcctcgggatgtgtagcgtgtaccgacgtttcaccaagggcttcggcaaggtggctaagccactgactgagctagttagctcgacgctaccgaagaacctgccttccccaagtcgggtggagcaggaaccctttgagactcttcgggacctactgctgaagccccctatcttggctattcccaggttgggaggccattacatcctggacgtggatgctagctacggccaacttggttgtgtgttgcttcagcagcagccggacaaggagtacttgccggtgggatatttcagcaaggggctgaactcggatgagaagaactacggagtcaccgagttggaaggactcgcagtggtgtgggcggtgacgtcacttcatcactacctagagggtgagaaggtcctcatccgctgtgaccaccgcgcgttgcagttcaacttcaagacggattgcacgaacacccgcctcaacaggtggagggtacagctggcaccctgcaactttgatattgagtaccgacctggcaggcaacatgcccttgccgacggcctctctcgggtacctaccgaggggctggacaccaactcagtcgatgaggacatccccatcgtgggggtagtcacgcgctcgggtcaggcgttgaaccccgaggcgccagggaacaagaagtacttgcccctgtccctggacgaggtggtgaacgcccaggccgaggaccccttctgcaagtcgcagaggatacgctggatacggtggcggagacgcggttctttatcggagacgatggcctccttttgaggagggaggtaatccaggggaccgaacaacttgtcgtcctcgcatccctcaaggacagtattttgagagggagcataatggacatccttgggcccctgccagtgaccgaggagggcgaccagtacctcccggtcatctgcgatcgcttcacgaaacttacgcgagcgatccctctggcagagatcacggccatgtcggtcgtgtcagccatcctagatcactgggttgccgcgtatggcatcccggacagtacactatcggacaatggaccgcaatttgcgtctgtactgtttcagggagtgctggatatgttgggggtgaaggcaaactatgccaccccctaccacccacaaactaatgggcaggtggagcgcttcaacaaaactattgttaggcagctgcgccactatgtgagtgagcacgtgaagacgtgggaccaatacatttctatccttactactgcctacaattcgcaggttcactcatctacaggggaagtacccctcgcttttgtgaccccccgtcgcgtgcggtctattgccgtgcggcggtcgctcccaactagggaggatggtggcagtacgcctactcccactgagagtaaggcgaagttcgctgctaggcttgaaaacctcatccctaaagtcagggctgagatggacaaagcacaaaagcgctacaaacgtacctttgacaaaaaggtgcgcaacgccaagcatgtccccgagcagggtgactgggtgctggtacactcacacaccccaactgggggtaagttggtattccagacgaaggggccgtaccaggtccttcgtactgatgggcggcgcttcaccatcgaaagtgacgatggagtccgcacagtgaacgga

SEQ ID NO: 10 - DNA, 21869 bp, unidentified
  misc_feature 1..21869: note = Fanzor polypeptide
  source 1..21869: mol_type = other DNA
cggttaatactcatgaaggtcaaccgtccttggtccgtcacttgccgcatggatgaaggtttattttggtgtaagcctcaggttactttgaaattatcggagttagtcatcttcttcaagtaagcttgttaaagtcagtagccctcttaattttcctaagtccgctccaacttagtgagcctcagtcttgccgaatccatgtgacaccctacttagtaggtacaagcctcacccccaaacagccgaagtcggtgtcggttgggttgtcacagtaggcgtcgtcgcctcatgtaaggcataagaagttggcggggtgtatttgccgcctgttccctggtgggtgagtcgtatccgacccacatcatcttgacgtaccagggtcctggtaggtccgggtcggtgtgtccgaccacgctctctacttggtatgggattccatccggtcccaccgggtcatccgaccggtgggttgtaagagcttcatgtagcaatccagccggtaccggctgaggctgttccggcttcggagcaggtgtcacatcgttgagattgatgcgttgtatctccgtatcggagtgcaggatgacagagtgatcatctctgtgtaagatctggtacggtcctttgaccgggtgcataagcttgttccctcggaacttctggtgtatgatgtagacccagtcacctgttaccagggtcgcgttgcgtacccgtagtcggacgtcgaagttcttcttgtatcgaagttgtgtacggtcaagggcacccttgagcttaggtaccatccacgatagcttggccaaccaagctaagtggattcgttctgccggtcggcccttcggtatgtcataccgagtgcatctgcccggtggcagcgtcaggttaccgacgcccattggcataacccattccaatggagcaatgttggtactccggtggggcctcgcattgtatgccagggtcaatacggacagaagcctttcccacgtgttggtatgttcagccacatagcattggagcatcttgaaaatggtgcggttgaactgctccacctgtccgttggattgggggtagtagtcggatgcccgacgtggttcgataccgaacatgcccaggaccttagtgcagaatgctgacgtaaggtttgctccgttgtcggagaggagttgcttcattactccgtaagcactgttccagtggtcaaccactgcgctcatgatcgtgtaggccgtgtcgttcgggatcgctactgctcgtgacagcgtagtaaagcggtccgacatgaccaggatgtacctgttcccttcttccgttatcggaagtggcccgagtatgtcgatagcgacttgctcgttgggcccattaggtgggaatagcttcatggcagacgcccgcctatgtagactcatgcggttacgtgcacaggggtggcatccccttacgtggtcgaccacgtcaacggccattgctggccagtagaagaaccttcgcattgctgcgaacatacgtgaaccccccgggtgtccggctgtagggttctcatgttctcgtttcatgacggcttgccgtaaggacacgggaaccacgacttgatgtcgtccatcggcgggtgcccgccggtatatgaggccgtcctcattctcgaagaagatgccggccgtgccggccaggaggttagcgcgatggcgtttacagtcatcgtcattggcctgtgcctcgcggaagtccgcgagggttaatgggcacgcaaggtgtgccatggtatggtcaaccataccttgggtggcgttacccaccatgcaaaccggtactaccgggatgtcctcatccacctgtcgggtatccccgcttggtgtatcgagtcgcgaaagcgcgtctcccagatgatgggtagagcccgccttatgtatggtccggtagtcgtgcttggccatcttcagcctccaccgggctagccgaccgtggctgtcggaatccttgtcaccaaggttgagaagccatcgtaaaggttcgtggtcggaccttacgatgaacctggaaccttcgaggtatggctggagcagttgcactgcccatatgactccgaggcactcgcgctcggtagcactatagttacactcagccgggttgccttatacatggtccggtagtcgtgcttggccatcttcagcctccactgggctagccgaccgtggctgtcggaatccttgtcaccaaggttgagaagccatcgtaaaggttcgtggtcggaccttacgatgaacctggaaccttccaggtatggctggagcagttgcactacccatatgactccgaggcactcgcgctcggcagcactatagttacactcagccgggttgagtgtccggctgaagtaccctaccggttgtcggtccgggatagcattttctgtaccgatgattgtgtctccctgtaacagggtgcattctacttgggtatcgcaggcatcgacgtcgatgacggaggtcccgagtctatgcggcaaggcaagcacgggtggggctagcagagcttgcttgagcagctcgaatgcctctccctcgttgggcgagggaggttgtagtaccttgagcaaggcgctgctcgtcagaaccgttaacggtttggctacacgagcgaagtccttgaagaaccgtcggtatacgttgcacatccccaggaagcttttcagctgtgttggggtggtcgggtatcgcgcatcccggagtgcccgggtattagcttcgagcactcccagcttacctggggtgatctggtgaaccagatactcgacggtctgctgaaagaaggcgcacttcttgaggcgcagggttaccccggcgttccgcaagagggtgagtacctcgtcgacatgttgtgcatggtcatccatgttacgcgagaagacgatgacatcatccaggtacaccaggcagttacgccaactcactctcgacagtataatgtcgatggcccgctggaatgtggcgggggcgttggacaatccgaagggcatccttaggaactcgtacactccactgtgacagacaaacgctgtcttggggatatcctcctctgcaactgggatctgccagtacccagcgttgcagtcgatagtggtgaacactttggcctcccccagcgagtcgatgcactcgttcatccttggtaaagggtatgagtctttcttggtaaccaagttgaggcgtcgataatcgatgcaaaaccgaggggtttgatccttcttcggtacgatcacgactggggcgccccactccgacatcgaaggtcgaatcaccttagcttcgctcatcctcttcacgtctccatcaacgatctctcgttgcataggtttcgcgcgatgctgttgagaccgagctgggcgtgcccctggtaccaggtctatacggtgttgggttgccccaatggtacccagagccccgccggtccacatgacgtcatgctttcttagcatccgtcgtaccccgtcggctatcgaagggggaagatggtcgaggtcagcctcggccagtgccttcaaggcttcttggtcctttggcggaatgtccgccggagctgttgatgggctaagtttcccgacgtcgggttcctcccgctcggtggtctcggtgaccgacagtacctcaagtggttccacttcaacttccatgtcaggggtaaggatgtctccttcgtagagctcggcgatcccgaggatagttcctttcggaagggtgactgccttacggcgatagttcgccatcacgagcagtgatgaccaccccgctgggaggtctacgataccgttggccatggtcaacccatggcgcctgtaggttcgtaggttggactggactctgcagatgcctgcgaggtcacagttaaccgggaggacggtctctgataacggctcaaagagagtccgcttggccagccggagtgtctttggttctacgcttgcgtgtacctcagccacgttaacgtggctttcttgtagcgtcaggtccctgacgatagctgtatgtcctctcttcgtcccgtcggcctcttgcagctcgacggtcctccggcccggccggattgcatcaacgtgaacgttgatgaaggtataccccaacatgcaggccacagatagagtctcacacaccaggaggtcgacttccgtggtgagctccccgattgtaaccctcagcgacaccgctgcggtcgtacgcatgagacgaccattcgcatccttgatcgtgggtccccgagcaactctgactcgcgggagccacttgtccgggagggtatccttctggatcaacttcggtccagcccctgtatccagtacagggtaatacgattgggtcgactggaggtcaacccccagtgtggctgataccttgaagttctccaaggtgaacagtacgtggcctacaccgatatccggtgtagctcgataaacctggacagggcccttggctggttcagcgtgacgggacttcccgtcctctcctcccaaccttggagtgtggtcatcaatcccctgacgccgtgtcgtcggggccggaaggagtacccggggattgatgcggcgtcggctctaccgcgctctccgtggggctctccccgcggcagtccggggtggcttgctagggttgccccagcgaccccgggtcgtccttcctcttactcgtttcccgtgctcggccgagtactatcttccgggatatccgggagaggaggtgcctcctcgactgccagtactcctcctggagcttgctgcctacccggtgctggtgctctggcgggataccccccaatggatgctttgcgttgcgccgctgcccatcgggactcctccgggaagagcgggcatgaggacacccagcgttgggggtctccgcacagcatacatccggaagtgccggccgtcccgggcgtccgcgtcgggttgactccataggtctggttgcctacatcgggcgcccgagtgcctgccccttggtaggccttaggtcccggtgccaagcggaacatggactcccccagcaggttggttctaccagcgatgtgcggaggtgcctccgtacgcaccccccatgtcggcaggggttggcgggggttatttgtaaccggggcataccccgtagtccgcacatacgggaggcgccgacccgctccctcgttgacctggaactgggtcccagcggtagcgatgtacgctaccgtaccttgctcatcaatcaccggcgtcgccggtagcaacaggtggccatgttcgtcgactagaggttcatcctcacccgtgggggcatacttggtcgccaccaatactggtgcggccttacgttccaccttctcttgcctcgggtaccggggtaagattgagcttgctgccctcacccttgggctttaaggcaagagcacactccgggtgaagcacccggtaggcgtcccccagggacttgcacatatgcatcagtcgactgaagttcgtccgagccgtgttggctccccgtgcggatatccgcacagagttgggtactcctgcgaactggatggcccgtagctctccttcgccgaggagcttccccagctcgtagtcgagctcttggatccggcgtccaaacatctcctcatcctccgaggactgggcggtggcggtgcgaagggcccgatagtggtcttcgcacttatcctcactgaggtagctgctaagcagctccttcagtataccacggtaatccatggcggtggctgcgaccctcattcccggcatcggagatgcctggcgaaggatgcctcgtacccgttcatcaacaaagaacgggaggatctccagcgccagcccctcgttgacgagtgccttgtctgcggctgccttgaagctagtcaggaagccaatgactgcgaacgggcgtccgttcgggcccccgaacatagagactccctttataagggtctgcatagagcagatcgctcggtgcgaggtcgtacgcatcgattccgatacggtagtggatctgtcttccaaacgataacgttcaggagtcagtaccgacctgaagacttcgttgacaatctgcgtgtctgcgtcctggttatccggtcgcttggccagttgatgagtaaactcatcggactccatccgcttcagtaagctcgcagtaacctgcgctgtcatcgcttgcaccagtgacgctggaacttccggcgtcggcgcctcgggtacccgagttgcctagcttccgtcgtcgagggggcaatgcgagacggtaccgcctccccccatcgccgactctgttccggcgtaagtatccgccggactatgtccgcggagcccgctctgggtgctccgagcgtagcgctccgtattgctacgttccaactcggctgacgagtcatagcccgccgtattcgggggttgtccatgagtagcaataccggggtcgaccctggtggactccgaaggtagtccggctggttcgaaccgtaccggtgtgggaggaacacgacggggtaccgtcgtgtggcgtgctgacatcagcacagccattgcgttctccgtacgctcttgacgggcgtcgagcccggtgaaccgggcctcgatgcgagccaatgatgctatcagggaatcccctggtgaaggtggcggcggagtgaggtcggcagaggacagttgaggcggtccgccgctcccggcggtccgtgccgtaccaaacgttgatccggcaccggagagcatcggcgtctcaatgttgtcgatcggattaccgatcccggttcccgcgatcagctccggggtcggcgttgacgccgatacgtcatcttgaacgttccccatctcttgggtagacaccatcacaatcagtcaaccgacgaaatggtcaccacgaataagagagcgaggggggagttgggggagagtaacagtagatcgaagtcaaacgcaaccactcaacacaatcaaacagatcgcagcatcacgagcacaagaaaaggactggatccctatccgtgtgccagggccgaaaacggcgtcaccagaagggtgacgaaaatgcgtcccttgctgctccaccaatgtagcacaataggtatccgctgcacgtccactctcagggaacactcaccaagggggatcggcaccaacgtcaccgggaggccaaggttgctgtccgtgaagcgcaagccatgggacccagatgggaacccaaatgggaggggtttgttgttctaccatggccggcggcggattcgccaccggccccttcgttataaaccctcggagacactactaactaccctccaccacaagatgcaagtccctctggtcatacgtaacttatcgataccgtgaccaatacggactcccaaattgaaagttaagggttagaagtagtccccctatactagggtcacaattcggtcatccatattgctacaccctctcgaagtaccacacggccgtcgtgaagttcacgaccgacccagacgaactggcgaagtgtgccatcgtccttgggcccgcgggaggagcggcccaacttgtgctcaatgctcttccactcgatgagcttatgaagacgcagcatctcctcaagtagagtgagctgtcctgatgagcacccctcagcaactagctgaggggtgagctgttccaaaccttggataagccggaggggaagatgccaaaggatcccccgccgctggacacaggacacccaggtcgacatgacctcgaggagccactgggtggccaacatggcccacaccaggtgatctgggctagccgtcatcatgacggagccgaagtggtcgagcaaccgtggcagcaacgccggaaacccgtaggggacatcaacttgaggccaccactcgggcttcttcgggttgtactgctccttactgccagcggactgctgcggaaactcaatttgagccgaggtcaccaagtagggacctcgccggaagtccttctccatccgcacagcaaagtgatgagtgtgcggatcggcctcgtgaaggtacggagggcgagttgccaccgcgtcccaagtaaaggccggcaagtcgccaggacccgggatagttcccccgcggtccaccatggccttggcccgctgcacgtcttcgacttcgtcctcgtccagaaacgcaaactggtcagtcttgaagtcgggaggaaacccgatcctacgggggaacttctcccgtaggcggtcccatacccgactcatcgctgtgccaagtcggccacagcggagaacagtgaacccctcctcatacagaggccacgcggggtaaaactaccgtcccatggcctcccgtgaaatgacgcggcccatctcctcggaagatcccgccgccaacccaaagccaggtgacgcgggagtcccatcccccggagcgatcgcggagcccccgccggaagtcccggcgggcgctacaccgtaggaggtgtcctccatgcgttcgtcaagggagtccgtctccaccccaggggtcgccatggccctccccaagtttgggagagacgccctggttgcagcggcacgagacccgcctcgagttgaggggggctcggatcgtgggtagatgggtggcctccccagcgtggggcggcccaggggaaggtgaaggggatgtggtggtggtgggtaagtgagaaccggggagagcaagctgcccagtgggcaagcttgaggagaggggcggtcaacgcgaccgcctccacatccgcgttacttactcgagggggggacagcaagtcgcgcccccaacgccgagacgtgcgtttacgcaccccctcacagggccgaccgggtcggtcggaactgaggagaggggagtgtggcagtattgacccccaggtaggggggcaacacgtgccatgcaaggggcggcagcctactagcctgacccgtttttccccctgcttttgggtccatattccctaagtttgggatagttagcttagtagtaaatccaacttggatttgagggtttttctgcatttatcgtcttgaactttcgtgtggcccggcgggcaggtgctggggtgggagattctgagtggcgagattctgaggggaccctggggggataaggggagggacagcggggcttggccttgctttcccgtcccgaccaagaaactgttggcccacacaccatcttcttgtttgtcagtggggagattgccccacaacagggatagagtgtgtgcgacttgcacttcttccggttctcccgacacgggaggctgctcttgtacaccgccccaacttgggtgccgtgtgtgcgagaggtttttgccacaccgagggggcgagaagcagcgccggttggggggtggcggggggggggggggggggggggaggggggtgcgggggggggggggttgggacggggggcggggggtgggggggttggggggacctggactgccggccttatgacggcccgtggagcccatcgccagcgtctacagcacgcgtacggcgtcgagtgagggccccggcccggatggggcctttccagacgataaatatggcgctaggcggtgcccttcggttccccatctttgccgaccccgtcagccaccgtcgacaatcccacccaccctcctcacagtcgttcccacacacacaacccgctcatccgcctccgccccccccccctccccccccgccccggactcacgatgagcgacgaagacgacggcagcgaccaagatattggcgtcgacaggctggccggcgacaccacctcggacgaggagtgggacccggcacaagagcaggcgcgcgttcaatacgcacgcaacgtggtgactgtggcagtattgacgcccaggtgggggggcaacacgtgccatgcaaggggcggcaggccactagcctgacccgttcctccccctgcatttgggtccatattccctaagtttgggatagttagcttagtagtaaatccaacttggatttgagggtttttctgcatttatcgtcttgaattttcgtgtggcccggtgggcaggtgctggggtgggagattctgagtggccagattctgaggggaccctggggggataaggggagggacagcggggcttggtcctgcttccccgtcccgatgttttttctgtctcgacccgacacggccgcagaggccgaggcgcgggcggttgcctgggccaagaagctggacggcggtggacgtgcacgggaccgcagcgtcaaaggctttgcgtcccgggtgggggtactgacgcagctcgagcgggctggcctgccgttggcgcgcgtccggtggctccagatggtcggtggagacccgggacggtctgccgtactgtcggcagcacccggtgagcacgtggcgacggcagacctccccgcccgccccgctgtagacgcgatgcgcgccgcgtggtcccgccacatgggcttggacgcgctcaaccgggcggccgtggcgctcctgcgtggggcgggcgtccaagacggggtgacggcagccgcaaccatgcccgagggccacccacccaggggttctaggaagcgggcggcggcgggcgccccggctgcaggggcggggagagggaggggccgctacaagcgacacgcgcggcggtcgtcacgcgaggggagcgacgatgatgcggcggcggtggctccggcggcagcgggtgcgatgacgccccccgaggcaaagacctaccagacggcgagccccggtggtggccacgggcgcgtgcggcgggggccgcaggcgtccatccgaagggcccgccgcacccagctcgccactgcggtgcggcgtgtgctgcgtcgcacgcgcctgtcccggtggactgtgccccgtcacgaggcggagaaggtggcacggtggctggtggattccactgccgcggcgggcaacagtgccagtagcaccaccccaaacgcgccgctgcaggaccaggtggacgcgctgccccggcgcaaggtgtgtcgtcgactggcacccgtctccggccttcgctacagcctgagtgccgcccactttcgcgaggccagcggcggtaactttttggcctgtgcgtggaagcagtggcgggcacgcagcggtactgaggcgggaccggtggcggcgccggtggcgggactggtggcggcggcgggtgacgaaggcggcgtcgctggccacctaccacccgtcgacttggcagcagcactcggcacgatgcgtactagcgacggcaggaaacacctgcaggcaacgctcgagtgggccgcgcgtcgcgacacggcctcgtacgtccagcgatttggcgcccaagccacgcgacacctgcgggcgacgcgtgtgcgcaaggccatccaacgcggccgctttgctgcctcggtggcgcgggacctgaccggcggcctccttcgccaggtccgtggcggcggcgcggtcgtcgtggccatgggcaccgcgcgcgtgcgcgggggggacgccgggctccgccgccatttccgacggctgtgctggtttgtcgaccaggacgagttcaacacgagccaggcgtgctccgagtgtcacgacaagatggtgctcatctactcgacgggcaactccctccccaaggtgccaggagagctggatgggccgccgcccggccctctgccgtcgacacggcgtgtgcggatggcggctggtatgcgtcgggggcggccaaagcggccccttcctactgctacccacgtgacgcgccgagggccagaccccgacgcctaccgggcggccgtccgagccactgcccgtgctgctgctgtggcgcggcgcgcagctgcgctggccgcctgtgccgtcgaggaccgcgccatctatgccgacccgaagccgctgagcgagtgagcggccaagggctgctacacgtgctctcttgcggccccacaaggccccggtcacccagctccacacccgcccgtgattcgcaatcgggacgacgatgcggcccgcaacttggcgtgagtggccgctcgtcgtctaacgggtaccaacgtgtgacctttcaagcgcccgtttggtatccgttgggcctggacgaccaagcgtcctcccagtggtgtgcccgtcccgcccgtacgtcgcacctgtgcgactacgcgggtcgatctatggcccgtactggctgcagtggacactgtcggcgacggtggtggtggtggtggtggtggtggtggtggtggtggtggtggtggtggtggtggtggtggtggtgatggtggtggtggcggtggcggtggtggtggcggtggcggtggcggcggcggtggcgggaggggggttgtcgacggcgacgcgacggtggcgtcctgtacgacgcgacgcggcgctcctggtggggaacgggtggcggcggccggcagtttcatggacggggtacgtcgggcggagacgggggcgacagacgcgccccgtggtctggtggacactgcaagacgctaagacagcgcacatcttgcccgtgaccctcacctaccacggggtgcgtcacctgccccctttttcgccgacgaggaaattatgggtaattgtcggccgtccactagcaggttttttattggatattcagagaagcaactcctcctggcagtagccaggggagccacgccccctactcaccaatgcgggccacaagggcccctgcatcccctcgactggttgccaacccaccagcccgcctaccaacagaaaaataattcttgtagccatgggctacacgcctcgcgttggctcgctagatggagaccgacacgtctcgctgcagcgccgcccgcacagcccgctcagcgggaccggtgaacgacgcgcggagaaaggcctccgtcatgggccccaccctcccaaacgtctcgcacaccagcggggagaacaaagacgggggcacggcgcgggggagggcaggaacgtactttttcaccttcttgttctcgcgcgcaatggcggccaccggcgtcagcggctcccccgcaacgcgggacagctgccgcgccgcaaagggcgacgcgacagacacgtcggcccacgcgcaggcgcccgtgctgacccgcttggcccgcacgtcgggccggagtccatacttgtcctccggccggaactcggcctccagcaccacccccatccacgacgtggagcgggtgaaggcgccggccaccaggtgcgcgatgcgcaggtggagggcacagcggcggccgtgcagttcctcacagaaacccaagaagtggcgcccctcggagtcgtcgcccgccccacaacggcaccgcgccgccggagggtcagaccgcggcggggcgccgagccacagccgcacggccacacgcatggcgtcgccagttaaggcgggtccatgaggccctggagtgggcaaagccgacagccagagggccgccatgtgcccctggcacgccgccatgcgcacccgctgatgcatcgacaatgtgtggtacacccgcgcacgcgccgcagccagggcgggccgagataggtcccgttgcgacggggcatccgccaacgaaaggaggtccttccaggtgaggggggtggggtgtggcgtgtcctgatctgcttctaatgtgccagaggccagttgaggggtgcggcggaggccagacaggccaaagggggcggggaaggaagggggtcggccggcaacggcccggcgtccgggctgccgtcccgcggaggcccagaggccagcagaggccggcgactgcacgtgcgccgtgtgcgcgtcgagcagctcctcgagctcccggcatagttccgcgagaaggctgtcgtcggaaggcggcatggtcggcccagcccgcggcacgggcagccccggcaccaccggcggcgccgccgcccgccgggcagcaagggcgtggctgtccatcatggacacttcttcggaggcgccctcctccagacccaactcggccgcggttgcccgccgcagctgtctcaaaccagggggtggggcggcgtcgggcgccgccacgactgggcggcagggcacgggcggcgaggggccgcgacggccacggcagagcgttgctcccctggcgtcccactgcgggcacggtcggcgcacgccacgaacgcatcaccgagcgctcgaagcgcaggcgacgaggcgcggcagcgtagcacggcgtccagccgcgacgccagggctgcagccgtcaccaccttggtgcggccgcaaatcccaaccccgcccatagagactgggagcggcatgcgctcccgcaccgcctgacgcaccgaggggctgtcccgggcgtcacagagcagccccttgacgagctctaccgcctcccggcccagtgcggccgccagctgcgccgctggcaccagagggagggcgcgcagaaagcagttcgcccgtgggccaaggttgtagcgcagcagcagcagctgcgtctgcaactctgaccgcgccaggtctgcaaccgctcgtgcgagccgccgctccaccgccaccaggtccgtgagcgagtcgctcacaaactcggctgcgccgaccggcaccgagaattgggtcaccccgcccggccgccagttggcgacgaagccagcaggagggggctggggggtggagcaccacgccgcacacttggtgggcgccagctcggcgtcaattgctgccccccacgcgctggcatcccgcatgacggcggccaacgcctccggcggtgcggccactaccacatcgtcgtggacacccttgacaaggcgctcggggtgcgccgtggccaggcgagtcagcacgaggtggatggccagggcgtgcaacagagggccaagggggtccccctgctgcgtcccccgagccgacggcaggcaaacgcgggccatcaacccccccacgtggtcccctccagctgggtccgcccacccgtatacgttgggggcgtccccgccgtacacccaccggaagtaggaggagaggaaggggaaggcacgctcgaccatggtacgcatggccgaccgcgacaccaggttgaacgcgttggcaaagtccagctgcaggaccgcctcgtctgggtggagcgcgaggtaggcgttgagctcatggagcgcccgctcacacgcgatcgacacgcccacccccagctgcagcggcgcgagaaactctgccgccgcgtcccgcatggtgccggccagcgccgaggccaccagcttccggatgacctcgggcatgccgatgggtcgcaacttcggcagcccgtcggcgcccggcccccccggcttggtcagcaacaggaggttggcgccagccagggcgtgcgtcgccacagggtgcacccgctccaccgcagcatcgcccgtcagcatcagcacgacggacaccagcgcgtcccgcccgtcgtcgctgagcgcgtggaggtgctccatgcggaggcccgacggccccggcgcggaccccttgggggcgcggcggatcgccgtcgtcacggtgtcccgcgtgaccgactgcggagtggcggcgcgcgtgccaaactcggctgccgcggccagctctgcggggaatgccgcctcgacgctggcggtcgtcgccttggccgacgacgccgacgggtggagggcgagggcctgggcccagatggccgccgcctgcggcgccagcggcgcgttctgcagcgtgcgtagcgccgcgctgaggcggcccttgcgcacttgccgcagcgcgcgactccgcgcccgggtcaggcgccgcgtgtctgcccggtcgagacggggaggggggagaggcggggggggagccggtgcggcggccgatggaggcggtgcaggcggtgggggggcgcatgcagccggccgtcagatgcccgtattgcgggcgtcgagtgcggcagagaaggagccgtccagcatgcgggcggcgcgctccgcgtgcgtaggctgtggggcgatgggggcgccagggtggggcgggcagggctcgtgcagcagcaggctaggaaagagcagaagccaaagccaagcctgtggccgcgccgagtccttccggacccactcgagagcctcggcccccagcaggcgccacgcgcgtagcagggcggcgggcacgtgctgcagggtccacgccccggaaggaacgagggagggccacgatgcctcgtcaggggcgacgcaggaaaggaaggcctcgcgggcagtcagccactcggcgggggtagtgaggtagcgctccatgccctcggtgggggcggaagccaacgccgcgcccgcgggcgtggccgccccggcggggcgcggtgcgggtgtcggcaatggacgcgccgctcgcgcacggcggcgccgtgggttctggctgcactgggccgcgtgggccaccagggaggtcaggccacggcggccgcgcacattgcggtccccccgaccgcagtgggggcacggtgccagatgcaggtcggccaccactgcggccggcacctccgacaggaggtgcttcgcctgcaggtgagccactatcgtggcggggccctcctcaaatcggcgtacgccctcgccgcacgaagggacagggcagacggcgtacgtccgtggggcgcctgcggcaggcgccaggggcggcggcggcgggggtagggggggagccgcagccgaggacggggggccagtggtggttctgtcaccagccagggcgccatgagtgtcactcagggcgccctgcgtcgctaacggtgggtggcatgggctcggcgtgggcagccagcgccccgccggtccccgcgcgctggtcggtccctgccggcggcgggccaggcgcgggggcgggcaccacctccatcggtgtgggggcaggcgcggccgccagagcaccagcaggcggctcggcgcccgccttgccagcatcgccccggcgccgcgccggcggcagggcctagggaggggggctgtcccggccgcccaccggccgcaaccgcttgtggccacgggccgttgacggcagcaccgcgctgacaccgcccgtgtcggagtccggggtgggcgccgggtcggcggtggcggccgcccgcgcatgcgcacggtcggggtcgcccccactcggactcgggccgggcgtccgcgggggcagcccgatagggagagcctcaccggccggccatgccgtcgtgggcatggtgacggtcgggcttggcgggagcggtacccgctttccaccagcggtctccccggctccaacggcccggccggccacaacaggcatctgcccagtgcgggcgcttccgcttgccgcccgctcgaccgccgccttgctgcccatgctcgccgccgccgccgcagttgctcccgctactcctgcggctgtcgttgccgccggtgtggagacgttgctggattgcgcgccgcggtcgtcgccgggcgctggcggcgccacggtgacgtccacggcagccaccgcgccgctgctcgcgagcggcgaggacaccacgtccccccccaccgtgtcctcctcctcgctgaggtacttgtcgggggtgtcaggcaccgcgggcgacgcggcagcctcggcgtgccccgcaccagccgcccccgcaagcgagggctgtgccgcaggttccaccgaggccgccccgtcgcccacactcctctccccatcgacaggtggcggcacggccgcagtaacctccctcgtgtcgttcgcgggcaggcccacgggggggacgacatccgtggcgtctgccgacgcaggggccagggcgacagccggtgacccccccccaatttcgctcgtctcgcgcggggcggcgggcgacgtcttggtcgacgatggcggcggcgccgttatgcccgccacagcggccaaatcggcagaagtcgactgccccgaatttttgggcgccgtcgttgtcgcggtcgccgtagtcgtgcccgtcccggccgcggcgaccgaatcggcgtccccttccccccgccgattatcctctcctaaatcggcgtgggtcgtcgtcgtcgcgggcgcggtcgccccccccgcagcagcggaggaaatcggcgattccggccgcgccgaattttcgtcgttgggcgccggagagggggcgggaaaaaccggcgccgacacggcggcgcctaaatcgggttcccccgcccccccacctggagtttccaccccgtccatcggggtggccgcgtcagccgacgagagctcggcggcggccgtggcggccggcgcccgtccagccgggggcgcttgggcgtctgccgtgctatcgtcgatggcggcagctggcggcggcaccgcggtgtcagccgccgcgggcggcgcctcgtcggtggctggcgcctcggtggggcgcggccgggcggcgggggccacggcgggcgtcggggcggccttggccgccgcccgcagggacggcgcggctgccaactgggcggccacgtgggcgcgcagtgcgtcccgcagcggcggcggcatctgcgggcgcgccgccagctgtgctagcttggcccgcaggcgacgcgcacacaggtcctccgccgcagtacgcgccgcctctgcggtgagccccccgcggcgcttggcgccaaagagggcggggctgcacgggtcggcgttgcgcacaacccccagcaccccaaccgccggacccgtgcgcagtgcggataaaaacgcgggcacgacgtccgccaccaacgtaacggccgccaccgcgccgaaacggtcaacgtccactacgttcgaccgcggcaggccggtgacatccgccaccagcccgcggagcgcgtgcgcccgcggcacccacgacaccccggtcacgtggaccgtcgcaagggtgggggggtcggcgccgcggcggccgccacgcgcgccagtcagcgccaataccgccgccgcggcgcgcgcagcggcggtcgaggtgagggcggcggtggcggccgcaccacccgcagaggcaccactggcggggccagcaggtccataccgcgcggcgcctccgtcacggcgacggtcgtcggcgccgtcgccctcgccggccacctccaccgaatcggctgctggtgcggccgcacggtcgtcttgacggttggcgcgggcgccagcggcagcctcgtcggccgccttcccagcacgagggccacgggggggggtaccggggccgccagcggcgcccaccacggccgctgcggcctcagcggcccggcgggcgcgggcatccttggcggcttgacgtcggcgacgacggcgggctgccgcggcgctccaggcgccgccgccatcgtcgtcgctcaggtccatagggtcatcgcccccgccggcgggcgacgagggcagcgacgccaccgccccggcagcggcgggcggcggagggcggcggcgaccagcatcggcggccgcagggggcggactagccgcccgggcgggcgaaaggggggcagaggagggggaagggggggaggggggggggggaaccggagcgggaacgggggcgagaccgcgaccgagaacgcccgcggcgctccccgagagagcgcagcagcggatcaatgtcattggcccgcacggacgcatacacagcgtcaaggacgcggcaacgggcggccgccgtcgacaatgacggcggcccggtcaccgcgtccaaaagcgcgatcaaccctcgcgcaagggccgcctcccgcggccgtagcgcgaccatggcgcccccccccgccacaaaaagtggacagggggaagccccaacaccaccgacccaaccagtaccaggacggggtacgtcgggcggagacgggggcgacagacgcgccccgtggtctggtggacactgcaagacgctaagacagcgcacatcttgcccgtgaccctcacctaccacggggtgcgtcacccgccccctttttcgccgacgagccaattgtgggtaattgtcggccgttcactagcaggttagacgccggcttttcccagggacctttcccaggatgagtcggatgtttcccggaggggtttaaccgatagtttccaaggttccagcagggaacctcgatcaatagggtgcgagaaagttcgtaagtctggaatggtttgtttacccgccggccctcccacgtggcggccggccacgccagccctttcacgtcgcgcccggctctcccggtcgacgcctccgcagcctctctttccaggtcggtgccgcccccgccatccttgccgcgtggcggccgcccccgcctgcttgcccgcatggtggccgcccccgcctgccttcccgcttggcagccgcccccgtctgcctgcccgcgttgcggccgccctcatttgcctgcccgcgtggcggctgcccccgccgtccctcctgcgtggtggccgcccccgcctgcctgacctcgccgcggccacccccgtctgcctgaccgcgtcggggccgcccccgcgggcctcccccgcgcgactggcgcccccccctgttgacgcccagtcccgcagcgaggtccatcaccagcagaagcaccataagcttccgcccgtcacgggccgcgctcgccgccaccgccaccaaaacgggggcggcaccattccacgcggcgccgtcgccaccgccgtcactcctacggccgctgcttctgctgctgcttctgccgtcgctgctgtggctactgtcgctaacgtgggtcaccaccagtgccttttcatctcccccgcctcctcttcccgccgcccacccgccgccctctcttcccgccaccgtccctcgtcggcgacgtggtggccgctgcccctccgcccgccgcggtccctgtggcgagtcatgcttgggctgatcgctcgccgtatggctggccggtttccttccccatctgtctcgttgcgtgagtcagcaagggtgaccctgcgctttacttcttttcctgtgccgcagccatgcatgagcgtcggtggggtcggggtgggcggtgctcctttggcgatgacgcgccggtttgtgtcgtccgtttacggtgaaggaccttttcccaatgagctttcgccgggccagcgcccgtcgaaacaatgtcaacactcccgatctccagccgaggtggtcaaatggtgctacggcgaagaccagattgtcacgctgcgtcggcagaacggcttctttgtagacaagacgcgctacgttgtgatgatggagaatgacgcatctcctcacctggtgctgttgcggccgggccggtctggaaagtcgctgctgacctcccagatgcaggtatgagtgtgacacaagtccctgggggcgagttttgggtgtcgcttctcaccgtttgtcgactctgtcagcatctctcgtttgagcaggactgtgcatattgctccgttttttccttgctaactgctccctccacggtcattctcctgctactgtttgtgtttattcaacctatcgcatgaccatgcttctcccctccaggtgtaccacgacatccacacgacccaggagctgttcgacgaggtcttcctcaatagggatggatccccaacggacgcgtacgtgcagtcatctggcggcactgctgcaggagcgcgggcgtactgtgtgctgccgctggacttctccatccaagttcagtcgggtcctcacgctcctcccctggacaagctctttcgggacgtgctaaacggagctatgctggtgttcatgaacaaataccgtgtgcacgtctcgcattggcaggaagacaatgctgacgccaacctcaaggcgttggcgtctgctgtcggtgcagcgggccatcaactcctcgtgctggtagacgagtacgaccgcactttcaaccagctgatgcgcgaggacccgaacgcataccaggatgcagtcgcaccagcgcgcgaccggaggccggcgggcttcttgcgggcgttctacctcac

SEQ ID NO: 11 - DNA, 21128 bp, unidentified
  misc_feature 1..21128: note = Fanzor polypeptide
  source 1..21128: mol_type = other DNA
cttctcaaggccgctgcctccttgtactatatcccgcttcccgtctatcattaatgctttcggtgattattttttcgggtgactcagtagagttgcttgttgcttttactgagacggcgccgtcctaaaaatcatctcaggcgttgagtacgcctggtgacattagcgcacatgctatcggtaagccgagcaacgataccgctcggctagacccgagcggtatcattgtccatttcccctaaagagctcatgtatcagtatagcgacggaaattttgaataggctccatggcaaaaaaacaacaacaaccaaccactaaaatgtctaccccttgaagtctgccttttaccttccatcttcacgatctgcaccacatcagtgtgggggtttcagcagtttgcgcttgctcttctcttcggtggtcggtcgttaaagcagcaggcgaggagaatgtggtccctcctccatccggagaaattccacttgcccagtcctccaccagcgagctcgtccccacccgcccccagtatgttgtcgcgctcgcaagtgtgccaacagcggaaagcatcgctctcgccaccattcggatgtacactgcatcacgacgcgtcataccgaatgcctacagaactcggaagtacgctgcccaagaaacgccgtccgcgactaacgacacccccgcagcacgatcgactccatcgtccacgcccaccccaaacaagacgagtcgaagtcaggtaaaccctatcggtgggcccccatgcgtttcgtggtggaaatgctgaaacgaggtcttagcatcacacaaaaccaatcgttcaaggaatcgcaaagcttatgggggtcgaccgtcgagtattggccgcatggagcaggacatactgtgtagactacaaactacaattgtagactactggttttctcgcgacgaagctgcacctcagaagctcatcgatttgctcgacggcgcagagacctcagtagatatcgctctgttcatcttgacgcatcctgaaccgacagacgctatcatccgggcctcccagcgtgctatcgttgatcgggcacaaatctccgagaaaagctcagctatgatgatcgaaaacggggtcaacgtatttcacgcaaaggccccaaactcatgcactggaagatggtctgttgccttgcaaaacaactggaaaggtgagatacccgcggtactgttcatctgtagcccacatacacacacaggacagggttctgcaacttgagcttttgcgcttttgcacaatcgccacaataaacggagctgttctgcgtggcggcttggagcttcggccgagtggctggctcaagagtttgtctgcagtgagaacgagagagaaatgtagaggagatgaaggtgctccgaggttttcgggatcccgagttttggatcacccggtgctacactgctttcgtccggaccggtaagaaggacatcaaggccatctgcgaggagcaccccggctggaatcgacggacggtcgcgcattactacgccatgtacgaaaatggagagagtttgcagccaaggtgtggcattgtggcaccggtcgagcattctgaaggcgcgtgcagaaggctgcaccattcgcatgatcgtcgacgagcgaagcgcgctccaaaagaaaaaaaacatgacttgggtacgcaagtgcggggatccaggtcgagactggacgcgtggccagcttcatggtccacaacaagtggaccatcgtcaacggcgagttcatgttagaaggcacgggcaactacagcgcggttgcgttcgatagagcccgccatgcacagacctttgagacgcgcacgggtcaggcgcaccttgattcgatcaagcgcgagttcgagcagctctgggaagaaggacgggtgcttcaatgggcctcgaggcgtactgcttgcttcatgtacttgggggaggacgaggacgtttatgtgtaggatatggttgaacgtgcaagccagtaagtaactttgttggtgcccactttgacttgggcttacataggccgtgcaggagtgccatcgtagttacaataggagctcgaggatcatgatgagtcctctcagtccttaccagccaaaaaaggcaaactgcacctagcgcattgagctggcaacggcagccccatcgacggcggctccagctacaacgggatctccgtcacttgactcgtcccttcagtccactgctgcttcttcgtcgctcgacaatttgatcgcgtctgctggatcgggttcgttcattgatccgagttcagtagtggtaaacggcgagctgctaccagcgagatcaagtcgacgtaccgcaactgggtggggcctcgcgccgtctcccccgacgccgcgtgctaccgtgaagcactcatcatggacgcatgcccgaccaacttcgaccagaacgaggttaccaacacgtgctgggccgagtgcccgatcgcctacccggtcgagtgcggcatggaatgcatccgtcagaacgatgactgtgcgatggaggtgctcaacaaggtcggtgctgtagctagcacgtctagtcatcgctaccgttggtgcgtctcagaaactgtggcagctttcaaagggtgcgacgcgcgcattcgactgcgctaacatgatgatcggtacgatgagatccatcatccgttacgtgcgtaacatcaagaccacggacccgcgggcctcgacggacaagattttcaacatcttgcaccagtcgaacaacatcgtgacggacctgccgatggccatttacatttgcatgggttgggacttgccgaggcctcttatgtctcgggtcgtgtgcttacgacgatgaactggatcttgctaaacgccatcgggtacaaggacgacctcgtgtctagctggagcaagttcaaggctttcttgatcggcgccaacttcacggaggccgccaacaagatcaacgagacggagatcgggacgctgagcgacgccctgaaggccaaccccacctgcggctacgacttgcgagtgatgacggaccgcacgtgacgaggaaacgcagcataatgcgggtcaagatgagaacgtgatacttgccctcatgctgtccacgtcgtgcacacggacggatgctgagtctgtcggtgttgatgcactttcagtcgtcgaccgtaatcgcttccagtttttgagggacgcgaacatttttcttgagtcagggaagaagctggtgttttacctggtgcgtcttcgttatcgagctccgattctccggcagaacgaccagtcggaagtgaaacaattgatgcagagcatgatctggtattcgatcaccggcgcgaagatcgacggtggcaagttgcacgatgccgagtggaccaagaagctggattcttgaatcctgccaacgaaacactgtcgcagctgtgggaaagtggagagagaagcaccagctcggagcacgaacgttttgcacttattggctggcctgcttccgccgacatagtgaacgcagtcgcattgtttggagaagtgtcctgtgtgcctgtaattcttgcacagtgctacaacgctccgaatgcttctcagcgccgaacttgatgaaaatggatgccatttcgctcaaactctcaaaatcttcgagaagagcaatgcatctgttgagtttgtacccctttgccgggagctaggtgctgccatcgttgacttgggtgacactacactgatccaggcgtttttcaagaagtctgttgcccagctgaaagacaaggacagacagttatttctccaatggcttccagctctcgtgcgcacatttggatgggcatacgttagtgctgccacactgaatgccatcgacgtgcaatcaactgaaattcgctcggatcgagctttggaactcgcaaacacacggttacctgtcgattggaacagatacagaacggatcaggttttggatcaggtttttagatactccaggatagacttcaggatgtgaacatgggagttggtgcatgtgctgctgctaatgcgggtcggtggtaggtctcagtttgcagcaggcaatggcagacacaagtgctcagtcaccggcgcgaggtggagtgcgcgttattgggtcacaggaacgaggtgctgggtcgctgaaacgacgagctgagtcgctggggcgaggtgctgagcaagagccactggagcaagagtcactgtcaccgaagcaagacgacgagggagatgctaagttgccaaagaagcatcgtcaagagcgcacgacgtgctactttcaaggttacaagtacacgcgttcatggacttcatcaaagaaggccgtgtatcgttgttcgacattccgacgcacaaagtgcaaggggactatggaattccgcatctcgacaatgggctactccaatgcgcgaccgcatacatgccaggtcgcgcaggttgctagtggactgtccgatgtcaacgaggatatgaaggccatggcagacagcttggctattgctgacgtcgctcgaccggttagagaaatatggcaggagctgcgcagcatcttctacggcaatgacaacaatgtcatgcttgggttgtctgagtcacaagtggtcaaccgcgtttacagagcaagatctcttcactacagtggcaacgtgcacggatcggtggagatcccaccactctcgcttgcactcaatgagtcggtgtcatttttccaatttcactttgtttcagcaaaccgccacgatgtgaacagtccaacacgtttgctagggtgggctcatccagcgctggtgaacttgtttcgctaccacaacgtgtcgctctttatcgatggcacctttcggtgcgttccacgcaattttcagcaatatgtggttttcatggttcatgactgtgcgtcaggcctgtacatccccgtgttttatatcctaagtacatcgcgcagtgctgatgcatattgggatatgatgcactttattctccaagctactgaccagcaactaagtccagccgaaggcgtatgcgactttgaatcggctttagtggaagcagtgcaaacccagttccgtgacgccattgtcttgggttgtctattccacctgaagcaggcgctgcggcgtgcgatgaagcggtatgctatacctgatgcagaatgcagtatagcgatgacaagaggcgtcatcgatatgttgacagtggccaatccggatcaagtgaagtcgcatgggattgcttgggctcagacggaaatcaagcaacgctgtgagaagcaaggaactgcgtactcaaacgcaaagaggcaggagttttgggtgtactttaagcgtacgtggattgacggatactcggtggggctttggaacgtgtacggtcttgataatgagcttgttgcgcgcacgaataacccgctcgagcgcttcaatcgcattctcaacacgcgcttccccactccacacacttccatggccacgttcgtgaccgtgatcaagcaactttcagccgagtacgttcagcagctgggtgatatacctcgtgaccgtagcaagcgcgtaacgcgagagaccattgagctgcccattgccatcgatctacccaaggcgttcgaggatgcgaccacatttgacactgattctgcgccagcgtcggcagctacgacttcagatggcgatgcaccactgtatcatgaaggtgcctgccagcacggtgctgctgctgtagtgttgtagtagtctagctatctatcaactagctagtagctttgcattaatttgccaatgccctttgcctgctgtcatgagtgtgttcttcacgtgttgccttcaaatcggccggcccgatccaaaacctgatccgttctgtatctgttccaaattcaaatctaccttttcaatcgtcgctgactttttgaaggtgtcaccgatgagcacgagattcctggggttaaggctctacctagtggacacatcgttcgagttcaagtcggtactcttggggactcgccatttcgcgcctcagtatgggggaccagatggcggaatacgcggaccactttaccggtggattggtgacgtcctggggggggctttggtttgagtcgccataaccttttcggggctacaacagtgatgtcaaatggatgatgagggacggtctaaagttgtagcgggagtagtgcgtgccgcacttcatgcatgcggcaaccaatactgttttcggcatcgtcggtgacaacagctcgtccaagaacccagccatgaccgacatccttcgacgcatcatcaaaacgatgtacaaaacgcagcacgtcgaaggaatgggcactctattaagcgagttatgcagcgttatgaacccggagggtgtgcatccacgctagctcttaaacttccgcacgcatcgattcctgggcctcacgcgcgtcgtccgacgcattcttctactctgggatccattggtgcaatggtacgaggagcgggccacaaaagcccgacgtgagaacgtgatgccgccggagtccttcccactagctcgggaaaagatggaactcattcaggtgctctcactgctggagccgatctcgaaactaaatcagattggacaggccgagtcggggggaccaatgcaacgtgcttcttggactctacaagctccgaatatccttgttggacatcaccacagccttgaaggactgaagacggagaatcggttcttccgaccggatgagctgtacgatctcgcatcgacaacccgttcgctacttcacaaagggtttcgtcgggttttcttccggcggtacaccgatcgtgataccatgaacgtctgctcctttgcctttgagatgcaactatttcttcaccccaacttcaagcatccatatggagcgctgacaactatttcttcaccccaacttcaagcatccatatggagcgctgataaaggtgttaccaaggtcaatatacaggcaggtgcctcccagcaggtagctgaccgacactacacgaagattcgacgcattatcattgacagcggctgacgccgagccgacgtcgactgatatcgttgccccaccgccagctactgggttatcagaggacttcgtggagctcttcacggagacagcgaacgaggtggcaccaccacatagactgcggtgcacgagcaacgcatcgacgatgagctcgaccgctggctgacaacgcttacttcgcttcaagcgattcaacccggtgcgtttgactcagttctgagcttctggaagcgccagcaagagctgggcaacttcctgcttcttcccttggttgcgcgcgtgctgttctcaatgccctcaccatcggcccaaattgaacgcgactttgggatggcaggcaggatggtgacccccaccgcagctcgatggcgccttacaacgtggacatggccacatttctgagctgcagcagaacttacgtgggtatcacccagtacccaaagttgtcgtcgagcacagcaaaggatcaagtaccgtcaaacgccatggtgagcatagagcgagagttggacgacgagttcggatcgttgatgaacaaaggcatcgagttgggactctccgacgacgaaaacgacggtattaccgaaatgtagcgggagcgggctggggcggacgaaaacgtgagagaacgggagcacgtgtggaagtggaaacgggctatagctgccgtggtagagtgctagccatgcatgtgcatgaaatgagtgtctttgcttttcatcaacacgttctgaccgttgttggtgttagcttcgctatgcagcatatgtaaatagtattttgctttcacctatgctttcgtgctggtcgtttgattactagcaactctgtaacacgcattgcagcgcgtacacggatcgcctcctgtgtttcaagctagattcgctcgatttgggatcgatctcgcagtattcgcgaccgtgggcacacaggcgggttgctggaccgggtggcagctgctgaaacccgcgtagttggtgtcctggctgccgctgcttcttttctgcggtttgctccagcggctcgtgataatgcggtggtggagcctcgcgtgcttgcagttgcttctgtagggcccatcgctgctcctgttgaggaagttggcgtcggcgcgaacgttgggacgatggccgtggacttgtcttgacttgatacagatattcacatcggtgttcttgaggacatcactgtattatgctggtcctgtggtacgaactcggagtgccatcagttcacggggttttgtctcggcagtcttcttggccaccacgatggctgggcgaaaccgttcgcctgggtggttgttagccctctcttgctcctgatcctgacgcatgcgaatcgcgatgtcgtgttgatctagcccgccgttgatcagctctactacgcgaacctctgtgcgagcggttgttgtctcttgcactacttcaaatttgcaaatgttgtggcgctcttacgcggcacgcttgtgctcctcctctaccaggttgtgttgcttgaccctggaagactgcaatgtgacttgcaaaacgcctggtgaggagatcaaaagagatcatctttgaccaataaaacgagattttgtttgccaataaaaaaagcaatttgcagagcgaaccaagttctcgccctagctcggttcgaatgaaaagtaagcgaaccaagcccccccccctccggttcaggtaaaaaagaaaagaaaagaagggtgaaaccgtggttccagttcagttcgtcctaggggtgggaaattcacgaagtgtaggaaagtgtaatagacttgcgaggagagctgctggtctttctactcagtccacaaatggaaagttctgtccgtgcagctctctcaagtctaacctaaagctctacactgccagtcatactgtacaccactcgtacaattgcctctctcacattgatggtcgcacgctcttcaattgttttcgtgaacccagcagccgcagtcaacggcaattcgaagatgtcgttgggtacgccccgaggcttcactgctccagcaagttctcacttttcctttcgcaccgtcaagcgcagtcactggtctccaacctccatcgcctgttagtagcgttgtatcaagccctatgtcggggaagggtgcgccaggaaagcgcaagcgcaagtgacacccatttgatgacgggaagagcgatagaaatggcactgaaggcgcatgcccgaactcggagggcgatgatgacctcgatgaggatgacgtagattatgaggacgcccaaccagtaacgacacgtccaagcaagaggcctgacgtcgcggagcgcatgaagggcaacaagaataccagcctcgtatatgtgaagatgtcactaggttccttcttgacaggcgaggagaaactgttgctgtcattcgatggcattctcgtggacttgagcattggattgttaaatgcctacgcgctgctgaacatccacatgatacggtgtgtgacaaaggacttcccattcctcgatttgagcagaacttcgtttgccaatgcttgacagacgtaatgtttaacgacagcaacgtgcacatagacgctgaactacatatatcgttggagctatacaatttgttgagaggctctaacgcttctcacgggcgtcgcgctggtatcaagaacgggtggcaacaggcgcagctcgggagatgatgaccgctatccagcatgcactcaaaaatgagtttccttcgccggtttaataaggtgctgcgggtatggtgtagacagaagcactggtagcacacattattgccccagagttcgagcggactacaccagacattcctgatcgtcagcgcctcgacaacgtagtcaacgagtggcgtggagaagtccctcagcgtcggagtgagctggtcaacttcacgtggtgcttctgacttatcgactcctgcaaatgattgaggagcgtaacgacagagttgagcaaagcgtttgcgctgtttaagcgacaggggcgtctgattttgaagttagactaatccaagctgaagttatgaagacgttcactgttctaccaacaaagcaaggatttggaattagtcacctcacgatagatttgattggtttccgggaactattagtccgcaacgacattgctgttcctctgtacagatcgaagtggaatgaggtgagatacatttattggagacggttcttccgtattgacaaagtggagactatagagtttggtcatctcagattcacacgagagatctcgacggacggcaagtcggtgaacatcaagattcggaagcccgaacgtgggccttccgagcccaatgcaaatgacctccaagctgccgacattggctctagatgggggttggatgcgagtaaatgcaacctcttggtcaccacaaaccaggacgacgaaacggttgtgtgctctggcaaagagtatcgcgaagacgcttgcattacgaagagcagccagaagcatttgagatggatacgggatcgtccggacactggagctgcctttgcgagcatgccgacgaagaggagcatgttgctaaagcggtggcgggagtacgtctcatttatgacgcagcacctgcatctgctagtgacccccatgcagcacaaatcgtaccgtcgccatcgacttcgaaggagcttcgttaaaaagaagaagctatgtgagctctaccagaaacttgtatgtcacggagagcgaatttttatcgtcattgacaaccggagtaacggcgatccaaatggagcgatcaaagggaagccatcggcactcgtgcagaaattggcgctggagttgtcaaagacgtcgaactgtacggtcatcattattgccgagttccggatcagcaaagtgcactttggttaccaacaagaactgtccaagcaatacccgtatcgaaaggccgctgtccacgtacgcgcagtccacgaaagacgagccacgtacccagtttacggcttactccatttcagaaacaaaggttgttctggtatgagtgtgaacagggacgtgaatgcttcgaagaatatgctgcgcctgctcgattgtgaactcaacgagactcgcccagtcacctacacgcatcaagcaaacagatagataacaatacatttctagtgtcgctgtgtgcctatctaggggtgaggaagattacattgtgatagccggctcagaaattagcccttttggactctgtaggctacgtacctataggacacccttaggagaataaagggttaaacaaaggctcaatgaagcctggttgatttctgcatgaaatatttttcaaaacggtgatgcccctcctgtggatgaatatacttgtctttccgacagatagctcagcacgattgttgtctggccgctttgcagaccattttgaccaattttaacacgtaaagccttaattgtgtccaattaaaatggttaaatgtaggtttgacattctgacaccttccgacaaatatgtgtctgaagtatttccaaaatatcaatatcttcatgcaaacaacaactgtaaaacgtatttttcaaatataccagccattcgtacaatgaggagtggccctaatgtaggaacactgaagaggatgaggtcgttggttggatgtccaccgttggtgtacactttaccagaagagtaacgtagccatggatcgtgcgtgatgcgtggcacatgcacaggacgcaaggaacaccggttcaacgtgagtagaaaagtgcttggcgcttacctggtacggtactactcgcagcttaaagcgctagttcctgcagtgccgatcatcatcctgcttagtatctgcgggcatctcgtcaactgcattgcttgagtggtctgtagctggcggctccacctgctcaagaccaagaacaaactcaagacaacgtgcacatgttgccgagaagatggccaccttttggctgtgattgatgggcttatcgcctcgaacaaggtcatggctgcatcgtcgaggcggtactactaaataataagggtccacacgcaacaacggaagaaggacaactgcaagagccatcagatcaagaaccaaatcccaagcacagaaaaaagctgcgaacctgtcggccacatggcttgcgtggtacaagaggataccacgcgtgtgggactcaaccgatagaagtcggagtgtcgccacgtggtcgcctccatgaagctctccctcgacgatagcttcgtcgtgaatgtcacagcggaagaattcaagaaccaagtcctcaacaccggccgcgcggaaattggactgctggagtttctaaagctagcggcgtcaacgaagggagccgggagtatcctgcgtgcgctgcacccgctgcatatgtccggtatattggacgagcaaatcatggtctacaggcaccaactcgtcataggaagcatcgaagaccctgcacatatcgacgcgcaagacatgctcggcattgtaggtcatgtgtgagaacggcgaggttaattcattccaatatatgtattcatttgacataacatcgcagcttaacaagacaacatattcatgtgtacacatccgcgcgcgcaggtcacctaaccaaagcgtaggctgcacaccgctcgatcgtaccgcgcgcacccacccactacatgcacaaatcctcagcaatacagcacggttcaaagcactgatcctgacccaatcttgatcataaacaccggccgaaacgtggctgtagacgaagctagtattgcgtgtcgttcgcaatacgctcactatattatcgttttcaatccccaaaacccgacagggaaatataacttcatgctatatgcttgttgctgtttgacatcatggtacgtcgtgagtttcaaattgcactgtgcaagtgaaactaaaagatcgtttggatggtgtggttccaagcccagaggtattacagcttgttgatctgacagcgaagtcgtctgaaattcgttctcacgtaattgaagttgtggagtctttgaaaggatctaatcgcgttgtcaataccgataatttctacacctcctgcgtgctactagagtcgctaaggtcgattggtctttatagtcgtggtacagtgcgcacatccagcaaacacttcccccacttcacaatgatccgaaaagctgatggaaagcctagaggctacatgaaacaaggcgtgtgcttagagtaacatatcgtagcggccagttggatagatggctctattgtgaatacagtctctaatgttgacgcctactcttcctctacggtatatcgtcgcataaaggaggaacatgttgcgtttaacgtcccggcctgcctcggtgaatacaacgcggggatgcagggagtcaaccgtcatgatcagcttcgcggtcggatttcgcttgccgatggtcactcatttcagaagtggcataaaaaattagcaatggctatgattgatatcgcgagatgtaatgcgtatgtatgcgataacttggcacgtgatacaagcgagatggatgttgcacagcctcgcaataatgcaagggcaagcgcccgtgacggtcaccgggcgtttgtcattccacttgtgcgagaattattcaatggagattggaagaagtccattgacagtgatgacgtaattgtgtacacttcgaacacaaaacccatgaccactgctgccaatttgaccagaaatacgaatgagttagaaacgccagcacatacatgtgtagcaaacgaatcgtggcttgtgttacaaggaaggagtcgggcaatgcacaaacggactgtttgtaaattcgagggcagggatgccacccagaaaacggattactgcgagacacatcgagttgcactctacaagcgtacctatcctatcgaccacagaaacccgcacctgtgtcagcagcaagattggacgtgctggcaaaagtatcatttgttctacttgccaaaacaggtctatacagttgacggaaacctgagaaggtcgtctccaatttgtaaagcccagtgttcgttcttgaaggagcgtcgagaccaagataatactgaagagatcagcaaccacgactagcattcggctcaaatatagtactgaaggtaaaagtaggcactcaatacattgtgtgcacttgaactacgactgaaaaccagtcagttacttgtactcacagcatcctccctccttgtacattgaccagtgcaatgtgcgccgctttggtgcctttcgtctaattatagagcacatgcatggtgctgcatgttaccctcagcaccaatgtctcgatgctccctctctaggcggctccagcacctcgatgtcacgtagaattatgtcgccgggcccgtgatgtcgagatcgccttgcggtgaacccgaggcgttccacgagctgtcgctgtcgctagttcgcccctgcaacgggcgccgtctgaaattctgcgtccttgctgcctttcgccttgtagggctgcgccatcatctcgttctgtcggtgtctagcgtatggctgctgcatcgggcgccgttgtgccgcacatgtgcatgatgtagcacaataatgtcgggataggagccaagcgttacgttattgttggtgtcggcgcgagtaacttgagagacacaatagcatgagcgcgccgtgtctgatcaggatttagatcccacgctgtgattggcagtcaacgctgacattttcctagagaggcgcaaaaattgttgatcaaaagtcggtgccgtatcttaacttcactataggctagattagtctgctaccttcttttggaaaaatatcttcatgtatcattctggtatcgatagggttaaaccactagtggtacgcgaaggctggaataggatacagataatccgatctacactagtgacaataaagaaacgtaagtacaactctgttgcaagcccacagcattcatctagagaacgggtgtagcgctaacgtcatcgaagttcttggcgtcgaagtaaagctttattgccttgcgaactccgtgacacggcacgcttgcagagccactattttgtattggtgcctcgtggctacagcgtcaacaaatccccccccccccccccccccgggagtgtgcagcacacctcgcttttggtgctatcaatcatcaaacaactgatctaatcgttctctggtctgtcgaccatcatcgacattgagtacctcatcgtcaaatgcaaaacccttcgggtcggcaacacagcaatagtaatagaccaacgcgataggagggtgtcttgtaccagtgttgagcctttcccataaatcgaacctcctcatccgtaaaattaacacaggacagagcgcgaccttcaagctctccaagtctgtcctgaataccccgttgtttttgcgcgcggcgggcgcgggccttgccgttcgttctcgaggtactgctcccgttcctgcaaactttcattagctctttgggtacggcgcttcttgctgcggtcttcagtgtcggccattgccttcccacgttgttattggtcgtcatccctctacaaaacaaactgttggataaagcctaaatcatacggcgccatgctcccccgactacaccaatttgaatgcgctcccattagtatagtcactacaaattatccatagcaaaaaatctccgacctccgactgcctccgacgtacacatagcccgttcattaattatgtttcgtacacaaatatgtataaaatgtgcaggatctaaatcaggatgtgtatgcccagcaggcgataatataagggcgtttgtaggcgggataggaagccctgaaacggcctgtgggccaagaaaacggtgtttttcgtttatgcatgcttttctatacagattcgctacggagacttgctaacttgccgcggcagattggcaagtgagaccccagcgcaaaaatcggcttcttacatgatagtttttacgctgactcgtaattactcataactgtggttggctggcaggtcgaacgtaggtacaacctcaaaaacgaggttatttgagaactactggcctggggctgccgcaagtgccgccgcacgacagccctcggcattccctcttttttctctcgtccggcacaagtgcccgtaacaacccagtgcatttgctttgggttcactgcatgtttgtatacaagccaatgggcagccgcctctgctgacaatgcaaggcgtgctgactctgcttcgaggttaacattgctgttccgcaaggaggttaagctttgtgtttgatgctgcgcttagatgtgtgtttgaatgctctgtaacgaggttaactttgctgttccaattggaggttaagcttagtgttcaatgtagagctatcaatgtctttcccctgctactgattctaaagcacgtaatacaccctgtattaactccttatgcgctacctcgtctatccttccgttgtgttgatcgtgttgtcctcaacagcttcctcttcgatgaacttcttgcgaacaagaaggcggcgctctttttcgaaggcagcgacaacggtctggctcaggtgttctcgaggttcccacgtcgcctcccactcgacgaggtaatacgtctgccgcttctcacgcttccaattcagcagcttgcagacgtagtggagcttctctgctgtcaggtcttcttcagcgctccgctcctcctcgtcgctcgatccatcgtcaccgcctggaccaggagctgctagccactcacgcacgtcgtcaatgccgacgcaccgcttcttccgttcggccacgcaagcgaagatgacatcgatcgcttcagggaggaggctcgcggaggcaaccgtcgtgttcatggtaagtcgaaggtgacggattgcctcatcactaacccggatcttgtacgccttgcgagcagcgatgcatagcgtcttgaactccttcgcggagctgatgtcgtttttcttgggctttgttgaaggcatggcggatgcttcgctggttcgggtgcagaacggagagtgggcttcagtgctctccaaacgataatcatgaacagcaacgactggttgcggcgacaaaaggtaagtctgtatgcaactacgtgcttaaactaaacctagtatgttggtggtgtgcgaaggggcagggtcaactacgcggccggcggcttgaagttgcttgtaatggctgacgtgttcgttgaggtgaccagacttgtgcagcttgcgcatggacttcaagacgttttgggccccacgagctgtgatcttgtgctcgcggagatacaacagcaactgtgtctccgcgctggcaccaactttcaggacttcgtctcgataccgcggtgatttctcatcaagctcgaagccatctccaagaaacagcttcaagaaggcgacgatcaacttggcgtttgaccgcatgtgcttggtcgctgcatccgttgagctccacatccgcggttcttgagcgtaccaagaaaaccaagcatctttcaggttggtagcagcagaggtgcgccgacgcttggcttgaggatcgttgttgcttgtatcttcacttgaaatcattgctgacggagcttgttgttgtttgttgtgtatcttagcctccattatagacagccgagtgtccagcttctggttcacttgaattaattgttcaatcagggctgcttgttgaagaaacatggggtgctttgtgatagcttccgtggtgtcttggatggttgaatgttttgcttcagatgttgtcgttgcgttcgaggacaggaacgacgaccacgccagcagatcgttgactgagaagcctttctcaactgcgcaagcctcgatgcgttgaatcgccagcccgttagtactgagacttttcaaggacggatagtgccgcagcagatacgccatgaaggtgtcgatgacgcgcgcgttcacgttgtacggtggcgactccagcccggacgaagcgttgaagagtgctgccgctacggactggatcttggactgggtatcggaatcgaagcagtccagcgtcagaaggcgaactctttgttcggggtcacggccgctcaagactcgtgcaaccctgtggtcctcggcaggagtgttgaagacgtacgcgaaggctttgttcgtcgccgtcatgttccacgctccacggtcgaaaatccactgtacgcacattccagctccatttgcatgctgagctccgccccgccgaaaggaatgcgacgtcagacgctcggccacgccagcatttttggcgactctgtccagaacgcgattgacgtagctgtggatcccaggagcagcatcggccgtcttgctctcatctgacttcttggccgtttgatgcagcgggatcacagcttccgggtggtcgatcaaatcaatcagaggcgtagcgggtgtcagcgtcgctcgggagactgtctgcggctccgaaagttggctcagaagcgaagccgtcggagaagactgcgtcaccagggcaagcgcgatggcgagaagcgggcatgtggagaagtcgtcgtcgggaaagagcgagaggccttgttcttctgcagtcttgacccggatgaagcgcacgaagaagatgtcgcctgcaccaatggacaggttggccttgcgaagcatcgtaagatccgacgcacgcccaaagaggaaccagagcagacacagcaaggcggcgtcctggtagtccgcggaggtataagccgtcgaatagagatataccatcatctgcttaagcgcggtcttcgtgcatgcaggagccttgtttacaaacgcccccgactctctcttcatacagtaccgttctagtacttgtcccttcttcagcagaatcttgtcgatccccgctcgatgctgagggaactgttccagcagccaggtcttggcctgtcggtagtactgcatgaccgagtgtcgggctaagagctggcccttgcgcccttccttgaaggcgaggtacatgccgaacttgtctaccacagcctccaagacgagccaagcactctcgcgctgcatgcacactcccaagtactcccagctgacggattcctcctcgagaaacttcaggaacgagcgtgctgcgcattcccgagcccgcttggtgttggccggtgcgaagtcgttgaggctcatgttgggtcggagatgtcggagcttgtgtgttattctaagaatatacgaatgacttgcaatctgtagagggatatcaataacttctctgctttctccgacacgatacgtcggaggtgtggttgtggggcctttacgaattagcgagctctctaattggttaaaatagatcacacagactgacttgattcgttataagttaaacaattgccaaccccttctttctattggtcgttaatatacatagtgaagttaagtgcgatcggagatttgacgatattcatccatacaatcatgtagcaaaatccccatctatgctgcccgagtgtccagtacccaaatcgattcaccggtaaaactatcccgtcgcattgagatttttgaggcattttgctccatggttcgcgaaagggttaacacgctgatggcgcatttcttgaagcctgtcggcggcagtaccgatagcacaaactgcgtgtcgtggtcggtccaacggcactggcgaattccagttcaacgtgcttcgtgtcggcccactgcttcgtgcagctcggacagtgcgtgtgttgctgatgtccttgcagcatatgtgactcgcaatccgttcctcatcaacatggcttgtgcaccttgcagggcagagccgccgtctttctccgagctcaatccagaaaaagcaggccagtgccaagagagtcgtcaacagggcggaaggagacgcagccagttcgcgcaactccagacgacgcagaagaaccccacgccacagcagcgttccaggcctcctgctgtgagccgcatttgcctgccggcgccaacgtttgggctcagttgcgagcgctgaacgtacgactccttcgcgccattgcgaagaccctcgaggccaccatgccaccaacagacagcatgaagacccgcgcccgcgccgtgagctccgacaatgccaagcccacgatcgtgctcaacctgccgggcgtccgcctcgccgtgctcacgagcgcctacgactcgctcgtgcacctcgacgtcaccctcagctcggccgcgtcgctcttgctcgccacctatgtcgcctgcgtactggcctggaacgtcctcgcgttcgtgctcacgctcctggtgcagggggcggcgttcgggctcatcagcttttacaccttcatgggctgcgccatgctgtccatgaatgcctcacgcaacgcggcctccgttcaaaactactacatcgccaagccggtggctgctacagcctccacgctcccattgctccgcgttgacggcgggtttatcgcgtccaagtccacccatgtcgacaagacagacgatgcggccgcttccaagagaaaggagcggcaggccccggctgcccgacgtcgtgtgctggcgcacctgaacaagaatcgcctcctggtcaatgtggtgcccggtgacatgcgccgccgcgtcgacatgaacctaggcgaagcgaacattcgtgtgggctaggcgttcgtgcaagcgatgcccggcaagcgcaagcccttcgacgtctatgtcatgcgcgtggactgcggtgcccagtcggccgaccaggagaagcacatgaaccccatgatcatgtgggacgtgaatgcaacgtttgacaggtcaagcagctcgagcgcgacctgaagaaggaggtaaaggcgaaaaaggcgtcgcgcggagtgcaactgccgcatgtgtcgagcggcgctgtgcttttcgtgctgcctgagctcacggaccatgtgctcaacgtccaccgcgcccatctgcagacgttcatcgacaccgtgcgctcggacccagtgctttccaccacgcggtgcttacgcaagttctgccaaacctaccaggctgcccagccccaatgcactctccgaccgaacgagagactgcaacacgggtgagaaggtcgggtgctgccgcgctcgtgtggagaatgaattcgtcgagccagtggctaccaagagagaagaggagatggagcttccattgt

SEQ ID NO: 12 - DNA, 8853 bp, unidentified
  misc_feature 1..8853: note = Fanzor polypeptide
  source 1..8853: mol_type = other DNA
atgatgatcggtacgatgagatccatcatccgttacgtgcgtaacatcaagaccacggacccgcgggcctcgacggacaagattttcaacatcttgcaccagtcgaacaacatcgtgacggacctgccgatggccatttacatttgcatgggttgggacttgccgaggcctcttgatgtctcgggtcgtgtgcttacgacgatgaactggatcttgctaaacgccatcgggtacaaggacgacctcgtgtctagctggagcaagttcaaggctttcttgatcggcgccaacttcacggaggccgccaacaagatcaacgagacggagatcaggacgctgagtgacgccctgaaggccaactccacctgcggctacgacttgcgagtgatgacggacctcacgtgacgaggaaacgcagcataatgcgggtcaagatgagaacgtgatacttgccctcatgctgtccacatcgtgcacacggacggatgctgagtctgtcggtgttgatgcactttcagtcgtcgaccgtaatcgcttccagtttttgagggacgcgaacatttttcttgagtcagggaagaagctggtgttttacctggtgcgtcttcgttatcgagctccgattctccggcagaacgaccagtcggaagtgaaacaattgatgcagagcatgatctggtattcgatcaccggcgcgaagatcgacggtggcaagttgcacgatgccgagtggaccaagaagctggatttcttgaatcctgccaacgaaacactgtcgcagctgtgggaaagtggagagagaagcaccagctcggagcacgaacgttttgcacttattggctggcctgcttccgccgacataatgaacgcagtcgcattgtttggaaaagtgtcctgtgtgcctgtaattcttgcacagtgctacaacgctccgaatgcttctcagcgccgaacttgatgaaaatggatgccatttcgctcaaactctcaaaatcttcgagaagagcaatgcatctgttgagtttgtacccctttgccgggagctaggtactgccatcgttgacttgggtgacactacactgatccaggcgtttttcaagaagtatgttgcccagctgaaagacaaggacagacagttatttctccaatggcttccagctctcgtgcgcgcatttggatgggcatacgttagtgctgccacactgaatgccatcgacgtgcaatcaactgaaattcgctcggatcgagctttggaactcgcaaacacactccatgacaacgatgctgcacttctagctctcgtagagtttgcgctgaagaaagctcacgcacggtgctctggccacgccgatgcattcgtatcttcgggtaagatcatcacacttttaaagcttgcgctggcgtgtggaaaccctcaaatatttgccggtctatcaaccatactgaacaagatcgatggcaatcttctccacacagtgattaatgcgctctcgaaatacgtcaatgactcgagtttacctgaacaacgtgctacgctggcctcacttgcagcgagacgtcgtgaatggctattcgctgagatcgaagacacgaagcaaccactggacttgacgaagcgcgagatctaggcaatgctagccgacaacacaatcggctccgcgaagtacttttcaatcgtcgctgactttttgaaggtgtcaccgatgagcacgagattcctggggttaaggctctacctagtggacacatcgttcgagttcaagtcagtactcttggggactcgccatttcgcgcctcagtatgggggaccagatggcggaatacgcggaccactttaccggtggattggtgacgtcctggggggggggggctttggtttgagtcgccataaccttttcggggctacaacagtgatgtcaaatggatgatgagggacggtctaaagttgtagcgggagtagtgcgtgccgcacttcatgcatgcggcaaccaatactgttttcggcatcgtcggtgacaacagctcgtccaagaacccagccatgaccgacatccttcggcgcatcatcaaaacgatgtacaaaacgcagcacgtcgaaggaaagggcactctattaagcgagttatgcagcgttatggacccggagggtgtgcatccacgctagctcttaaacttccgcacgcatcgattcctgggactcacgcgcgtcgtccgacgcattcttctactctgggatccattggtgcaatggtacgaggagcgggccacaaaagcccgacgtgagaacgtgatgccgccggagtccttcccactagctcgggaaaagatggaatgctctcactgctggagccgatctcgaaactaaatcagattggacaggccgagtcggggggaccaatgcaacgtgcttcttggactctacaagctccgaatatccttgttggacatcaccacagccttgaaggactgaagacggagaatcggttcttccgaccggatgagctgtacgatctcgcatcgacaacccgttcgctacttcacaaagggtttcgtcgggttttcttccggcggtacaccgatcgtgataccatgaacgtctgctcctttgcctttgagatgcaactatttcttcaccccaacttcaagcatccatatggagcgctgataaaggtgttaccaaggtcaatatacaggcaggtgcctcccagcaggtagctgaccgacactacacgaagattcgacgcattatcattgacagcgtccgcagcatcatgacagcggctgacgccgagccgacgtcgactgatatcgttgccccaccgccagctactgggttatcagaggacttcgtggagctcttcacggagacagcgaacgaggtggcaccaccacatagactgcggtgcacgagcaacgcatcgacgatgagctcgaccgctggctgacaacgcctacttcgcttcaagcgattcaacccggtgcgtttgactcagttctgagcttctggaagcgccagcaagagctgggcaacttcctgcttcttcccttggttgcgcgcgtgctgttctcaatgccctcatcatcggcccaaattgaacgcgactttgggatggcaggcaggatggtgacccccaccgcagctcgatggcgccttacaacgtggacatggccacatttctgagctgcagcagaacttacgtgggtatcacccagtacccaaagttgtcgtcgagcacagcaaaggatcaagtaccgtcaaacgccatggtgagcatggagcgagagttggacgacgagttcggatcgttgatgaacaaaggcatcgagttgggactctccgacgacgaaaacgacggtattaccgaaatgtagcgggagcgggctggggcggacgaaaacgtgagagaacgggagcacgtgtggaagtggaaacgggctatagctgccgtggtagagttctagccatgcatgtgcacgaaatgagtgtctttacttttcatcaacacgttctgaccgtgtttggtgttagcttcgctatgcagcatatgtaaatagtatttcgctttcaccttgctttcgtgctggtcgtttgattactagcaactctgtaacacgcattgcagcgcgtacacggatcgcctcctgtgtttcaagctagattcgctcgatttgagatcgatctcgcagtattcgcgaccgtgggcacacaggcgggttgctggaccgggtggaagctgctgaaacccgcgtagttggtgtcctggctgccgctgcttcttttctgcggtttgctccagcggctcgtgataatgcggtggtggagcctcgcgtgcttgcagttgcttctgtagggcccatcgctgcacctgttgaggaagttggcgtcggcgcgaacgttgggacgatggccgtggacttgtctcgacttgatacagatattcacatcggtgttcttgaggacatcactgtattatgctggtcctgtggtacgaactcagagtgccatcagttcacggggttttgtctcggcagtcttcttgaccaccacgatggctgggcgaaaccgttcgcctgggtggttgttagccctctcttgctcctgatcctgacgcatgcgaatcgcgatgtcgtgttgatctagcccgccgttgatcagctctactacgcgaacctctgtacgagcggttgttgcctcttgcactacttcaaatttgcaaatgtcgtggcgctcttacgcagcacgcttgtgctcctcctctaccaggttgtgttgcttgaccctggaagactgcaatgtgacttgcaaaacgcctggtgaggagatcaaaagagatcatctttgaccaataaaacgagatcttgtttgccaataaaaaaagcaatttgcagagcgaaccaagttctcgccctagctcggttcgaatgaaaagtaagcgaaccaagccccccccccccccccccccccccccccccctccggttcaggtaaaaaagaaaagaagggtgaaaccgtggttccagttcagttcgtcccaggggtgggaaattcacgaagtgtaggaaagtgtaatagacttgcgaggagagctgctggtctttctactcagtccacaaatggaaagttctgtccgtgcagctctctcaagtctaacctaaagctctacactgccagtcatactgtacaccactcgtacaattgcctctctcacattgatggtcgcacgctcttcaattgttttcgtgaacccagcagccgcagtcaacggcaattcgaagatgtcgttgggtacgccccgaggcttcactgctccagcaagttctcacttttcctttcgcaccgtcaagcgcagtcactgtctccaacctccatcgcctgttagtagcgttgtatcaagccctatgtcggggaagggtgcgccaggaaagcgcaagcgcaagtgacacccatttgatgacgggaagagcgatagaaatggcactgaaggtgcatgcccgaactcggagggcgatgatgacctcgatgaggatgacgtagattatgaggacgcccaaccagtaacgacacgtccaagcaagaggcctgacgtcgcggagtgcatgaagggcaacaagaataccagcctcgtatatgtgaagatgtcactaggttccttcttgacaggcgaggagaaactgttgctgtcattcgatggcattctcgtagacttgagcattggattgttaaatgcctacgcgctgctgaacatccacatgatgcggtgtgtgacaaaggacttcccattcctcgatttgagcagaacttcgtttgccaatgcttgacagacgtaatgtttaacgacagcaacgtgcacatagacgctgaactacatatatcgttggagctatacaatttgttgagaggctctaacgcttctcacgggcgtcgcgctggtatcaagaacgggtggcaacaggcgcagctcgggagatgatgaccgctatccagcatgcactcaaaaatgagtttccttcgccggtttaataaggtgctgcgggtatggtgtagacagaagcactggtagcacacattattgccccagagttcgagcggactccacccgacattcctgatcgtcagcgcctcgacaacgtagtcaacgagtggcgtggagaagtccctcagcgtcggagtgagctggtcaacttcacggcccaccgactggtgcttctgacttatcgactcctgcaaatgattgaggagcgtaacgacagagttgagcaaagcgtttgcgctgtttaagtgacaggggcgtctgattttgaagttagactaatccaagctgaagttatgaagacgttcactgttctaccaacaaagcttggatttggaattagtcacctcacgatagatttgattagtttccgggaactattagtccgcaacgacattgctgttcctccgtacagatcgaagtggaatgaggtgagatacatttattggagacggttcttccgtattgacaaagtggagactatagagtttggtcatcgcagattcacacgagagatctcggcggacggcaagtcggtgaacatcaagattcggaagcccgaacgtgggccttccgagcccaatgcaaatgacctccaagctgccgacattggctctagatgggggttggatgcgagtaaatgcaacctattggtcaccacaaaccaggacgacgaaacggttgtgtgctctggcaaagagtatcgcgaagacgcttacattacgaagagcagcaagaagcatttgagatggatacgggatcgtccgggcactggagctgcttttgcgagcatgccgacgaagaggagcatgttgctaaagcggtggcgggagtacgtcccatttatgacgcagcacctgcatctgctagtgacccccgtgcagcacaaatcgtaccgtcgccatcgacttcgaaggagcttctttaaaaagaagaagctatgtgagctctaccagaaacttgtatgtcacggagagcgaatttttatcgtcattgacaaccggagtaacggcgatccaaatggagcgatcaaagggaagccatcggcactcgtgcagaaattggcgctggagttgtcaaagacgtcgaactgtacggtcatcattattgccgagttccggatcagcaaagtgcactttggttaccaacaagaactgtccaagcaatacccgtatcgaaaggccgctgtccacgtacgcgcagtccacgaaagacgagccacgtacccagtttacggcttactccatttcagaaacaaaggttgttctggtatgagtgtgaacagggacgtgaatgcttcgaagaatatgctgcgcctgctcgattgtgaactcaacgagactcgcccagtcacctacacgcatcaagcaaacagatagataacaatacatttctagtgtcgctgtgtgcctatctaggggtgaggaagattacattgtgatagctggctcagaaattagcccttttggaatctgtaggttacgtacctataggacacccttaggagaataatgggttaaagaaaggctcaatgaagcctggttgatttctgcatgaaatatttttcaaaacggtgatgtcctcctgtggatgaatatacttgtctttccgacagatagctcagcacgattgttgtctgctcgctttgcaggccattttgaccaattttaacacgtaaagccttaattgtgtccaattaaaatggttaaatgtaggtttgacattctgacaccttccgacaaatatgtgtctgaagtatttccaaaatatcaatatcttcatgcaaacaacaactgtaaaacgtatttttcaaatataccagccattcgtacaatgaggagtggccctaatgtaggaacactgaagaagatgaggtcgttggttggatgtccaccgttggtgtccactttaccagaagagtaacgtagccatggatcgtgcgtgatgcgtgggacataagcaaaataaacaaaggctgtgcttatgtcttcaatatgccacgggaagaccgcaaggtagcctgagtgctgtgcagctggaataaagagatcgcgcctcacgttgtggacgtcgcgacgctggaccatccgacgcgggagcggcttgaacgcttgcaggagctcctgtttagcacatgcacaggacgcaaggaacaccggttcaacgtgagtagaaaagtgcttagcgcttacctggtacggtactactcgcagcttaaagcgctagttcctgcagtgccgatcatcatcctgcttagtatctgcgggcatatcgtcaactgcattgcttgagtggtctgtagctggcggctccacctgctcaagaccaagaacaaactcaagacaaggcgcacacgttgccgagaagatggccaccttttggctgtgagtgatgggcttatcgcctcgaacaaggtcatggctgcatcgtcgaggcggtactactaaataataagggtccacacgcaacaacggaagaaggacaactgcaagagccatcagatcaagaaccaaatcccaagcacagaaaaaagctgcgaacctgtcggccacatggcttgcgtggtacaagaggataccacgcgtgtgggactcaaccgatagaagtcggagtgtcgccacgtggtcgcctccatgaagctctccctcgacgatagcttcgttatgaatgtcacagcggaagaattcaaaaaccaagtcctcaacaccagccgcgcggaaattggactgctggagtttctaaagctagcggcgtcaacgaagggagccgggagtatcctgcgtgcgctgcacccgctgcatacgtccggtatattggacgagcaaatcatggtctacaggcaccaactcgtcataggaagcaccgaagaccctgcacatatcgacgcgcaagacatgctcggcattgtaggtcatgtgtgagaacggtgaagttaattcattccaatatatgtattcattcgacataacatcgctgcttaacaagacaacatattcatgtgtacacatccacgcgcgcaggtcacctaatcaaagcgtaggctgcacaccgcacgatcgcaccgcgctcactcacccaccacatgcacagatcctcagcaatactgcacggttcaaagcactgatcccgacccaatcttgatcataaacaccggccaaaacgtggctgttgacgaagctagtattgcgtgtcgttcgcaatacgctcgccatattatagttttctatccccaaaaccagacagggaaatatcacttcaagctgtatgcttgttgctgctcgacatcatggtatgtcgtgagtttcaaattgcactgtgcaagt

SEQ ID NO: 13 - DNA, 6692 bp, unidentified
  misc_feature 1..6692: note = Fanzor polypeptide
  source 1..6692: mol_type = other DNA
aggtagctgaccgacactacacgaagattcgacgcattatcattgacagcgtccgcagcatcatgacagcggttgacgccgagccgacgtcgactgatatcgttgccccaccgccagctactgggttatcagaggacttcgtggagctcttcacggagacagcgaacgaggtggcaccaccacatagactgcggtgcacgagcaacgcatcgacgatgagctcgaccgctggctgacaacgcctacttcgcttcaagcgattcaacccaatgcgttttactcagttctgagcttctggaagcgccagcaagagctggacatcttcctgcttcttcccttggttgcgcgcgtgctgttctcaatgccctcatcatcggcccaaattgaacgcgactttgggatggcaggcaggatggtgacccccaccgcagctcgatggcgccttacaacgtggacatggccacatttctgagctgcagcagaacttacgtgggtatcacccagtacccaaagttgtcgtcgagcacagcaaaggatcaagtaccgtcaaacgccatggtgagcatggagcgagagttggacgacgagttcggatcgttgatgaacaaaggcatcgagttgggactctccgacgacgaaaacgacggtattaccgaaatgtagcgggagcgggctggggcggacgaaaacgtgagagaacgggagcacgtgtggaagtggaaacgggctatagctgccgtggtagagttctagccatgcatgtgcacgaaatgagtgtctttacttttcatcaacacgttctgaccgttgttggtgttagcttcgctatgcagcttatgtaaatagtattttgttttcacctatgctttcgtgctggtcgtttgattactagcaactctgtaacacgcattgcagcgcgtacacggatcgcctcctgtgtttcaagctagattcgctcgatttgggatcgatctcgcagtattcgcgaccgtgggcacacaggcgggttgctggaccgggtggcagctgctgaaacccgcgtagttggtgtcctggctgccgctgcttcttttctgcggtttgctccagcggctcgtgataatgcggtggtggagcctcgcgtgcttgcagttgcttctgtagggcccatcgctgctcctgttgaggaagttggcgtcggcgcgaacgttgggacgatggccgtggacttgtcttgacttgatacagatattcacatcggtgttcttgaggacatcactgtattatgctggtcctgtggtacgaactcggagtgccatcagttcacggggttttgtctcggcagtcttcttggccaccacgatggctgggcgaaaccgttcgcctgggtggttgttagccctctcttgctcctgatcctgacgcatgcgaatcgcgatgtcgtgttgatctagcccgccgttgatcagctctactacgcgaacctctgtacgagcggttgttgcctcttgcactacttcaaatttgcaaatgtcgtggcgctcttacgcagcacgcttgtgctcctcctctaccaggttgtgttgcttgaccctggaagactgcaatgtgacttgcaaaacgcctggtgaggagatcaaaagagatcatctttgaccaataaaacgagatcttgtttgccaataaaaaaagcaatctgcagagcgagccaagttctcgccctagctcggttcgaatgaaaagtaagcgaaccaagcccccccccccctccggttcaggtaaaaaagaaaagaagggtgaaaccgtggttccagttcagttcgtcccaggggtgggaaattcacgaagtgtaggaaagtgtaatagacttgcgaggagagctgctggtctttctactcagtccacaaatggaaagttctgtccgtgcagctctctcaagtctaacctaaagctctacactgccagtcatactgtacaccactcgtacaattgcctctctcacattgatggtcgcacgctcttcaattgttttcgtgaacccagcagccgcagtcaacggcaattcgaagatgtcgttgggtacgccccgaggcttcactgctccagcaagttctcacttttcctttcgcaccgtcaagcgcagtcactggtctccaacctccatcgcctgttagtagcgttgtatcaagccctatgtcggggaagggtgcgccaggaaagcgcaagcgcaagtgacacccatttgatgacgggaagagcgatagaaatggcactgaaggcgcatgcccgaactcggagggcgatgatgacctcgatgaggatgacgtagattatgaggacgcccaaccagtaacgacacgtccaagcaagaggcctgacgtcgcggagcgcatgaagggcaacaagaataccagcctcgtatatgtgaagatgtcactaggttccttcttgacaggcgaggagaaactgttgctgtcattcgatggcattctcgtagacttgagcattggattgttaaatgcctacgcgctgctgaacatccacatgatacggtgtgtgacaaaggacttcccattcctcgatttgagcagaacttcgtttgccaatgcttgacagacgtaatgtttaacgacagcaacgtgcacatagacgctgaactacatatatcgttggagctatacaatttgttgagaggctctaacgcttctcacgggcgtcgcgctggtatcaagaacgggtggcaacaggcgcagctcgggagatgatgaccgctatccagcatgcactcaaaaatgagtttccttcgccggtttaataaggtgctgcgggtatggtgtagacagaagcactggtagcacacattattgccccagagtttgagcggactccacccgacattcctgatcgtcagcgcctcgacaacgtagtcaacgagtggcgtggagaagtccctcagcgtcggagtgagctggtcaacttcacggcccaccgactggtgcttctgacttatcgactcctgcaaatgattgaggagcgtaacgacagagttgagcaaagcgtttgcgctgtttaagtgacaggggcgtctgattttgaagttagactaatccaagctgaagttatgaagacgttcactgttctaccaacaaagcaaggatttggaattagtcacctcacgatagatttgattggttaccgggaactattagtccgcaacgacattgctgttcctccgtacagatcgaagtggaatgaggtgagatacatttattggagacggttcttccgtattgacaaagtggagactatagagtttggtcatctcagattcacacgagagatctcgacggacggcaagtcggtgaacatcaagattcggaagcccgaacgtgggccttccgagcccaatgcaaatgacctccaagctgccgacattggctctagatgggggttggatgcgagtaaatgcaacctcttggtcaccacaaaccaggacgacgaaacggttgtgtgctctggcaaagagtatcgcgaagacgcttacattacgaagagcagccagaagcaattgagatggatacgggatcgtccggacactggagctgcctttgcgagcatgccgacgaagaggagcatgttgctaaagcggtggcgggagtacgtcccatttatgacgcagcacctgcatctgctagtgacccccatgcagcacaaatcgtacagtcgccatcgacttcgaaggagcttctttaaaaagaagaacctatgtgagctctaccagaaacttgtatgtcacggagagcgaatttttatcgtcattgacaaccggagtaacggcgatccaaatggagcgatcaaagggaagccatccgcactcgtgcagaaattggcgctggagttgtcaaagacgtcgaactgtacggtcatcattattgccgagttccggatcagcaaagtgcactttggttaccaacaagaactgtccaagcaatacccgtatcgaaaggccgctgtccacgtacgcgcagtccacgaaagacgagccacgtacccagtttacggcttactccatttcagaaacaaaggttgttctggtatgagtgtgaacagggacgtgaatgcttcgaagaatatgctgcgcctgctcgattgtgaactcaacgagactcgcccagtcacctacacgcatcaagcaaacagatagataacaatacctttctagtgtcgctgtgtgcctatctaggggtgaggaagattacattgtgatagccggctcagaaattagcccttttggactctgtaggctacgtacctataggacacccttaggagaataatgggttaaacaaaggctcaatgaagcctggttgatttctgcatgaaatatttttcaaaacggtgatgtcctcctgtggatgaatatacttgtctttccgacagatagctcagcacgattgttgtctgctcgctttgcagaccattttgaccaattttaacacgtaaagccttaattgtgtccaattaaaatggttaaatgtaggtttgacattctgacaccttccgacaaatatgtgtctgaagtatttccaaaatatcaatatcttcatgcaaacaacaactgtaaaacgtatttttcaaatataccagccattcgtacaatgaggagtggccctaatgtaggaacactgaagaggatgaggtcgttggttggatgtccaccgttggtgtacactttaccagaagagtaacgtagccatggatcgtgcgtgatgcgtgggacataagcaaaataaacaaaggctgtgcttatgtcttcaatatgccacgggaagaccgcaaggtagcctgagtgctgtgcagctggaataaagagatcgcgcctcacgttgtggacgtcgcgacgctggaccatccgacgcgggagcggcttgaacgcttgcaggagctcctgtttagcacatgcacaggacgcaaggaacaccggttcaacgtgagtagaaaagtgcttggcgcttacctggtacggtactactcgcagcttaaagcgctagttcctgcagtgccgatcatcatcctgcttagtatctgcgggcatctcgtcaactgcattgcttgagtggtctgtagctggcggctccacctgctcaagaccaagaacaaactcaagacaaggcgcacacgttgccgagaagatggccaccttttggctgtgattgatgggcttatcgcctcgaacaaggtcatggctgcatcgtcgaggcggtactactaaataataagggtccacacgcaacaacggaagaaggacaactgcaagagccatcagatcaagaaccaaatcccaagcacagaaaaaagctgcgaacctgtcggccacatggcttgcgtggtacaagaggataccacgcgtgtgggactcaaccgatagaagtcggagtgtcgccacgtggtcgcctccatgaagctctccctcgacgatggcttcgttgtgaatgtcacagcggaagaattcaagaaccaagtcctcaacaccggccgcgcggaaattggactgctggagtttctaaagctagcggcgtcaacgaagggagccgggagtatcctgtgtgcgctgcacccgctgcatatgtccggtatattggacgagcaaatcatggtctacaggcaccaactcgtcataggaagcaccgaagaccctgcacatatcgacgcgcaagacatgctcggcattgtaggttatgtgtgagaacggtgaagttaattcattccaatatatgtattcattcgacataacatcgctgcttaacaagacaacatattcatgtgtacacatccacgcgcgcaggtcacctaatcaaagcgtaggctgcacaccgcacgatcgcaccgcgctcactcacccaccacatgcacagatcctcagcaatactgcacggtttaaagcactgatcccgacccaatcttgatcataaacaccggccaaaacgtggctgttgacgaagctagtattgcgtgtcgttcgcaatacgctcgccatattatagtgttctatccccaaaaccagacagggaaatatcacttcaagctgtatgcttgttgctgctcgacatcatggtatgtcgtgagtttcaaattgcactgtgcaagtgaacaaatagaccgtttggacggcgtggttccaagtccagaggtattacagcttgttgatctgacagcgaagtcctttgaaatttgttcccacgtaattgaagttgtggagtctttgaaaggatctaatcgcgttgtcaataccgataatatctacacctcctgcctgctactagaatcactaaggtcgattggcatgtatggtcgtggtacagtgctcacatccagcaaacacttcccccacttcacaatgatccgaaaagctgatggaaagcctagaggctacatgaaacatggcgtgtgcttagagtaacatatcgtagcggccagttggatagatggctctattgtgaatacagtctctaatgttgacgcctcctcttcctctacggtatatcatcgcataaaggaggaacatgttgcgtttaacgtcccggcctgcctcggtgaatacaacgcggggatgcagggagtcaaccgtcatgatcagcttcgcggtcggatttcgcttgccgatggtcactcatttcagaagtggcataaaaaattagcaatggctatgattg

SEQ ID NO: 14 - DNA, 10897 bp, unidentified
  misc_feature 1..10897: note = Fanzor polypeptide
  variation 1401..1809: note = n is any nucleotide
  source 1..10897: mol_type = other DNA
ctagctctcgtagagtttgcgctgaagaaagctcacgcacggtgctctggccacgccgatgcattcgtatcttcgggtaagatcatcacacttttaaagcttgcgctggcgtgtggaaaccctcaaatatttgccggtctatcaaccatactgaacaagatcgatggcaatcttctccacacagtgattaatgcgctctcgaaatacgtcaatgactcgagtttacctgaacagcgtgctacgctggcctcacttgcagcgagacgtcgtgaatggctattcgctgagatcgaagacacgaagcaaccactggacttgacgaagcgcgagatctaggcaatgctagccgacaacacaatcggctccgcgaagtacttttcaatcgtcgctgactttttgaaggtgtcaccgatgagcacgagattcctggggttaaggctctacctagtggacacatcgttcgagttcaagtcggtactcttggggactcgccatttcgcgcctcagtatgggggaccagatggcggaatacgaggaccactttaccggtggattggtgacgtcctggggggggggctttggtttgagtcgccataaccttttcggggctacaacgacggaggcagtgatgtcaaatggatgatgagggacggtctaaagttgtagcgggagtggtgcgtgccgcacttcatgcatgcggcaaccaatactgttttcggcatcgtcggtgacaacagctcgtccaagaacccagccatgaccgacatccttcgacgcatcaccaaaacgatgtacaaaacgcagcacgtcgaaggaaagggcactctattaagcgagttatgcagcgttatgaacccggagggtgtgcatccacgctagctcttaaacttccgcacgcatcgattcctgggactcacgcgcgtcgtccgacgcattcttctactctgggatccattggtgcaatggtacgaggagcgggccacaaaagcccgacgtgagaacgtgatgccgccggagtccttcccactagctcgggaaaagatggaactcattcaggtgctctcactgctggagccgatctcgaaactaaatcagattggacaggccgagtcggggggaccaatgcaacgtgcttcttggactctacaagctccgaatatccttgttggacatcaccacagccttgaaggactgaagacggagaatcggttcttccgaccggatgagctgtacaatctcgcatcgacaacccgttcgctacttcacaaagggtttcgtcgggttttcttccggcggtacaccgatcgtgataccatgaacgtctgctcctttgcctttgagatgcaactatttcttcaccccaacttcaagcatccatatggagcgctgataaaggtgttnnnnnnnnnnnnnnnnnnnnnnnnnnnnnnnnnnnnnnnnnnnnnnnnnnnnnnnnnnnnnnnnnnnnnnnnnnnnnnnnnnnnnnnnnnnnnnnnnnnnnnnnnnnnnnnnnnnnnnnnnnnnnnnnnnnnnnnnnnnnnnnnnnnnnnnnnnnnnnnnnnnnnnnnnnnnnnnnnnnnnnnnnnnnnnnnnnnnnnnnnnnnnnnnnnnnnnnnnnnnnnnnnnnnnnnnnnnnnnnnnnnnnnnnnnnnnnnnnnnnnnnnnnnnnnnnnnnnnnnnnnnnnnnnnnnnnnnnnnnnnnnnnnnnnnnnnnnnnnnnnnnnnnnnnnnnnnnnnnnnnnnnnnnnnnnnnnnnnnnnnnnnnnnnnnnnnnnnnnnnnnnnnnnnnnnnnnnnnnnnnnnnnnnnnggccctcatcatcggcccaaattgaacgcgactttgggatggcaggcaggatggtgacccccaccgcagctcgatggcgccttacaacgtggacatggccacatttctgagctgcagcagaacttacgtgggtatcacccagtacccaaagttgtcgtcgagcacagcaaaggatcaagtaccgtcaaacgccatggtgagcatggagcgagagttggacgacgagttcggatcgttgatgaacaaaggcatcgagttgggactctccgacgacgaaaacgacggtattaccgaaatgtagcgggagcgggctggggcggacgaaaacgtgagagaacgggagcacgtgtggaagtggaaacgggctatagctgccgtggtagagttctagccatgcatgtgcacgaaatgagtgtctttacttttcatcaacacgttctgaccgttgttggtgttagcttcgctatgcagcttatgtaaatagtattttgttttcacctatgctttcgtgctggtcgtttgattactagcaactctgtaacacgcattgcagcgcgtacacggatcgcctcctgtgtttcaagctagattcgctcgatttgggatcgatctcgcagtattcgcgaccgtgggcacacaggcgggttgctggaccgggtggcagctgctgaaacccgcgtagttggtgtcctggctgccgctgcttcttttctgcggtttgctccagcggctcgtgataatgcggtggtggagcctcgcgtgcttgcagttgcttctgtagggcccatcgctgctcctgttgaggaagttggcgtcggcgcgaacgttgggacgatggccgtggacttgtcttgacttgatacagatattcacatcggtgttcttgaggacatcactgtattatgctggtcctgtggtacgaactcggagtgccatcagttcacggggttttgtctcggcagtcttcttggccaccacgatggctgggcgaaaccgttcgcctgggtggttgttagccctctcttgctcctgatcctgacgcatgcgaatcgcgatgtcgtgttgatctagcccgccgttgatcagctctactacgcgaacctctgtacgagcggttgttgcctcttgcactacttcaaatttgcaaatgtcgtggcgctcttacgcagcacgcttgtgctcctcctctaccaggttgtgttgcttgaccctggaagactgcaatgtgactcgcaaaacgcctggtgaggagatcaaaagagatcatctttgaccaataaaacgagatcttgtttgccaataaaaaaagcaatttgcagagcgagccaagttctcgccctagctcggttcgaatgaaaagtaagcgaaccaagcccccccccccctccggttcaggtaaaaaagaaaagaagggtgaaaccgtggttccagttcagttcgtcccaggggtgggaaattcacgaagtgtaggaaagtgtaatagacttgcgaggagagctgctggtctttctactcagtccacaaatggaaagttctgtccgtgcagctctctcaagtctaacctaaagctctacactgccagtcatactgtacaccactcgtacaattgcctctctcacattgatggtcgcacgctcttcaattgttttcgtgaacccagcagccgcagtcaacggcaattcgaagatgtcgttgggtacgccccgaggcttcactgctccagcaagttctcacttttcctttcgcaccgtcaagcgcagtcactggtctccaacctccatcgcctgttagtagcgttgtatcaagccctatgtcggggaagggtgcgccaggaaagcgcaagcgcaagtgacacccatttgatgacgggaagagcgatagaaatggcactgaaggcgcatgcccgaactcggagggcgatgatgacctcgatgaggatgacgtagattatgaggacgcccaaccagtaacgacacgtccaagcaagaggcctgacgtcgcggagcgcatgaagggcaacaagaataccagcctcgtatatgtgaagatgtcactaggttccttcttgacaggcgaggagaaactgttgctgtcattcgatggcattctcgtagacttgagcattggattgttaaatgcctacgcgctgctgaacatccacatgatacggtgtgtgacaaaggacttcccattcctcgatttgagcagaacttcgtttgccaatgcttgacagacgtaatgtttaacgacagcaacgtgcacatagacgctgaactacatatatcgttggagctatacaatttgttgagaggctctaacgcttctcacgggcgtcgcgctggtatcaagaacgggtggcaacaggcgcagctcgggagatgatgaccgctatccagcatgcactcaaaaatgagtttccttcgccggtttaataaggtgctgcgggtatggtgtagacagaagcactggtagcacacattattgccccagagttcgagcggactacacccgacatccctgatcgtcagcgcctcgacaacgtagtcaacgagtggcgtggagaagtccctcagcgtcggagtgagctggtcaacttcacggcccaccgactggtgcttctgacttatcgactcctgcaaatgattgaggagcgtaacgacagagttgagcaaagcgtttgcgctgtttaagtgacaggggcgtctgattttgaagttagactaatccaagctgaagttatgaagacgttcactgttctaccaacaaagcaaggatttggaattagtcacctcacgatagatttgattggttaccgggaactattagtccgcaacgacattgctgttcctccgtacagatcgaagtggaatgaggtgagatacatttattggagacggttcttccgtattgacaaagtggagactatagagtttggtcatctcagattcacacgagagatctcgacggacggcaagtcggtgaacatcaagattcggaagcccgaacgtgggccttccgagcccaatgcaaatgacctccaagctgccgacattggctctagatgggggttggatgcgagtaaatgcaacctcttggtcaccacaaaccaggacgacgaaacggttgtgtgctctggcaaagagtatcgcgaagacgcttacattacgaagagcagccagaagcaattgagatggatacgggatcgtccggacactggagctgcctttgcgagcatgccgacgaagaggagcatgttgctaaagcggtggcgggagtacgtcccatttatgacgcagcacctgcatctgctagtgacccccatgcagcacaaatcgtacagtcgccatcgacttcgaaggagcttctttaaaaagaagaagctatgtgagctctaccagaaacttgtatgtcacggagagcgaatttttatcgtcattgacaaccggagtaacggcgatccaaatggagcgatcaaagggaagccatccgcactcgtgcagaaattggcgctggagttgtcaaagacgtcgaactgtacggtcatcattattgccgagttccggatcagcaaagtgcactttggttaccaacaagaactgtccaagcaatacccgtatcgaaaggccgctgtccacgtacgcgcagtccacgaaagacgagccacgtacccagtttacggcttactccatttcagaaacaaaggttgttctggtatgagtgtgaactgggacgtgaatgcttcgaagaatatgctgcgcctgctcgattgtgaactcaacgagactcgcccagtcacctacacgcatcaagcaaacagatagataacaatacatttctagtgtcgctgtgtgcctatctaggggtgaggaagattacattgtgatagccggctcagaaattagcccttttggactctgtaggctacgtacctataggacacccttaggagaataatgggttaaacaaaggctcaatgaagcctggttgatttctgcatgaaatatttttcaaaacggtgatgtcctcctgtggatgaatatacttgtctttccgacagatagctcagcacgattgttgtctgctcgctttgcagaccattttgaccaattttaacacgtaaagccttaattgtgtccaattaaaatggttaaatgtaggtttgacattctgacaccttccgacaaatatgtgtctgaagtatttccaaaatatcaatatcttcatgcaaacaacaacggtaaaacgtatttttcaaatataccagccattcgtacaatgaggagtggccctaatgtaggaacactgaagaggatgaggtcgttggttggatgtccaccgttggtgtacactttaccagaagagtaacgtagccatggatcgtgcgtgatgcgtgggacataagcaaaataaacaaaggctgtgcttatgtcttcaatatgccacgggaagaccgcaaggtagcctgagtgctgtgcagctggaataaagagatcgcgcctcacgttgtggacgtcgcgacgctggaccatccgacgcgggagcggcttgaacgcttgcaggagctcctgtttagcacatgcacaggacgcaaggaacaccggttcaacgtgagtagaaaagtgcttggcgcttacctggtacggtactactcgcagcttaaagcgctagttcctgcagtgccgatcatcatcctgcttagtatctgcgggcatctcgtcaactgcattgcttgagtggtctgtagctggcggctccacctgctcaagaccaagaacaaactcaagacaaggcgcacacgttgccgagaagatggccaccttttggctgtgattgatgggcttgtcgcctcgaacaaggtcatggctgcatcgtcgaggcggtactactaaataataagggtccacacgcaacaacggaagaaggacaactgcaagagccatcagatcaagaaccaaatcgcaagcacagaaaaaagctgcgaacctgtcggccacatggcttgcgtggtacaagaggataccacgcgtgtgggactcaaccgatagaagtcggagtgtcgccacgtggtcgcctccatgaagctctccctcgacgatggcttcgttgtgaatgtcacagcggaagaattcaagaaccaagtcctcaacaccggccgcgcggaaattggactgctggagtttctaaagctagcggcgtcaacgaagggagccgggagtatcctgcgtgcgctgcacccgctgcatattccggtatattggacgagcaaatcatggtctacaggcaccaactcgtcataggaagcaccgaagaccctgcacatatcgacgcgcaagacatgctcggcattgtaggttatgtgtgagaacggtgaagttaattcattccaatatatgtattcattcgacataacatcgctgcttaacaagacaacatattcatgtgtacacatccacgcgcgcaggtcacctaatcaaagcgtaggctgcacaccgcacgatcgcaccgcgctcactcacccaccacatgcacagatcctcagcaatactgcacggttcaaagcactgatcccgacccaatcttgatcataaacaccggccaaaacgtggctgttgacgaagctagtattgcgtgtcgttcgcaatacgctcgccatattatacttttctatccccaaaaccagacagggaaatatcacttcaagctgtatgcttgttgctgctcgacatcatggtatgtcgtgagtttcaaattgcactgtgcaagtgaacaaatagaccgtttggacggcgtggttccaagtccagaggtattacagcttgttgatctgacagcgaagtcctttgaaatttgttcccacgtaattgaagttgtggagtctttgaaaggatctaatcgcgttgtcaataccgataatatctacacctcctgcctgctactagaatcactaaggtcgattggcatgtatggtcgtggtacagtgcgcacatccagcaaacacttcccccacttcacaatgatccgaaaagctgatggaaagcctagaggctacatgaaacatggcgtgtgcttagagtaacatatcgtagcggccagttggatagattgctctattgtgaatacagtctctaatgttgacgcctcctcttcctctacggtatatcatcgcataaaggaggaacatgttgcgtttaacgtcccggcctgcctcggtgaatacaacgcggggatgcagggagtcaaccgtcatgatcagcttcgcggtcggatttcgcttgccgatggtcactcatttcagaagtggcataaaaaattagcaatggctatgattgatatcacgagatgtaatgcgtatgtatgcgataacttggcacgtgatacaagcgagatggatgttgcacagcctcgcaataatgcaagggcaagcgcccgtgacggtcaccgggcgtttgtcattccacttgtgcgagaattattcaatggagattggaagaagtccattgacagtgatgacgtaattgtgtacacttcgaacacaaaacccatgaccactgctgccaatttgaccagaaatacgaatgagttagaaacgccagcacatacatgtgtagcaaacgaatcgtggcttgtgttacaaggaaggagtcgggcaatgcacaaacggactgtttgtaaattcgagggcagggatgccacccagaaaacggattactgcgagacacatcgagttgcactctacaagcgtacctatcctatcgaccacagaaacccgcacctgtgtcagcagcaaaattggacgtgctggcaaaagtatcatttgttctacttgccaaaacaggtctatacagttgacggaaacctgagaaggtcgtctccaatttgtaaagcccagtgttcgttcttgaaggagcgtcgagaccaagataatactgaagagatcagcaaccacgactatcattcggctcatatatagtactgaaggtaaaagtagacactcaatacattgtgtgcacttgaactacgactgaaaaccagccagttacttgtactcacagcatcctccctccttgtacattgaccagtgcaatgtgcgccgctttgttgcctttcgtctaattatagagcacatgcatggtgctgcatgttaccctcagcaccaatgtctcgatgctccctctctaggcggctccagcacctcgatgtcacgtagaattctgtcgccgggcccgtgatgtcgagatcgccttgcggtgaacccgaggcgttccacgggctgtcgctgtcgctagttcgcccctgcaacgggcgccgtctgaaattctgcgtccttgctgcctttcgccttgtagggctgcgccatcatctcgttctgtcggtgtctagcgtgtggctgctgcatcgggcgccgttgtgccgcacatgtgcatgatgtagcacaataatgtcgggataggcgccaagcgttacgttcttgttggtgtcggcgcgagtaacttgagagacacaatagcatgagcgcgccgtgtctgatcaggatttagatcccacgctgtgattggcagtcaacgctgacattttcctagagaggcgcaaaaattgttgatcaaaagtcggtgccgtatcttaacttcactataggctagattagtctgctaccttcttttggaaaaatatcttcatgtatcattctggtatcgatagggttaaaccactagtggtacgcgaaggctggaataggatacagataatccgatctacactagtgacaataaagaaacgtaagtacgactctgttgcaagcccacagcattcatctagagaacgggtgtagctctaacgtcatcgaagttcttggcgtcgaagtaagctttgttgccttcgaactccgtgacacggcacgcttgcagagccactgttttgtattggtgcctcgtggttacagcgtcaacaaatccccccccccggagtgtgcagcacacctcgcttttggtgctatcaatcatcaaacaactgatctaatcgttctctggtctgtcgaccatcatcgacattgagtacctcatcgtcaaatgcaaaacccttcgggtcggcaacacagcagtagtaatagaccaacgcgacacgagggtgtcttgtaccagtgttgagcctttcccataaatcgaacctcctcatccgtaaaactaacacaggacagagcgtgaccttcaagctctccaagtctatcctgaataccccgttgtttttgcgcgcggcgggcgcgggccttgccgttcgttctcgaggtgctgctcccgttccagcaaactttcattggctctttgggtacggcgcttcttgctgcggtcttcagtgtcggccattgccttcccacgttgttattggtcgtcagccctctacaaaacaaactgttggataaagcctaaatcatacggcgccatgctcccccgactgcaccaatttgaatgcgctcccatcagtatagtcactacaaattatccatacaatcatgctctgtagtagcaaaatccccatctatgctgcccgagcgtcaagtacccaaatcgattcaccggtaaaactatcccgtcgcattaagatttttgaggcattttgctcgatggttcgcgaaagggttaacgcgccgaaggcgcatttcttgcagcctgtcggcgtcacacaaactgcgtgtcgtggtcggtccaacggcactggtgaattccagttcaacgtgcttcgtgtcggcccactgcttcgtgcagctcggacagtgcgtgtgttgctgatgtccttgcagcatatgtgactcgcaatccgttcctcatcaacaagctcatcaacatggcttgtgcaccttgcagggcagagccgccgtctttctccgagctcaatccagaacattcaggccagtgccaagagagtcatcaacagggcggaaggagacgcagccagttcgcgcaactccagacgacgcagaagaaccccacgccacagcagcgttccaggtctcctgctatgagccgcatttgcctgccggcgccaacgttcgggctcagttgcgagcgctgaacgtacgactccttcgcgccat

SEQ ID NO: 15 - DNA, 6329 bp, unidentified
  misc_feature 1..6329: note = Fanzor polypeptide
  source 1..6329: mol_type = other DNA
gccctcatcatcggcccaaattgaacgcgactttgggatggcaggcaggatggtgacccccaccgcagctcgatggcgccttacaacgtggacatggccacatttctgagctgcagcagaacttacgtgggtatcacccagtacccaaagttgtcgtcgagcacagcaaaggatcaagtaccgtcaaacgccatggtgagcatggagcgagagttggacgacgagttcggatcgttgatgaacaaaggcatcgagttgggactctccgacgacgaaaacgacggtattaccgaaatgtagcgggagcgggctggggcggacgaaaacgtgagagaacgggagcacgtgtggaagtggaaacgggctatagctgccgtggtagagttctagccatgcatgtgcacgaaatgagtgtctttacttttcatcaacacgttctgaccgttgttggtgttagcttcgctatgcagcttatgtaaatagtattttgttttcacctatgctttcgtgctggtcgtttgattactagcaactctgtaacacgcattgcagcgcgtacacggatcgcctcctgtgtttcaagctagattcgctcgatttgggatcgatctcgcagtattcgcgaccgtgggcacacaggcgggttgctggaccgggtggcagctgctgaaacccgcgtagttggtgtcctggctgccgctgcttcttttctgcggtttgctccagcggctcgtgataatgcggtggtggagcctcgcgtgcttgcagttgcttctgtagggcccatcgctgctcctgttgaggaagttggcgtcggcgcgaacgttgggacgatggccgtggacttgtcttgacttgatacagatattcacatcggtgttcttgaggacatcactgtattatgctggtcctgtggtacgaactcggagtgccatcagttcacggggttttgtctcggcagtcttcttggccaccacgatggctgggcgaaaccgttcgcctgggtggttgttagccctctcttgctcctgatcctgacgcatgcgaatcgcgatgtcgtgttgatctagcccgccgttgatcagctctactacgcgaacctctgtacgagcggttgttgcctcttgcactacttcaaatttgcaaatgtcgtggcgctcttacgcagcacgcttgtgctcctcctctaccaggttgtgttgcttgaccctggaagactgcaatgtgacttgcaaaacgcctggtgaggagatcaaaagagatcatctttgaccaataaaacgagatcttgtttgccaataaaaaaagcaatctgcagagcgagccaagttctcgccctagctcggttcgaatgaaaagtaagcgaaccaagcccccccccccctccggttcaggtaaaaaagaaaagaagggtgaaaccgtggttccagttcagttcgtcccaggggtgggaaattcacgaagtgtaggaaagtgtaatagacttgcgaggagagctgctggtctttctactcagtccacaaatggaaagttctgtccgtgcagctctctcaagtctaacctaaagctctacactgccagtcatactgtacaccactcgtacaattgcctctctcacattgatggtcgcacgctcttcaattgttttcgtgaacccagcagccgcagtcaacggcaattcgaagatgtcgttgggtacgccccgaggcttcactgctccagcaagttctcacttttcctttcgcaccgtcaagcgcagtcactggtctccaacctccatcgcctgttagtagcgttgtatcaagccctatgtcggggaagggtgcgccaggaaagcgcaagcgcaagtgacacccatttgatgacgggaagagcgatagaaatggcactgaaggcgcatgcccgaactcggagggcgatgatgacctcgatgaggatgacgtagattatgaggacgcccaaccagtaacgacacgtccaagcaagaggcctgacgtcgcggagcgcatgaagggcaacaagaataccagcctcgtatatgtgaagatgtcactaggttccttcttgacaggcgaggagaaactgttgctgtcattcgatggcattctcgtagacttgagcattggattgttaaatgcctacgcgctgctgaacatccacatgatacggtgtgtgacaaaggacttcccattcctcgatttgagcagaacttcgtttgccaatgcttgacagacgtaatgtttaacgacagcaacgtgcacatagacgctgaactacatatatcgttggagctatacaatttgttgagaggctctaacgcttctcacgggcgtcgcgctggtatcaagaacgggtggcaacaggcgcagctcgggagatgatgaccgctatccagcatgcactcaaaaatgagtttccttcgccggtttaataaggtgctgcgggtatggtgtagacagaagcactggtagcacacattattgccccagagtttgagcggactccacccgacattcctgatcgtcagcgcctcgacaacgtagtcaacgagtggcgtggagaagtccctcagcgtcggagtgagctggtcaacttcacggcccaccgactggtgcttctgacttatcgactcctgcaaatgattgaggagcgtaacgacagagttgagcaaagcgtttgcgctgtttaagtgacaggggcgtctgattttgaagttagactaatccaagctgaagttatgaagacgttcactgttctaccaacaaagcaaggatttggaattagtcacctcacgatagatttgattggtttccgggaactattagtccgcaacgacattgctgttcctccgtacagatcgaagtggaatgaggtgagatacatttattggagacggttcttccgtattgacaaagtggagactatagagtttggtcatctcagattcacacgagagatctcgacggacggcaagtcggtgaacatcaagattcggaagcccgaacgtgggccttccgagcccaatgcaaatgacctccaagctgccgacattggctctagatgggggttggatgcgagtaaatgcaacctcttggtcaccacaaaccaggacgacgaaacggttgtgtgctctggcaaagagtatcgcgaagacgcttacattacgaagagcagccagaagcaattgagatggatacgggatcgtccggacactggagctgcctttgcgagcatgccgacgaagaggagcatgttgctaaagcggtggcgggagtacgtcccatttatgacgcagcacctgcatctgctagtgacccccatgcagcacaaatcgtacagtcgccatcgacttcgaaggagcttctttaaaaagaagaacctatgtgagctctaccagaaacttgtatgtcacggagagcgaatttttatcgtcattgacaaccggagtaacggcgatccaaatggagcgatcaaagggaagccatccgcactcgtgcagaaattggcgctggagttgtcaaagacgtcgaactgtacggtcatcattattgccgagttccggatcagcaaagtgcactttggttaccaacaagaactgtccaagcaatacccgtatcgaaaggccgctgtccacgtacgcgcagtccacgaaagacgagccacgtacccagtttacggcttactccatttcagaaacaaaggttgttctggtatgagtgtgaactgggacgtgaatgcttcgaagaatatgctgcgcctgctcgattgtgaactcaacgagactcgcccagtcacctacacgcatcaagcaaacagatagataacaatacatttctagtgtcgctgtgtgcctatctaggggtgaggaagattacattgtgatagccggctcagaaattagcccttttggactctgtaggctacgtatctataggacacccttaggagaataatgggttaaacaaaggctcaatgaagcctggttgatttctgcatgaaatatttttcaaaacggtgatgtcctcctgtggatgaatatacttgtctttccgacagatagctcagcacgattgttgtctgctcgctttgcagaccattttgaccaattttaacacgtaaagccttaattgtgtccaattaaaatggttaaatgtaggtttgacattctgacaccttccgacaaatatgtgtctgaagtatttccaaaatatcaatatcttcatgcaaacaacaactgtaaaacgtatttttcaaatataccagccattcgtacaatgaggagtggccctaatgtaggaacactgaagaagatgaggtcgttggttggatgtccaccgttggtgtacactttaccagaagagtaacgtagccatagatcgtgcgtgatgcgtgggacataagcaaaataaacaaaggctgtgcttatgtcttcaatatgccacgggaagaccgcaaggtagcctgagtgctgtgcagctggaataaagagatcgcgcctcacgttgtggacgtcgcgacgctggaccatccgacgcgggagcggcttgaacgcttgcaggagctcctgtttagcacatgcacaggacgcaaggaacaccggttcaacgtgagtagaaaagtgcttggcgcttacctggtacggtactactcgcagcttaaagcgctagttcctgcagtgccgatcatcatcctgcttagtatctgcgggcatctcgtcaactgcattgcttgagtggtctgtagctggcggctccacctgctcaagaccaagaacaaactcaagacaaggcgcacacgttgccgagaagatggccaccttttggctgtgattgatgggcttgtcgcctcgaacaaggtcatggctgcatcgtcgaggcggtactactaaataataagggtccacacgcaacaacggaagaaggacaactgcaagagccatcagatcaagaaccaaatcccaagcacagaaaaaagctgcgaacctgtcggccacatggcttgcgtggtacaagaggataccacgcgtgtgggactcaaccgatagaagtcggagtgtcgccacgtggtcgcctccatgaagctctccctcgacgatagcttcgttgtgaatgtcacagcggaagaattcaagaaccaagtcctcaacaccggccgcgcggaaattggactgctggagtttctaaagctagcggcgtcaacgaagggagccgggagtatcctgtgtgcgctgcacccgctgcatatgtccggtatattggacgagcaaatcatggtctacaggcaccaactcgtcataggaagcaccgaagaccctgcacatatcgacgcgcaagacatgctcggcattgtaggttatgtgtgagaacggtgaagttaattcattccaatatatgtattcattcgacataacatcgctgcttaacaagacaacatattcatgtgtacacatccacgcgcgcaggtcacctaatcaaagcgtaggctgcacaccgcacgatcgcaccgcgctcactcacccaccacatgcacagatcctcagcaatactgcacggtttaaagcactgatcccgacccaatcttgatcataaacaccggccaaaacgtggctgttgacgaagctagtattgcgtgtcgttcgcaatacgctcgccatattatacttttctatccccaaaaccagacagggaaatatcacttcaagctgtatgcttgttgctgctcgacatcatggtatgtcgtgagtttcaaattgcactgtgcaagtgaacaaatagaccgtttggacggcgtggttccaagtccagaggtattacagcttgttgatctgacagcgaagtcctttgaaatttgttcccacgtaattgaagttgtggagtctttgaaaggatctaatcgcgttgtcaataccgataatatctacacctcctgcctgctactagaatcactaaggtcgattggcatgtatggtcgtggtacagtgctcacatccagcaaacacttcccccacttcacaatgatccgaaaagctgatggaaagcctagaggctacatgaaacatggcgtgtgcttagagtaacatatcgtagcggccagttggatagatggctctattgtgaatacagtctctaatgttgacgcctcctcttcctctacggtatatcgtcgcataaaggaggaacatgttgcgtttaacgtcccgacctgcctcggtgaatacaacgcggggatgcagggagtcaaccgtcatgatcagcttcgcggtcggatttcgcttgccgatggtcactcatttcagaagtggcataaaaaattagcaatggctatgattg

SEQ ID NO: 16 - DNA, 7271 bp, unidentified
  misc_feature 1..7271: note = Fanzor polypeptide
  source 1..7271: mol_type = other DNA
aggtagctgaccgacactacacgaagattcgacgcattatcattgacagcgtccgcagcatcatgacagcggctgacgccgagccgacgtcgactgatatcgttgccccaccgccagctactgggttatcagaggacttcgtggagctcttcacggagacagcgaacgaggtggcaccaccacatagactgcggtgcacgagcaacgcatcgacgatgagctcgaccgctggctgacaacgcctacttcgcttcaagcgattcaacccaatgcgttttactcagttctgagcttctggaagcgccagcaagagctggacatcttcctgcttcttcccttggttgcgcgcgtgctgttctcaatgccctcatcatcggcccaaattgaacgcgactttgggatggcaggcaggatggtgacccccaccgcagctcgatggcgccttacaacgtggacatggccacatttctgagctgcagcagaacttacgtgggtatcacccagtacccaaagttgtcgtcgagcacagcaaaggatcaagtaccgtcaaacgccatggtgagcatggagcgagagttggacgacgagttcggatcgttgatgaacaaaggcatcgagttgggactctccgacgacgaaaacgacggtattaccgaaatgtagcgggagcgggctggggcggacgaaaacgtgagagaacgggagcacgtgtggaagtggaaacgggctatagctgccgtggtagagttctagccatgcatgtgcacgaaatgagtgtctttacttttcatcaacacgttctgaccgttgttggtgttagcttcgctatgcagcttatgtaaatagtattttgttttcacctatgctttcgtgctggtcgtttgattactagcaactctgtaacacgcattgcagcgcgtacacggatcgcctcctgtgtttcaagctagattcgctcgatttgggatcgatctcgcagtattcgcgaccgtgggcacacaggcgggttgctggaccgggtggcagctgctgaaacccgcgtagttggtgtcctggctgccgctgcttcttttctgcggtttgctccagcggctcgtgataatgcggtggtggagcctcgcgtgcttgcagttgcttctgtagggcccatcgctgctcctgttgaggaagttggcgtcggcgcgaacgttgggacgatggccgtggacttgtcttgacttgatacagatattcacatcggtgttcttgaggacatcactgtattatgctggtcctgtggtacgaactcggagtgccatcagttcacggggttttgtctcggcagtcttcttggccaccacgatggctgggcgaaaccgttcgcctgggtggttgttagccctctcttgctcctgatcctgacgcatgcgaatcgcgatgtcgtgttgatctagcccgccgttgatcagctctactacgcgaacctctgtacgagcggttgttgcctcttgcactacttcaaatttgcaaatgtcgtggcgctcttacgcagcacgcttgtgctcctcctctaccaggttgtgttgcttgaccctggaagactgcaatgtgacttgcaaaacgcctggtgaggagatcaaaagagatcatctttgaccaataaaacgagatcttgtttgccaataaaaaaagcaatttgcagagcgaaccaagttctcgccctagctcggttcgaatgaaaagtaagcgaaccaagcccccccccccccggttcaggtaaaaaagaaaagaagggtgaaaccgtggttccagttcagttcgtcctaggggtgggaaattcacgaagtgtaggaaagtgtaatagacttgcgaggagagctgctggtctttctactcagtccacaaatggaaagttctgtccgtgcagctctctcaagtctaacctaaagctctacactgccagtcatactgtacaccactcgtacaattgcctctctcacattgatggtcgcacgctcttcaattgttttcgtgaacccagcagccgcagtcaacggcaattcgaagatgtcgttgggtacgccccgaggcttcactgctccagcaagttctcacttttcctttcgcaccgtcaagcgcagtcactggtctccaacctccatcgcctgttagcagcgttgtatcaagccctatgtcggggaagggtgcgccaggaaagcgcaagcgcaagtgacacccatttgatgacgggaagagcgatagaaatggcactgaaggcgcatgcccgaactcggagggcgatgatgacctcgatgaggatgacgtagattatgaggacgcccaaccagtaacgacacgtccaagcaagaggcctgacgtcgcggagcgcatgaagggcaacaagaataccagcctcgtatatgtgaagatgtcactaggttccttcttgacaggcgaggagaaactgttgctgtcattcgatggcattctcgtagacttgagcattggattgttaaatgcctacgcgctgctgaacatccacatgatacggtgtgtgacaaaggacttcccattcctcgatttgagcagaacttcgtttgccaatgcttgacagacgtaatgtttaacgacagcaacgtgcacatagacgctgaactacatatatcgttggagctatacaatttgttgagaggctctaacgcttctcacgggcgtcgcgctggtatcaagaacgggtggcaacaggcgcagctcgggagatgatgaccgctatccagcatgcactcaaaaatgagtttccttcgccggtttaataaggtgctgcgggtatggtgtagacagaagcactggtagcacacattattgccccagagttcgagcggactacacccgacatccctgatcgtcagcgcctcgacaacgtagtcaacgagtggcgtggagaagtccctcagcgtcggagtgagctggtcaacttcacggcccaccgactggtgcttctgacttatcgactcctgcaaatgattgaggagcgtaacgacagagttgagcaaagcgtttgcgctgtttaagtgacaggggcgtctgatttgaagttagactaatccaagctgaagttatgaagacgttcactgttctaccaacaaagcaaggatttggaattagtcacctcacgatagatttgattggtttccgggaactattagtccgcaacgacattgctgttcctccgtacagatcgaagtggaatgaggtgagatacatttattggagacggttcttccgtattgacaaagtggagactatagagtttggtcatctcagattcacacgagagatctcgacggacggcaagtcggtgaacatcaagattcggaagcccgaacgtgggccttccgagcccaatgcaaatgacctccaagctgccgacattggctctagatgggggttggatgcgagtaaatgcaacctcttggtcaccacaaaccaggacgacgaaacggttgtgtgctctggcaaagagtatcgcgaagacgcttacattacgaagagcagccagaagcaattgagatggatacgggatcgtccggacactggagctgcctttgcgagcatgccgacgaagaggagcatgttgctaaagcggtggcgggagtacgtcccatttatgacgcagcacctgcatctgctagtgacctccatgcagcacaaatcgtacagtcgccatcgacttcgaaggagcttctttaaaaagaagaacctatgtgagctctaccagaaacttgtatgtcacggagagcgaatttttatcgtcattgacaaccggagtaacggcgatccaaatggagcgatcaaagggaagccatcggcactcgtgcagaaattggcgctggagttgtcaaagacgtcgaactgtacggtcatcattattgccgagttccggatcagcaaagtgcactttggttaccaacaagaactgtccaagcaatacccgtatcgaaaggccgctgtccacgtacgcgcagtccacgaaagacgagccacgtacccagtttacggcttactccatttcagaaacaaaggttgttctggtatgagtgtgaacagggacgtgaatgcttcgaagaatatgctgcgcctgctcgattgtgaactcaacgagactcgcccagtcacctacacgcatcaagcaaacagatagataacaatacatttctagtgtcgctgtgtgcctatctaggggtgaggaagattacattgtgatagccggctcagaaattagcccttttggactctgtaggctacgtatctataggacacccttaggagaataatgggttaaacaaaggctcaatgaagcctggttgatttctgcatgaaatatttttcaaaacggtgatgtcctcctgtggatgaatatacttgtctttccgacagatagctcagcacgattgttgtctgctcgctttgcagaccattttgaccaattttaacacgtaaagccttaattgtgtccaattaaaatggttaaatgtaggtttgacattctgacaccttccgacaaatatgtgtctgaagtatttccaaaatatcaatatcttcatgcaaacaacaactgtaaaacgtatttttcaaatataccagccattcgtacaatgaggagtggccctaatgtaggaacactgaagaagatgaggtcgttggttggatgtccaccgttggtgtacactttaccagaagagtaacgtagccatggatcgtgcgtgatgcgtgggacataagcaaaataaacaaaggctgtgcttatgtcttcaatatgccacgggaagaccgcaaggtagcctgagtgctgtgcagctggaataaagagatcgcgcctcacgttgtggacgtcgcgacgctggaccatccgacgcgggagcggcttgaacgcttgcaggagctcctgtttagcacatgcacaggacgcaaggaacaccggttcaacgtgagtagaaaagtgcttggcgcttacctggtacggtactactcgcagcttaaagcgctagttcctgcagtgccgatcatcatcctgcttagtatctgcgggcatctcgtcaactgcattgcttgagtggtctgtagctggcggctccacctgctcaaaaccaagaacaaactcaagacaaggcgcacacgttgccgagaagatggccaccttttggctgtgattgatgggcttgtcgcctcgaacaaggtcatggctgcatcgtcgaggcggtactactaaataataagggtccacacgcaacaacggaagaaggacaactgcaagagccatcagatcaagaaccaaatcgcaagcacagaaaaaagctgcgaacctgtcggccacatggcttgcgtggtacaagaggataccacgcgtgtgggactcaaccgatagaagtcggagtgtcgccacgtggtcgcctccatgaagctctccctcgacgatagcttcgttgtgaatgtcacagcggaagaattcaagaaccaagtcctcaacaccggccgcgcggaaattggactgctggagtttctaaagctagcggcgtcaacgaagggagccgggagtatcctgtgtgcgctgcacccgctgcatatgtccggtatattggacgagcaaatcatggtctacaggcaccaactcgtcataggaagcaccgaagaccctgcacatatcgacgcgcaagacatgctcggcattgtaggttatgtgtgagaacggtgaagttaattcattccaatatatgtattcattcgacataacatcgctgcttaacaagacaacatattcatgtgtacacatccacgcgcgcaggtcacctaatcaaagcgtaggctgcacaccgcacgatcgcaccgcgctcactcacccaccacatgcacagatcctcagcaatactgcacggttcaaagcactgatcccgacccaatcttgatcataaacaccggccaaaacgtggctgttgacgaagctagtattgcgtgtcgttcgcaatacgctcgccatattatagtgttctatccccaaaaccagacagggaaatatcacttcaagctgtatgcttgttgctgctcgacatcatggtatgtcgtgagtttcaaattgcactgtgcaagtgaacaaatagaccgtttggacggcgtggttccaagtccagaggtattacagcttgttgatctgacagcgaagtcctttgaaatttgttcccacgtaattgaagttgtggagtctttgaaaggatctaatcgcgttgtcaataccgataatatctacacctcctgcctgctactagaatcactaaggtcgattggcatgtatggtcgtggtacagtgctcacatccagcaaacacttcccccacttcacaatgatccgaaaagctgatggaaagcctagaggctacatgaaacaaggcgtgtgcttagagtaacatatcgtagcggccagttggatagatggctctattgtgaatacagtctctaatgttgacgcctcctcttcctctacggtatatcgtcgcataaaggaggaacatgttgcgtttaacgtcccgacctgcctcggtgaatacaacgcggggatgcagggagtcaaccgtcatgatcagcttcgcggtcggatttcgcttgccgatggtcactcatttcagaagtggcataaaaaattagcaatggctatgattgatatcacgagatgtaatgcgtatgtatgcgataacttggcacgtgatacaagcgagatggatgttgcacagcctcgcaataatgcaagggcaagcgcccgtgacggtcaccgggcgtttgtcattccacttgtgcgagaattattcaatggagattggaagaagtgcattgacagtgatgacgtaattgtgtacacttcgaacacaaaacccatgacaacagctgccaatttgaccagaaatacgaatgagttagaaacgccagcacatacatgtgtagcaaaagagtcgtggcttgtgttacaaggaaggagtcgggcaatgcacaaatggactgtatgtaaattcgagggcagggatgacacccagaaaacggattattgcgagacgcatcgagttgcactctgcaagcgtacctatcctactgaccacagaaaaccgcacttgtgtcagcagcaaaactggacgtgctggcaaaaatatcgtttgttctacttgccaaaacaggtctatacagttgacggaaatctgagaaggtcgtctccaatttgtaaagcccagtgttcgttcttgaaggagcgtc

SEQ ID NO: 17 - DNA, 7102 bp, unidentified
  misc_feature 1..7102: note = Fanzor polypeptide
  source 1..7102: mol_type = other DNA
gccctcatcatcggcccaaattgaacgcgactttgggatggcaggcaggatggtgacccccaccgcagctcgatggcgccttacaacgtggacatggccacatttctgagctgcagcagaacttacgtgggtatcacccagtacccaaagttgtcgtcgagcacagcaaaggatcaagtaccgtcaaacgccatggtgagcatggagcgagagttggacgacgagttcggatcgttgatgaacaaaggcatcgagttgggactctccgacgacgaaaacgacggtattaccgaaatgtagcgggagcgggctggggcggacgaaaacgtgagagaacgggagcacgtgtggaagtggaaacgggctatagctgccgtggtagagtgctagccatgcatgtgcatgaaatgagtgtctttgcttttcatcaacacgttctgatgttagcttcgctatgcagcatatgtaaatagtattttgctttcacctatgctttcgtgctggtcgtttgattactagcaactctgtaacacgcattgcagcgcgtacacggatcgcctcctgtgtttcaagctagattcgctcgatttgggatcgatctcgcagtattcgcgaccgtgggcacacaggcgggttgctggaccgggtggcagctgctgaaacccgcgtagttggtgtcctggctgccgctgcttcttttctgcggtttgctccagcggctcgtgataatgcggtggtggagcctcgcgtgcttgcagttgcttctgtagggcccatcgctgctcctgttgaggaagttggcgtcggcgcgaacgttgggacgatggccgtggacttgtcttgacttgatacagatattcacatcggtgttcttgaggacatcactgtattatgctggtcctgtggtacgaactcggagtgccatcagttcacggggttttgtctcggcagtcttcttggccaccacgatggctgggcgaaaccgttcgcctgggtggttgttagccctctcttgctcctgatcctgacgcatgcgaatcgcgatgtcgtgttgatctagcccgccgttgatcagctctactacgcgaacctctgtacgagcggttgttgcctcttgcactacttcaaatttgcaaatgtcgtggcgctcttacgcagcacgcttgtgctcctcctctaccaggttgtgttgcttgaccctggaagactgcaatgtgactcgcaaaacgcctggtgaggagatcaaaagagatcatctttgaccaataaaacgagatcttgtttgccaataaaaaaagcaatttgcagagcgagccaagttctcgccctagctcggttcgaatgaaaagtaagcgaaccaagcccccccccccctccggttcaggtaaaaaagaaaagaagggtgaaaccgtggttccagttcagttcgtcctaggggtgggaaattcacgaagtgtaggaaagtgtaatagacttgcgaggagagctgctggtctttctactcagtccacaaatggaaagttctgtccgtgcagctctctcaagtctaacctaaagctctacactgccagtcatactgtacaccactcgtacaattgcctctctcacattgatggtcgcacgctcttcaattgttttcgtgaacccagcagccgcagtcaacggcaattcgaagatgtcgttgggtacgccccgaggcttcactgctccagcaagttctcacttttcctttcgcaccgtcaagcgcagtcactggtctccaacctccatcgcctgttagcagcgttgtatcaagccctatgtcggggaagggtgcgccaggaaagcgcaagcgcaagtgacacccatttgatgacgggaagagcgatagaaatggcactgaaggcgcatgcccgaactcggagggcgatgatgacctcgatgaggatgacgtagattatgaggacgcccaaccagtaacgacacgtccaagcaagaggcctgacgtcgcggagcgcatgaagggcaacaagaataccagcctcgtatatgtgaagatgtcactaggttccttcttgacaggcgaggagaaactgttgctgtcattcgatggcattctcgtagacttgagcattggattgttaaatgcctacgcgctgctgaacatccacatgatacggtgtgtgacaaaggacttcccattcctcgatttgagcagaacttcgtttgccaatgcttgacagacgtaatgtttaacgacagcaacgtgcacatagacgctgaactacatatatcgttggagctatacaatttgttgagaggctctaacgcttctcacgggcgtcgcgctggtatcaagaacgggtggcaacaggcgcagctcgggagatgatgaccgctatccagcatgcactcaaaaatgagtttccttcgccggtttaataaggtgctgcgggtatggtgtagacagaagcactggtagcacacattattgccccagagttcgagcggactacacccgacatccctgatcgtcagcgcctcgacaacgtagtcaacgagtggcgtggagaagtccctcagcgtcggagtgagctggtcaacttcacggcccaccgactggtgcttctgacttatcgactcctgcaaatgattgaggagcgtaacgacagagttgagcaaagcgtttgcgctgtttaagtgacaggggcgtctgatttgaagttagactaatccaagctgaagttatgaagacgttcactgttctaccaacaaagcaaggatttggaattagtcacctcacgatagatttgattggttaccgggaactattagtccgcaacgacattgctgttcctccgtacagatcgaagtggaatgaggtgagatacatttattggagacggttcttccgtattgacaaagtggagactatagagtttggtcatctcagattcacacgagagatctcgacggacggcaagtcggtgaacatcaagattcggaagcccgaacgtgggccttccgagcccaatgcaaatgacctccaagctgccgacattggctctagatgggggttggatgcgagtaaatgcaacctcttggtcaccacaaaccaggacgacgaaacggttgtgtgctctggcaaagagtatcgcgaagacgcttacattacgaagagcagccagaagcaattgagatggatacgggatcgtccggacactggagctgcctttgcgagcatgccgacgaagaggagcatgttgctaaagcggtggcgggagtacgtcccatttatgacgcagcacctgcatctgctagtgacccccatgcagcacaaatcgtacagtcgccatcgacttcgaaggagcttctttaaaaagaagaagctatgtgagctctaccagaaacttgtatgtcacggagagcgaatttttatcgtcattgacaaccggagtaacggcgatccaaatggagcgatcaaagggaagccatcggcactcgtgcagaaattggcgctggagttgtcaaagacgtcgaactgtacggtcatcattattgccgagttccggatcagcaaagtgcactttggttaccaacaagaactgtccaagcaatacccgtatcgaaaggccgctgtccacgtacgcgcagtccacgaaagacgagccacgtacccagtttacggcttactccatttcagaaacaaaggttgttctggtatgagtgtgaacagggacgtgaatgcttcgaagaatatgctgcgcctgctcgattgtgaactcaacgagactcgcccagtcacctacacgcatcaagcaaacagatagataacaatacctttctagtgtcgctgtgtgcctatctaggggtgaggaagattacattgtgatagccggctcagaaattagcccttttggactctgtaggctacgtacctataggacacccttaggagaataatgggttaaacaaaggctcaatgaagcctggttgatttctgcatgaaatatttttcaaaacggtgatgtcctcctgtggatgaatatacttgtctttccgacagatagctcagcacgattgttgtctgctcgctttgcagaccattttgaccaattttaacacgtaaagccttaattgtgtccaattaaaatggttaaatgtaggtttgacattctgacaccttccgacaaatatgtgtctgaagtatttccaaaatatcaatatcttcatgcaaacaacaactgtaaaacgtatttttcaaatataccagccattcgtacaatgaggagtggccctaatgtaggaacactgaagaggatgaggtcgttggttggatgtccaccgttggtgtacactttaccagaagagtaacgtagccatggatcgtgcgtgatgcgtgggacataagcaaaataaacaaaggctgtgcttatgtcttcaatatgccacgggaagaccgcaaggtagcctgagtgctgtgcagctggaataaagagatcgcgcctcacgttgtggacgtcgcgacgctggaccatccgacgcgggagcggcttgaacgcttgcaggagctcctgtttagcacatgcacaggacgcaaggaacaccggttcaacgtgagtagaaaagtgcttggcgcttacctggtacggtactactcgcagcttaaagcgctagttcctgcagtgccgatcatcatcctgcttagtatctgcgggcatctcgtcaactgcattgcttgagtggtctgtagctggcggctccacctgctcaaaaccaagaacaaactcaagacaaggcgcacacgttgccgagaagatggccaccttttggctgtgattgatgggcttgtcgcctcgaacaaggtcatggctgcatcgtcgaggcggtactactaaataataagggtccacacgcaacaacggaagaaggacaactgcaagagccatcagatcaagaaccaaatcgcaagcacagaaaaaagctgcgaacctgtcggccacatggcttgcgtggtacaagaggataccacgcgtgtgggactcaaccgatagaagtcggagtgtcgccacgtggtcgcctccatgaagctctccctcgacgatggcttcgttgtgaatgtcacagcggaagaattcaagaaccaagtcctcaacaccggccgcgcggaaattggactgctggagtttctaaagctagcggcgtcaacgaagggagccgggagtatcctgtgtgcgctgcacccgctgcatatgtccggtatattggacgagcaaatcatggtctacaggcaccaactcgtcataggaagcaccgaagaccctgcacatatcgacgcgcaagacatgctcggcattgtaggtcatgtgtgagaacggtgaagttaattcattccaatatatgtattcattcgacataacatcgctgcttaacaagacaacatattcatgtgtacacatccacgcgcgcaggtcacctaatcaaagcgtaggctgcacaccgcacgatcgcaccgcgctcactcacccaccacatgcacagatcctcagcaatactgcacggttcaaagcactgatcccgacccaatcttgatcataaacaccggccaaaacgtggctgttgacgaagctagtattgcgtgtcgttcgcaatacgctcgccatattatacttttctatccccaaaaccagacagggaaatatcacttcaagctgtatgcttgttgctgctcgacatcatggtatgtcgtgagtttcaaattgcactgtgcaagtgaacaaatagaccgtttggacggcgtggttccaagtccagaggtattacagcttgttgatctgacagcgaagtcctttgaaatttgttcccacgtaattgaagttgtggagtctttgaaaggatctaatcgcgttgtcaataccgataatatctacacctcctgcctgctactagaatcactaaggtcgattggcatgtatggtcgtggtacagtgctcacatccagcaaacacttcccccacttcacaatgatccgaaaagctgatggaaagcctagaggctacatgaaacatggcgtgtgcttagagtaacatatcgtagcggccagttggatagatggctctattgtgaatacagtctctaatgttgacgcctcctcttcctctacggtatatcatcgcataaaggaggaacatgttgcgtttaacgtcccggcctgcctcggtgaatacaacgcggggatgcagggagtcaaccgtcatgatcagcttcgcggtcggatttcgcttgccgatggtcactcatttcagaagtggcataaaaaattagcaatggctatgattgatatcacgagatgtaatgcgtatgtatgcgataacttggcacgtgatacaagcgagatggatgttgcacagcctcgcaataatgcaagggcaagcgcccgtgacggtcaccgggcgtttgtcattccacttgtgcgagaattattcaatggagattggaagaagtccattgacagtgatgacgtaattgtgtacacttcgaacacaaaacccatgacaacagctgccaatttgaccagaaatacgaatgagttagaaacgccagcacatacatgtgtagcaaacgaatcgtggcttgtgttacaaggaaggagtcgggcaatgcacaaacggactgtttgtaaattcgagggcagggatgacacccagaaaacggattattgcgagacgcatcgagttgcactctgcaagcgtacctatcctactgaccacagaaaaccgcacttgtgtcagcagcaaaactggacgtgctggcaaaaatatcatttgttctacttgccaaaacaggtctatacagttgacggaaacctgagaaggtcgtctccaatttgtaaagcccagtgttcgttcttgaaggagcgtcgagaccaggataatactgaagagatcagcaaccacgactagcattcggctcatatatagtactgaaggtaaaagtagacactcaatacattgtgtgcacttgaactacgactgaaaatcagccagttacttgtactcgcggcattccccctccttgtacattgaccagtgcaatgtgcgccgctttgttgcctttcgtctaa

SEQ ID NO: 18 - DNA, 14474 bp, unidentified
  misc_feature 1..14474: note = Fanzor polypeptide
  source 1..14474: mol_type = other DNA
ctacagttgtagactactggttttctcgcgacgaagctgcacctcagaagctcattgatttgctcgacggcgcagagacctcagtagatatcgctatgttcatcttgacgcatcctgaaccgacagacgctatcatccgggcctcccagcgtgctatcgttgatcgggcacaagtctccgagaaaagctcagctatgatgatcgaaaacggggtcaacgtatttcacgcaaaggccccaaactcatgcactggaagatggtctgttgccttgcaaaacaactggaaaggtgagatacccgcggtactgttcatctgtagcccacatacacacacaggacagggttctgcaacttgagcttttgcgcttatgcacaatcgccacaataaacggagctgttctgcgtggcggcttggagcttcggccgagtggctggctcaagagtttgtctgcagtgagaacgagagagaaatgtagaggagatgaaggtgctccgaggttttcgggatcccgagttttggagttttggatcgcccggtgctacactgctttcgtccggaccggtaagaaggacatcaaggccatctgcgaggagcacccgggctggaatcgacggacggtcgcgcattactacgccatgtacgaaaatggagagagtttgcagccaaggtgtggcattgtggcaccggtcgagcattctgaaggcgcgtgcagaaggctgcaccattcgcatgatcgtcgacgagcgaagcgcgctccaaaagaaaaaaaacatgacttgggtacgcaagtgcggggatcccggtcaagactggacgcgtggccagcttcatggtccacaacaagtggaccatcgtcaacggcgagttcattttacaaggcacgggcaactacagcgcggttgcgttcgatggagcccgccacgcagagacctttgagacgcgcacgggtcaggcgcaccttgattcgatcaagcgcgagttcgagcagctctgggaagaaggacgggtgcttcaatgggcctcgaggcgtactgcttgcttcatgtacttgggggaggacgaggatgaaacgaaaatgtacccccccccggggagagcaggacgaggacgaggacgtttatgtgtaggatatggttgaacgtgcaagccagtaagtaactttgttggtgcccactttgacttgggcttacattggccgtgcaggagtgccatcgtagttacaatagagctcgaggatcatgatgagtcctctcagtccttaccagccaaaaaaggcaaactgcacctagcgcattgagctggcaacggcagccccatcgacggcggctccagctacaacgggatctccgtcacttgactcgtcccttcagtccactgttgcttcttcgtcgctcgacaatttgatcgcgtctgctggatcgggttcgttcattgatccgagttcagtagtggtaaacggcgagctgctaccagcgagatcaagtcgacgtaccgcaactgggtggggcctcgcgccgtctcccccgacgccgcgtgctaccgtgaagcactcatcatggacgcatgcccgaccaacttcgaccagaacgaggttaccaacacgtgctgggccgagtgcccgatcgcctacccggtcgagtgcggcatggaatgcatccgtcagaacgatgactgtgctatggaggtgcttaacaaggtcggtgctgttgctagcacgtctagtcatcgctaccgttggtgcgtctcagaaactgtggcagctttcaaagggtgcgacgcgcgcattcgactgcgctaacatgatgatcggtacgatgagatccatcatccgttacgtgcgtaacatcaagaccacggacccgcaggcctcgacggacaaaattctcaacatcctgtaccagtcgaacaacatcgtgacggacctgccgatggccatttacatttgcatgggctgggacttgccgaggcctctcgatgtctcgggtcgtgtgcttacgacgatgaactggatcttgctaaacgccatcgggtacaaggacgacctcgtgtctagctggagcaagttcaaggctttcttgatcggcgccaacttcacggaggccgccaacaagatcaacgagacggagatcaggacgctgagtgacgccctgaaggccaactccacctgcggctacgacttgcgagtgatgacggacctcacgtgacgaggaaacgcagcataatgcgggtcaagatgagaacgtgatacttgccctcatgctgtccacatcgtgcacacggacggatgctgagtctgtcggtgttgatgcactttcagtcgtcgaccgtaatcgcttccagtttttgagggacgcgaacatttttcttgagtcagggaagaagctggtgttttacctggtgcgtcttcgttatcgagctccgattctccggcagaacgaccagtcggaagtgaaacaattgatgcagagcatgatctggtattcgatcaccggcgcgaagatcgacggtggcaagttgcacgatgccgagtggaccaagaagctggatttcttgaatcctgccaacgaaacactgtcgcagctgtgggaaagtggagagagaagcaccagctcggagcacgaacgttttgcacttattggctggcctgcttccgccgacataatgaacgcagtcgcattgtttggaaaagtgtcctgtgtgcctgtaattcttgcacagtgctacaacgctccgaatgcttctcagcgccgaacttgatgaaaatggatgccatttcgctcaaactctcaaaatcttcgagaagagcaatgcatctgttgagtttgtacccctttgccgggagctaggtgctgccatcgttgacttgggtgacactacactgatccaggcgtttttcaagaagtatgttgcccagctgaaagacaaggacagacagttatttctccaatggcttccagctctcgtgcgcgcatttggatgggcatacgttagtgctgccacactgaatgccatcgacgtgcaatcaactgaaattcgctcggatcgagctttggaactcgcaaacacactccatgacaacgatgctgcacttctagctctcgtagcgtttgcgctgaagaaagctcacgcacggtgctctggccacgccgatgcattcgtatcttcgggtaagatcatcacacttttaaagcttgcgctggcgtgtggaaaccctcaaatatttgccggtctatcaaccatactgaacaagatcgatggcaatcttctccacacagtgattaatgcgctctcgaaatacgtcaatgactcgagtttacctgaacaacgtgctacgctggcctcacttgcagcgagacgtcgtgaatggctattcgctgagatcgaagacacgaagcaaccactggacttgacgaagcgcgagatctaggcaatgctagccgacaacacaatcggctccgcgaagtacttttcaatcgtcgctgactttttgaaggtgtcaccgatgagcacgagattcctggggttaaggctctacctagtggacacatcgttcgagttcaagtcagtactcttggggactcgccatttcgcgcctcagtatgggggaccagatggcggaatacgcggaccactttaccggtggattggtgacgtcctggggggggggggggggggctttggtttgagtcgccataaccttttcggggctacaacagtgatgtcaaatggatgatgagggacggtctaaagttgtagcgggagtagtgcgtgccgcacttcatgcatgcggcaaccaatactgttttcggcatcgtcggtgacaacagctcgtccaagaacccagccatgaccgacatccttcgacgcatcatcaaaacgatgtacaaaacgcagcacgtcgaaggaaagggcactctattaagcgagttatgcagcgttatgaacccggagggtgtgcatccacgctagctcttaaacttccgcacgcatcgattcctgggactcacgcgcgtcgtccgacgcattcttctactctgggatccattggtgcaatggtacgaggagcgggccacaaaagcccgacgtgagaacgtgatgccgccggagtccttcccactagctcgggaaaagatggaatgctctcactgctggagccgatctcgaaactaaatcagattggacaggccgagtcggggggaccaatgcaacgtgcttcttggactctacaagctccgaatatccttgttggacatcaccacagccttgaaggactgaagacggagaatcggttcttccgaccggatgagctgtacgatctcgcatcgacaacccgttcgctacttcacaaagggtttcgtcgggttttcttccggcggtacaccgatcgtgataccatgaacgtctgctcctttgcctttgagatgcaactatttcttcaccccaacttcaagcatccatatggagcgctgataaaggtgttaccaaggtcaatatacaggcaggtgcctcccagcaggtagctgaccgacactacacgaagattcgacgcattatcattgacagcgtccgcagcatcatgacagcggctgacgccgagccgacgtcgactgatatcgttgccccaccgccagctactgggttatcagaggacttcgtggagctcttcacggagacagcgaacgaggtggcaccaccacatagactgcggtgcacgagcaacgcatcgacgatgagctcgaccgctggctgacaacgcctacttcgcttcaagcgattcaacccggtgcgtttgactcagttctgagcttctggaagcgccagcaagagctgggcaacttcctgcttcttcccttggttgcgcgcgtgctgttctcaatgccctcatcatcggcccaaattgaacgcgactttgggatggcaggcaggatggtgacccccaccgcagctcgatggcgccttacaacgtggacatggccacatttctgagctgcagcagaacttacgtgggtatcacccagtacccaaagttgtcgtcgagcacagcaaaggatcaagtaccgtcaaacgccatggtgagcatggagcgagagttggacgacgagttcggatcgttgatgaacaaaggcatcgagttgggactctccgacgacgaaaacgacggtattaccgaaatgtagcgggagcgggctggggcggacgaaaacgtgagagaacgggagcacgtgtggaagtggaaacgggctatagctgccgtggtagagttctagccatgcatgtgcacgaaatgagtgtctttacttttcatcaacacgttctgaccgtgtttggtgttagcttcgctatgcagcatatgtaaatagtatttcgctttcacctatgctttcgtgctggtcgtttgattactagcaactctgtaacacgcattgcagcgcgtacacggatcgcctcctgtgtttcaagctagattcgctcgatttgagatcgatctcgcagtattcgcgaccgtgggcacacaggcgggttgctggaccgggtggaagctgctgaaacccgcgtagttggtgtcctggctgccgctgcttcttttctgcggtttgctccagcggctcgtgataatgcggtggtggagcctcgcgtgcttgcagttgcttctgtagggcccatcgctgctcctgttgaggaagttggcgtcggcgcgaacgttgggacgatggccgtggacttgtctcgacttgatacagatattcacatcggtgttcttgaggacatcactgtattatgctggtcctgtggtacgaactcagagtgccatcagttcacggggttttgtctcggcagtcttcttgaccaccacgatggctgggcgaaaccgttcgcctgggtggttgttagccctctcttgctcctgatcctgacgcatgcgaatcgcgatgtcgtgttgatctagcccgccgttgatcagctctactacgcgaacctctgtacgagcggttgttgcctcttgcactacttcaaatttgcaaatgtcgtggcgctcttacgcagcacgcttgtgctcctcctctaccaggttgtgttgcttgaccctggaagactgcaatgtgacttgcaaaacgcctggtgaggagatcaaaagagatcatctttgaccaataaaacgagatcttgtttgccaataaaaaaagcaatttgcagagcgaaccaagttctcgccctagctcggttcgaatgaaaagtaagcgaaccaagccccccccccccccaccccccccccccctccggttcaggtaaaaaagaaaagaaaagaagggtgaaaccgtggttccagttcagttcgtcccaggggtgggaaattcacgaagtgtaggaaagtgtaatagacttgcgaggagagctgctggtctttctactcagtccacaaatggaaagttctgtccgtgcagctctctcaagtctaacctaaagctctacactgccagtcatactgtacaccactcgtacaattgcctctctcacattgatggtcgcacgctcttcaattgttttcgtgaacccagcagccgcagtcaacggcaattcgaagatgtcgttgggtacgccccgaggcttcactgctccagcaagttctcacttttcctttcgcaccgtcaagcgcagtcactggtctccaacctccatcgcctgttagtagcgttgtatcaagccctatgtcggggaagggtgcgccaggaaagcgcaagcgcaagtgacacccatttgatgacgggaagagcgatagaaatggcactgaaggtgcatgcccgaactcggagggcgatgatgacctcgatgaggatgacgtagattatgaggacgcccaaccagtaacgacacgtccaagcaagaggcctgacgtcgcggagtgcatgaagggcaacaagaataccagcctcgtatatgtgaagatgtcactaggttccttcttgacaggcgaggagaaactgttgctgtcattcgatggcattctcgtagacttgagcattggattgttaaatgcctacgcgctgctgaacatccacatgatacggtgtgtgacaaaggacttcccattcctcgatttgagcagaacttcgtttgccaatgcttgacagacgtaatgtttaacgacagcaacgtgcacatagacgctgaactacatatatcgttggagctatacaatttgttgagaggctctaacgcttctcacgggcgtcgcgctggtatcaagaacgggtggcaacaggcgcagctcgggagatgatgaccgctatccagcatgcactcaaaaatgagtttccttcgccggtttaataaggtgctgcgggtatggtgtagacagaagcactggtagcacacattattgccccagagttcgagcggactccacccgacattcctgatcgtcagcgcctcgacaacgtagtcaacgagtggcgtggagaagtccctcagcgtcggagtgagctggtcaacttcacggcccaccgactggtgcttctgacttatcgactcctgcaaatgattgaggagcgtaacgacagagttgagcaaagcgtttgcgctgtttaagtgacaggggcgtctgattttgaagttagactaatccaagctgaagttatgaagacgttcactgttctaccaacaaagcttggatttggaattagtcacctcacgatagatttgattagtttccgggaactattagtccgcaacgacattgctgttcctccgtacagatcgaagtggaatgaggtgagatacatttattggagacggttcttccgtattgacaaagtggagactatagagtttggtcatcgcagattcacacgagagatctcggcggacggcaagtcggtgaacatcaagattcggaagcccgaacgtgggccttccgagcccaatgcaaatgacctccaagctgccgacattggctctagatgggggttggatgcgagtaaatgcaacctattggtcaccacaaaccaggacgacgaaacggttgtgtgctctggcaaagagtatcgcgaagacgcttacattacgaagagcagccagaagcatttgagatggatacgggatcgtccgggcactggagctgcttttgcgagcatgccgacgaagaggagcatgttgctaaagcggtggcgggagtacgtcccatttatgacgcagcacctgcatctgctagtgacccccgtgcagcacaaatcgtaccgtcgccatcgacttcgaaggagcttctttaaaaagaagaagctatgtgagctctaccagaaacttgtatgtcacggagagcgaatttttatcgtcattgacaaccggagtaacggcgatccaaatggagcgatcaaagggaagccatcggcactcgtgcagaaattggcgctggagttgtcaaagacgtcgaactgtacggtcatcattattgccgagttccggatcagcaaagtgcactttggttaccaacaagaactgtccaagcaatacccgtatcgaaaggccgctgtccacgtacgcgcagtccacgaaagacgagccacgtacccagtttacggcttactccatttcagaaacaaaggttgttctggtatgagtgtgaacagggacgtgaatgcttcgaagaatatgctgcgcctgctcgattgtgaactcaactagactcgcccagtcacctacacgcatcaagcaaacagatagataacaatacatttctagtgtcgctgtgtgcctatctaggggtgaggaagattacattgtgatagccggctcagaaattagcccttttggaatctgtaggctacgtacctataggacacccttaggagaataatgggttaaagaaaggctcaatgaagcctggttgatttctgcatgaaatatttttcaaaacggtgatgtcctcctgtggatgaatatacttgtctttccgacagatagctcagcacgattgttgtctgctcgctttgcaggccattttgaccaattttaacacgtaaagccttaattgtgtccaattaaaatggttaaatgtaggtttgacattctgacaccttccgacaaatatgtgtctgaagtatttccaaaatatcaatatcttcatgcaaacaacaactgtaaaacgtatttttcaaatataccagccattcgtacaatgaggagtggccctaatgtaggaacactgaagaagatgaggtcgttggttggatgtccaccgttggtgtacactttaccagaagagtaacgtagccatggatcgtgcgtgatgcgtgggacataagcaaaataaacaaaggctgtgcttatgtcttcaatatgccacgggaagaccgcaaggtagcctgagtgctgtgcagctggaataaagagattgcgcctcacgttgtggacgtcgcgacgctggaccatccgacgcgggagcggcttgaacgcttgcaggagctcctgtttagcacatgcacaggacgcaaggaacaccggttcaacgtgagtagaaaagtgcttagcgcttacctggtacggtactactcgcagcttaaagcgctagttcctgcagtgccgatcatcatcctgcttagtatctgcgggcatatcgtcaactgcattgcttgagtggtctgtagctggcggctccacctgctcaagaccaagaacaaactcaagacaaggcgcacacgttgccgagaagatggccaccttttggctgtgagtgatgggcttatcgcctcgaacaaggtcatggctgcatcgtcgaggcggtactactaaataataagggtccacacgcaacaacggaagaaggacaactgcaagagccatcagatcaagaaccaaatcccaagcacagaaaaaagctgcgaacctgtcggccacatggcttgcgtggtacaagaggataccacgcgtgtgggactcaaccgatagaagtcggagtgtcgccacgtggtcgcctccatgaagctctccctcgacgatagcttcgttgtgaatatcacagcggaagaattcaagaaccaagtcctcaacaccggccgcgcggaaattggactgctggagtttctaaagctagcggcgtcaacgaagggagccgggagtatcctgcgtgcgctgcacccgctgcatacgtccggtatattggacgagcaaatcatggtctacaggcaccaactcgtcataggaagcaccgaagaccctgcacatatcgacgcgcaagacatgctcggcattgtaggtcatgtgtgagaacggtgaagttaattcattccaatatatgtattcattcgacataacatcgctgcttaacaagacaacatattcatgtgtacacatccacgcgcgcaggtcacctaatcaaagcgtaggctgcacaccgcacgatcgcaccgcgctcactcacccaccacatgcacagatcctcagcaatactgcacggttcaaagcactgatcccgacccaatcttgatcataaacaccggccaaaacgtggctgttgacgaagctagtattgcgtgtcgttcgcaatacgctcgccatattatagttttctatccccaaaaccagacagggaaatatcacttcaagctgtatgcttgttgctgctcgacatcatggtatgtcgtgagtttcaaattgcactgtgcaagtgaacaaatagaccgtttggacggcgtggttccaagtccagaggtattacagcttgttgatctgacagcgaagtcctttgaaatttgttcccacgtaattgaagttgtggagtctttgaaaggatctaatcgcgttgtcaataccgataatatctacacctcctgcctgctactagaatcactaaggtcgattggcatgtatggtcgtggtacagtgcgcacatccagcaaacacttcccccacttcacaatgatccgaaaagctgatggaaagcctagaggctacatgaaacaaggcgtgtgcttagagtaacatatcgtagcggccagttggatagatggctctattgtgaatacagtctctaatgttgacgcctcctcttcctctacggtatatcgtcgcataaaggaggaacgtgttgcgtttaaagccccgacctgcatcggtgaatacaacgcggggatgcagggagtcgaccatcatgatcagcttcgcggtcggttttcgctagccgatggtcactcatttcagaagtggcataaaaaaatagcaatggctatgattgatatcgcgaggtgtaatgcgtatgtatgcgatagcttggcacgtgatacaagcgagatggatgttgcacagcctcgcaataatacgagggaaagcgcccgtgacagccaccgggcgtttgtcatttcaattgtgcgagaattattcaatggaggttgaaagaagtgcattgacagtgatgacggaattgtgtacacttcgaatacaaaacccatgacaactgctgccaatttgaccagaaatacgaatgagctagatacgccagcacatacatgtgtagcaaaagaatcgtggattgtgttacaaggaaggagtcgggcaatgcgcaaatgcattgtttgtaagttcgagggcagggatgccacccagaaaacggattactgcgagacgcatcgagttgcactctgcaagcgtacctatcctaccgaccacagaaaaccgcacctgtgtcaacagcaaactggacgtgctggcaaaagtatcatttgttctacttgccgaagcaggtgtgtacagttggcggaaatctgagaaggccgtctccaatttataaagtacagagctcgttcttgaaggagcgtcgagacaaagagaatactgaagagaacagcaaccacgactagcgttcagctcatatataatactgaaggtaaaagtaggcactcaatacattgtgtgcacttgaactacgactgaaaatcaaccagttacttggactcacgacatcctccctccttgtacattgacccgtgcaatgtgcgccgccttgttgcctttcgtcaaatcatagagcacatgcatggtgctgcatgttaccatcagcagcaatgtctccatgcttcctctctaggcggctccagcaccttgatgtcacgtagaattctgttaccgggctcgtgatgtcgagatcgcctcgcggcgaatccgaggcagtccgcgggctgtcgctagttcgcccccgcaacgggcgccgtcggaaactctgcgtccttgctgcctttcgccttgtagggctgcgccaccatctcgttctgacggtgtctagcgtatggctggtgcatcgggcgccgtattcgcgccgtactggatctccttagcctcgtccctccttattgctcgcgccgttgtgccgcacacgtgcatgatgtagcacaataatgtcgggataggcgccaagccttacgctcttgttggtgttggcgcaagtagcttgagagacacagtagcatgagcgtgccgtgtgtgtttaggcgcgagtaacttgagaaacacaatagcttgagcgcgccgtgtctgttcaggatttagatcccacgttgtgataggctgtcaacgctgacattttgctggaggggcgcaaaaattgttgatcaaaagtcggtgccgtatcttaacttcactataggctacagcagtctcattaccttcttttggaaaaggatacttcatgtatcattctggtaacgatagggttaacggacatctgtgtttcttcatcttcgcacaatacaggttgggacgctgcgataaatctcgctctagttgctaccaggtcaaacggcagcgattttcatcgacacggcttatcgccaccatggcttaccgacgtcgatcgtgtccgatcgcgatcctcgattgactgcagcactctggccaacgctattccagtcactgaggccatgctcaacgcgtcacattcagagacggacggccagagtgaacgcgtaaacagggttgccaaggacgtctttcaaagcttcgccacgtcgtttcagtcgtggagcacactcctgcctctcgggtgaacagcgcggttcacgcgtctacgggtctcacaccattctacgtgaactatggtcgacatctccgagttccagtgctcctcggtatggagcgctcggtttcaagaagcgaaactggcgaagacaacgcggaccctaccgtatcacacaaaatatcaccgtcctccgatacacctttggctagtgatttcgagtccgctaccgttgattgtcttgagagtgctcacaacacattctctaccttgctgaatagggtcaatactcgtcagagttttacaagaatgctgcgcaaggagtgcgcgcgcataccgccacgaagacggcataatcccgcattgcaacttggacatctcaggcgttgatcaatatgcgtcaacgtcattgtgccgtcgaataccaagacgcatcggcgcggctgagtcacccgtttcaatgccagctaacttcgaccccattccagtgccgctgtcacacgacactgcggttgtctacacgttcctacaacagcgcgaaccggtgacacgctatgcgcgctacatgatcgcgacagcgtcgatcacatcccgaccggcgcgggcgtaacattttggagaagttcgccgtgggcggctatgtgtattgtccacgacccaccgctgttacaaattggacacgaataagctcgcgcctcgctttattggaccatttaaagtgacgaaaggttctgaagacgcttacgcactacacgttcctacggctctacatctgtatccaaccttctatgtcggtcggctcggtcgatacaacgcggtgactatcgccatcgacgccgctaactctgcggcggcgcgtggcacggcgcttcttcccgacgctcccgatgacgttgctcctggttcaccacaggacgggcaagacgatcatgatgctgagcccattgatagtgcgggttacgtgcggcatatcgtagaggagacgctgcagcacgacgacgcgcatgctgccacacaggatgcgcgtcaaggccacgacattcgttaccgtgctagcaatattcctccgcaccgccaatgccatgtacgttggctgggttcaatgactgatagttgaaacctcgttcgggtcttgtcgcggatgttccagactgcgtagcggcgtatccgcgccagacgtgttgatggtcacctcaggacctctgccaaaattcaagtagtcacacgtcacagggaaaatatggtggacacaaatatgggcagcagcaaattacttgtgttcagtatgcaggtctaaacgtcggcgaaagctacaactgagttctggtcgagagctacaggcccttgagtgagcgcggacccagctaactgcgccctgcatcttctgccggatgccaccgccttcttttgctgcgctgccacttggcgcttcagtctccctgctgctgcagcttgctgacgtgctgcttttcg

SEQ ID NO: 19 - DNA, 21782 bp, Chlorella sp.
  variation 1..1067: note = n is any nucleotide
  variation 5313..9306: note = n is any nucleotide
  variation 13283..13307: note = n is any nucleotide
  source 1..21782: mol_type = other DNA
nnnnnnnnnnnnnnnnnnnnnnnnnnnnnnnnnnnnnnnnnnnnnnnnnnnnnnnnnnnnnnnnnnnnnnnnnnnnnnnnnnnnnnnnnnnnnnnnnnnnnnnnnnnnnnnnnnnnnnnnnnnnnnnnnnnnnnnnnnnnnnnnnnnnnnnnnnnnnnnnnnnnnnnnnnnnnnnnnnnnnnnnnnnnnnnnnnnnnnnnnnnnnnnnnnnnnnnnnnnnnnnnnnnnnnnnnnnnnnnnnnnnnnnnnnnnnnnnnnnnnnnnnnnnnnnnnnnnnnnnnnnnnnnnnnnnnnnnnnnnnnnnnnnnnnnnnnnnnnnnnnnnnnnnnnnnnnnnnnnnnnnnnnnnnnnnnnnnnnnnnnnnnnnnnnnnnnnnnnnnnnnnnnnnnnnnnnnnnnnnnnnnnnnnnnnnnnnnnnnnnnnnnnnnnnnnnnnnnnnnnnnnnnnnnnnnnnnnnnnnnnnnnnnnnnnnnnnnnnnnnnnnnnnnnnnnnnnnnnnnnnnnnnnnnnnnnnnnnnnnnnnnnnnnnnnnnnnnnnnnnnnnnnnnnnnnnnnnnnnnnnnnnnnnnnnnnnnnnnnnnnnnnnnnnnnnnnnnnnnnnnnnnnnnnnnnnnnnnnnnnnnnnnnnnnnnnnnnnnnnnnnnnnnnnnnnnnnnnnnnnnnnnnnnnnnnnnnnnnnnnnnnnnnnnnnnnnnnnnnnnnnnnnnnnnnnnnnnnnnnnnnnnnnnnnnnnnnnnnnnnnnnnnnnnnnnnnnnnnnnnnnnnnnnnnnnnnnnnnnnnnnnnnnnnnnnnnnnnnnnnnnnnnnnnnnnnnnnnnnnnnnnnnnnnnnnnnnnnnnnnnnnnnnnnnnnnnnnnnnnnnnnnnnnnnnnnnnnnnnnnnnnnnnnnnnnnnnnnnnnnnnnnnnnnnnnnnnnnnnnnnnnnnnnnnnnnnnnnnnnnnnnnnnnnnnnnnnnnnnnnnnnnnnnnnnnnnnnnnnnnnnnnnnnnnnnnnnnnnnnnnnnnnnnnnnnnnnnnnnnnnnnnnnnnnnnnnnnnnnnnnnnnnnnnnnnnnnnnnnnnnnnnnncaatccccggagctggagcgcgtcagcagcatctcgacgggaatcgcggtgtggaggcacaacaacccctttgccttcaagaggaggcaatggaacaccgttgaaatgtactgtgcactcaacacgcctgggaaaaaggatggagtcatgcaactcacggtgaacggaaagtcacagaggctcacgtcggtgcggtacaggtacgacaacatgctcatcacaggcttccacctcgtgtccttctttggggggggcgacctgtcatacgcaccaccagctacgacacacgcgtggtttgctgattacaagttcacgaaaatgggttgacgtgtatcgggacgtgtgcccaggtataaagtcagggtcacatggaccatccggtcactaaccatgaaacgacgtgccgaagcactgagcacgacgcacaaaagacacaaaggcaacaatgatgagctggaacaagatatcgacaagtacaagaagctcctggcacaacgagaccagtgcatccaacaacgagacgagtgcatccaacaacgagacgagtgcattgccgcacagtccgcatgcatcacccaacagtccctgcgtatcgcccaacgagacgcgtacctggcccagcgggatgcgtgcctggcccagcgagatgcctgcatcgccctacagtccaagtgcatagcagaacgagacgcgggcattgccgaacgagacgcgggcattgcagaacgagacgcgtacatagccttgtgtcaacgggacttccaagagcaagcgtattgggacaccgagaaactgaggacaaagtaccacttcctggctctcagcctcgcgtcaaggacgaacaagttcaaacgacgcagttatccgtccaaagatttcccccacggtgctgtcatttaatatgtaaatgacgtccagaaaacgtccaaagtgggaaaaccacggacaccgatcaaagtcaacaagccgcgcggtgagagtatggcagtgtgccacggtagatttcgtgtggtcccattcgtgtggttatgtcatcccgtgccttgcatgctgtgccacgtgtgtggtgggcactcaagcagatatcggtatgacggtagcaaaaacaaagaaacaatggcgcgcttctggttggctatcctcctagcagcgtgcgtgaccgggtacgcctggggctggtgctgctgccaggagtaccaggagcacgtgttcaagctggtggatggtgcctactaccccgcgtgcctgaacaagacagactggccttctccactgtacacactggaggcgaagtcgagcgccctcaggctcgcccccagcctcggactgggactcgtcgctgccgtgctgctgtggctctcatgcatgtaaaccattcgaaattagctcccaggaggcacgcattgagagccttcgagtccaagaaacgggttgaaagaaccttggcccatcgcttgatgggtgcacggccgtacacttgcctgttcgtagagcgcgtgtggagccaggcaaatattctatgcacacggcatgccgaccgatagcagaccactgaaatcattggctgcaacctcccaagaagaagaacctccgtgcaccagcaacttgtcagtgtgcatgcgcaggaccctggtggacggcctggccatcattgtcgcgtacgcattcatcgtgtacgtcacggaacatcgactgctgtccgcactcaaggtggtgaagttctacggcctgtttgcagcactggcgttcctgttcaggctgatgagtgtcgagctcgaccaactcacacgcgtggcagggttccaattgggcatcaaactgttctccgtgctggggtgacagacaatcgcacgcgcgggtcaggttgacgtgaacagggcacgggcctcctcggtgtcaaggcaccaatcgaccatgcgactagggtgccaggtcctcgccatgagctcctccttgtacaccctggtctgctggacgcagctcaacgcttccgaacccttgtacaggtcctggcatggagcgggcttgcgcctgacaaccctggcgacgccttgaacgatccagtcctcacacccgtttagaacgtcatcgcatcttccgaaacatcagcttcgcggcgccgacttccatctggtcgttggcacgtcgccaaatgtctccacgaccgtcctggatatcccggaggcgtctgtcccgtttaaacgatactttcaaaggcaatcacatgtcgcgtgtgacagacgacataatactggcgtccttccaagaatcgtacgatccagaggtcctgcggggttgcacccacatcctgaacgttgcggaggagttgaacgtgtcgggtcgcgtggacagggagtacgcgaagcacggcgttccggacgattgcagcgacacggacatcacgcgcatcctggccccttgcattcaattcatcgcagacgcccacgctgggggaggtactgtcttggtgcactgcctggaaggggtcagcaggtcggtgtgcgtggtcctggcatacctgtgcgtgtctcgtggcctggcgttcgacgatgcttacacccgcgtgcgtgacgtgcgcccacacgtcgatgtgtttccaaagtacgaatccgacacaaggcgctgggtggcctcggagtgcaacggcgtgtagaaatctgtacgtctcgttattgttacatcagtccaatccatattgttacatcagtccaatggtaaagctttcacgacagttgtcacggcaactagttgttgccctacgtccccaagacggcgcaaatgctcctccaacatgcgcttgaggacgctcaaatcttccatcatgccgctgcggcgcacgtgtgcgtattcatccaggtcttcgtgatatctcagataccgccccaagtcctgaacagtgcgagcaaacatctccagcttttctgcttggtacaggagctcgtgccccgccattgccaacgtgtgcactgactcttttggcagagtcattttcaaagaatgaacaacaccgcgcgacctggcttttatacctggcttgtgtaccttgccacgctgagtccacgttggcacgccagcactacgcaccgcgacgcgtggctcggggcgtcgaggaaaggacctcagacttgaataccttcagccagttcagatgttgctcccgctgttcatccagaatttgcgattggaactctttgttgttgttggcgtgcatgtctgcaatgtctgcggcgctgattctaacgcccttgcgagttttgtactggggagatttcagctcgagtagcagctcagaagcacgctgctggaattctgcgttgtgtttcggaacgcagtatgttgcaatgtactctatatggcccaggttttgagcgagccttttggacacaaacttgctcaatggcgtgtagaccgttcctgtttccgtggtctcaatgacgtgccgcttagccaactgcagattttgcagtctgggtgggccgtggataccgtgcatgttccggaagatggagcatgcaccgtcttcgggtggacatgccacgacaaggagtgccatccgctcgttgtcgtggtagcagtccatcatcacttcgacttctgcttggcttcctgaagggagaagtttggtcttcacaggcttggtggcggtggccgactcgtcgacggtggcaagtgcttcgttggacacttccttagacacagctgtggctgacacactgaagccagtatcggtgtcaccttccccggatagctgaacatgccttgtctcgattcccgtgtggccgcacttcctcgattgatgcttgcgaatgtccccgcggtgcgcactcgtgtacgtacatgtcccacactgaaggagggttatggggtagacatactccttgaaactacccaaggccatgatgcctgcgacaggcaccctctttaagcccctgtctgttcttttgtgtcttcagaagcactttcaagacacgcgcaggggtgcattgggctccactcgaaaggtgtggcgtgtgcgttgccgtcaccgtctcctgaaatctgcataatgtgcgacacaatgccaacatcaccgcaactccagttttggtgccgcttaatgttggatgcaaactcactcgtgaatgcacagttgacacattggtgcatggtgcaaaggaacacatagggtttgagactcatgaaacttgaatggtttccatgcctttaagcctgggatggtatatcagcagcaccagcgtgacacacnnnnnnnnnnnnnnnnnnnnnnnnnnnnnnnnnnnnnnnnnnnnnnnnnnnnnnnnnnnnnnnnnnnnnnnnnnnnnnnnnnnnnnnnnnnnnnnnnnnnnnnnnnnnnnnnnnnnnnnnnnnnnnnnnnnnnnnnnnnnnnnnnnnnnnnnnnnnnnnnnnnnnnnnnnnnnnnnnnnnnnnnnnnnnnnnnnnnnnnnnnnnnnnnnnnnnnnnnnnnnnnnnnnnnnnnnnnnnnnnnnnnnnnnnnnnnnnnnnnnnnnnnnnnnnnnnnnnnnnnnnnnnnnnnnnnnnnnnnnnnnnnnnnnnnnnnnnnnnnnnnnnnnnnnnnnnnnnnnnnnnnnnnnnnnnnnnnnnnnnnnnnnnnnnnnnnnnnnnnnnnnnnnnnnnnnnnnnnnnnnnnnnnnnnnnnnnnnnnnnnnnnnnnnnnnnnnnnnnnnnnnnnnnnnnnnnnnnnnnnnnnnnnnnnnnnnnnnnnnnnnnnnnnnnnnnnnnnnnnnnnnnnnnnnnnnnnnnnnnnnnnnnnnnnnnnnnnnnnnnnnnnnnnnnnnnnnnnnnnnnnnnnnnnnnnnnnnnnnnnnnnnnnnnnnnnnnnnnnnnnnnnnnnnnnnnnnnnnnnnnnnnnnnnnnnnnnnnnnnnnnnnnnnnnnnnnnnnnnnnnnnnnnnnnnnnnnnnnnnnnnnnnnnnnnnnnnnnnnnnnnnnnnnnnnnnnnnnnnnnnnnnnnnnnnnnnnnnnnnnnnnnnnnnnnnnnnnnnnnnnnnnnnnnnnnnnnnnnnnnnnnnnnnnnnnnnnnnnnnnnnnnnnnnnnnnnnnnnnnnnnnnnnnnnnnnnnnnnnnnnnnnnnnnnnnnnnnnnnnnnnnnnnnnnnnnnnnnnnnnnnnnnnnnnnnnnnnnnnnnnnnnnnnnnnnnnnnnnnnnnnnnnnnnnnnnnnnnnnnnnnnnnnnnnnnnnnnnnnnnnnnnnnnnnnnnnnnnnnnnnnnnnnnnnnnnnnnnnnnnnnnnnnnnnnnnnnnnnnnnnnnnnnnnnnnnnnnnnnnnnnnnnnnnnnnnnnnnnnnnnnnnnnnnnnnnnnnnnnnnnnnnnnnnnnnnnnnnnnnnnnnnnnnnnnnnnnnnnnnnnnnnnnnnnnnnnnnnnnnnnnnnnnnnnnnnnnnnnnnnnnnnnnnnnnnnnnnnnnnnnnnnnnnnnnnnnnnnnnnnnnnnnnnnnnnnnnnnnnnnnnnnnnnnnnnnnnnnnnnnnnnnnnnnnnnnnnnnnnnnnnnnnnnnnnnnnnnnnnnnnnnnnnnnnnnnnnnnnnnnnnnnnnnnnnnnnnnnnnnnnnnnnnnnnnnnnnnnnnnnnnnnnnnnnnnnnnnnnnnnnnnnnnnnnnnnnnnnnnnnnnnnnnnnnnnnnnnnnnnnnnnnnnnnnnnnnnnnnnnnnnnnnnnnnnnnnnnnnnnnnnnnnnnnnnnnnnnnnnnnnnnnnnnnnnnnnnnnnnnnnnnnnnnnnnnnnnnnnnnnnnnnnnnnnnnnnnnnnnnnnnnnnnnnnnnnnnnnnnnnnnnnnnnnnnnnnnnnnnnnnnnnnnnnnnnnnnnnnnnnnnnnnnnnnnnnnnnnnnnnnnnnnnnnnnnnnnnnnnnnnnnnnnnnnnnnnnnnnnnnnnnnnnnnnnnnnnnnnnnnnnnnnnnnnnnnnnnnnnnnnnnnnnnnnnnnnnnnnnnnnnnnnnnnnnnnnnnnnnnnnnnnnnnnnnnnnnnnnnnnnnnnnnnnnnnnnnnnnnnnnnnnnnnnnnnnnnnnnnnnnnnnnnnnnnnnnnnnnnnnnnnnnnnnnnnnnnnnnnnnnnnnnnnnnnnnnnnnnnnnnnnnnnnnnnnnnnnnnnnnnnnnnnnnnnnnnnnnnnnnnnnnnnnnnnnnnnnnnnnnnnnnnnnnnnnnnnnnnnnnnnnnnnnnnnnnnnnnnnnnnnnnnnnnnnnnnnnnnnnnnnnnnnnnnnnnnnnnnnnnnnnnnnnnnnnnnnnnnnnnnnnnnnnnnnnnnnnnnnnnnnnnnnnnnnnnnnnnnnnnnnnnnnnnnnnnnnnnnnnnnnnnnnnnnnnnnnnnnnnnnnnnnnnnnnnnnnnnnnnnnnnnnnnnnnnnnnnnnnnnnnnnnnnnnnnnnnnnnnnnnnnnnnnnnnnnnnnnnnnnnnnnnnnnnnnnnnnnnnnnnnnnnnnnnnnnnnnnnnnnnnnnnnnnnnnnnnnnnnnnnnnnnnnnnnnnnnnnnnnnnnnnnnnnnnnnnnnnnnnnnnnnnnnnnnnnnnnnnnnnnnnnnnnnnnnnnnnnnnnnnnnnnnnnnnnnnnnnnnnnnnnnnnnnnnnnnnnnnnnnnnnnnnnnnnnnnnnnnnnnnnnnnnnnnnnnnnnnnnnnnnnnnnnnnnnnnnnnnnnnnnnnnnnnnnnnnnnnnnnnnnnnnnnnnnnnnnnnnnnnnnnnnnnnnnnnnnnnnnnnnnnnnnnnnnnnnnnnnnnnnnnnnnnnnnnnnnnnnnnnnnnnnnnnnnnnnnnnnnnnnnnnnnnnnnnnnnnnnnnnnnnnnnnnnnnnnnnnnnnnnnnnnnnnnnnnnnnnnnnnnnnnnnnnnnnnnnnnnnnnnnnnnnnnnnnnnnnnnnnnnnnnnnnnnnnnnnnnnnnnnnnnnnnnnnnnnnnnnnnnnnnnnnnnnnnnnnnnnnnnnnnnnnnnnnnnnnnnnnnnnnnnnnnnnnnnnnnnnnnnnnnnnnnnnnnnnnnnnnnnnnnnnnnnnnnnnnnnnnnnnnnnnnnnnnnnnnnnnnnnnnnnnnnnnnnnnnnnnnnnnnnnnnnnnnnnnnnnnnnnnnnnnnnnnnnnnnnnnnnnnnnnnnnnnnnnnnnnnnnnnnnnnnnnnnnnnnnnnnnnnnnnnnnnnnnnnnnnnnnnnnnnnnnnnnnnnnnnnnnnnnnnnnnnnnnnnnnnnnnnnnnnnnnnnnnnnnnnnnnnnnnnnnnnnnnnnnnnnnnnnnnnnnnnnnnnnnnnnnnnnnnnnnnnnnnnnnnnnnnnnnnnnnnnnnnnnnnnnnnnnnnnnnnnnnnnnnnnnnnnnnnnnnnnnnnnnnnnnnnnnnnnnnnnnnnnnnnnnnnnnnnnnnnnnnnnnnnnnnnnnnnnnnnnnnnnnnnnnnnnnnnnnnnnnnnnnnnnnnnnnnnnnnnnnnnnnnnnnnnnnnnnnnnnnnnnnnnnnnnnnnnnnnnnnnnnnnnnnnnnnnnnnnnnnnnnnnnnnnnnnnnnnnnnnnnnnnnnnnnnnnnnnnnnnnnnnnnnnnnnnnnnnnnnnnnnnnnnnnnnnnnnnnnnnnnnnnnnnnnnnnnnnnnnnnnnnnnnnnnnnnnnnnnnnnnnnnnnnnnnnnnnnnnnnnnnnnnnnnnnnnnnnnnnnnnnnnnnnnnnnnnnnnnnnnnnnnnnnnnnnnnnnnnnnnnnnnnnnnnnnnnnnnnnnnnnnnnnnnnnnnnnnnnnnnnnnnnnnnnnnnnnnnnnnnnnnnnnnnnnnnnnnnnnnnnnnnnnnnnnnnnnnnnnnnnnnnnnnnnnnnnnnnnnnnnnnnnnnnnnnnnnnnnnnnnnnnnnnnnnnnnnnnnnnnnnnnnnnnnnnnnnnnnnnnnnnnnnnnnnnnnnnnnnnnnnnnnnnnnnnnnnnnnnnnnnnnnnnnnnnnnnnnnnnnnnnnnnnnnnnnnnnnnnnnnnnnnnnnnnnnnnnnnnnnnnnnnnnnnnnnnnnnnnnnnnnnnnnnnnnnnnnnnnnnnnnnnnnnnnnnnnnnnnnnnnnnnnnnnnnnnnnnnnnnnnnnnnnnnnnnnnnnnnnnnnnnnnnnnnnnnnnnnnnnnnnnnnnnnnnnnnnnnnnnnnnnnnnnnnnnnnnnnnnnnnnnnnnnnnnnnnnnnnnnnnnnnnnnnnnnnnnnnnnnnnnnnnnnnnnnnnnnnnnnnnnnnnnnnnnnnnnnnnnnnnnnnnnnnnnnnnnnnnnnnnnnnnnnnnnnnnnnnnnnnnnnggaacatcttgacagctctttggaacaacttgacagctctttggaacaacttgacacaaggacgcaattcagtgatgtgtgtggcttgtctcgctgtcggcaaggcttgctgtctctgaggtgtcagtcacgtcagtctcgtccgtggtctcacgagtcgattcctgggtctccttggggacctcgtgtgcgccatctttgttctgttcttgccgcagcttgtacttgccagtgtccttgtcaaactcgtacttgccattgtcgtctcccagctcgtgcgtgatggtgcggccgtagtgcaacttgtagagccagcccagcgtggccccgtcagccaggatcgtgaggaacaacccggacagcgctgcgtcgatgggcatggcaccgtaccaagagccatacttcagctgcaagtttttcaatatcacgtacaacacgatgtacaggaacgcccccaccaggaatgtcctcgcgttgcgtttgccgtgcccaggttcctttgacgcaggcaggaacgagtgacacgcataccacagcatgtcttggctgtccgcgtgacaaaacggatccgaatttgacgcgtggtaattacactaagacaacacgtggatgcatgccatgcggcagtgtcaatcggctgggactgtttgccgtcccaaaaaactattggtgtctatggtaattaacgcgttaaatctcgaactttaatatgtctaccctcaccacgacaatacacgccgtgcaatgctcatctcaggcaagaaggcggctgcacagctcggggtctgtctcgacaccctcagacgactcgcagacgacgggcagctcgcaagcatcaggctcccctccggacacaggcgctacgacatctcagacgtacttgccacaagcacacaccccggtgacaatgacagcctcaagcgaaaattctgctactgcagagtctccaggaaacaccaacagcacgacttgcagcgccaggtcgagtacatgcgcgaacgcttcccagaacacgagatcgtcacggacatcgcttcagggatcaacttcaagcgaaagggcctgcagaccattcttcgacacgcgatgctcggaaatgtccaagaggttgtggttgcctacagagaccgccttgcaagaatcgcgagtgacctcgtggaatggatcctcacaaacaacggagccaaactcgtggtgctgcatcaggcagtggacagccccgaaggagaccttgcagaggacctcatgtcaatcgtcaacgtcttttgctgtagggcaaacgggcgcagaaagtactcggaccaaagcaaagaagcctccaaaagaaggaaagaaaccccaagcgacacactcacggaaagttcgcatcttcccttgccgtgaagacggagagaagctgacgcaatggatgggttgccatcgggtcgtatacaacagggctctggcgtttgcaaagaagactggtcaacggaattacgcggagatgggcaaacggttcgtggcgtccagaaacatcgaggagccgtggttgaagcaatgccctcaggtcatccggagttgcgccgtacgtgacctcaaggccgccttcgacagcaactttgccaagcggaagatcaacccagaacacacatttgacgtcaagttcaaggccaagaaagacgacgtgaccgctgtgcgcatcgagcgagtgaacggtgcgttcaaggtgttggacgacggcaagcacgtctccttcttccccaagtcgttgaagcccatgggggtggaccccagagctttgcaaggcatcgtgcttaaccacgacatcacgctaacgaaggaccgtctaggcagatttacgctccatgttccctaccgtcgcgaaaaccaagcgccgaaggaacacgagacatggtgtgccatcgaccccggcgtccgcacgtttgccaccgtattcagtccagcagacgcctgcaagattggcgatggagccgcgacgagactggccaagttgtgcgcacacctcgacaagctgatatcggacacgaccaaagcctcgggcctccaaaggagacggaggatgaagaaggcacaagtgcgtgtgcggaatcgcatcgtacacttggtggacgaactccattggcaggcggcttcgtttctgtgcaagcactacacggacatcctactgccagtgttcgaaagccagaagatggcttgccggctgtcgaggaagatcggttcgaagacggcgcgctccatgctgacgctgagtcactataagttccggatgcgcttgatccacaaagcaagggagcatgggtgccgcgtgcacctttgcacggaagagtacacgtccaagacctgcacccgttgcggcgcgttgaagcacaatctgggaggtgccaaagtgtacaggtgctcttcgtgtatgctacgaatcgaccgcgacattgcaggtgggcgcaacatcttcctaaaaaacgcggtagctcttgattgagctgcctttgcctcgttagagcctcgtccaatgtgacgtgcagaagactccccctcatgagctgtggccatcgagtcctgtggcaacgcaggaagctgtgaaagcagtaatgactgacgggcgagcccagactttatgttgaagtctgtgagttcttgagttttaatctagcggtaacttgcgacatgacaccacgtcgagctgcttgctcaacgttttgcagcggtttggggcggtttacagtgtgcacatggcctttgcccctactcccagcacttatgacggcatgcgacaccaatgggcgatcgtgaaatttgtggatgccactgccgcccacgatgccatagcatgcctgaacggccaggtgctggacagcttgtgctgcatcccgctcaaagtggcccgttatgtaaggaaagcctagcacaacaggcggtacagagcccgtagaagtggccacaaaagcagctcagacatcttttccgcacttattcaatgaaagacgtggctctgatccaaaccttcggtggtgaggcgtactgcatcgagtgcagctcccgcatggtgccggtggcggatttgacggtggaggaaatcgaggcgctgaagaggctccacggaattgacggagcagatggggccgaggacgaccttgacacgtacaaggcgttggaagctcggctcgggaaacctgtcaggctcctggctgacgttgcccgtgacgtgcgcgttgttacgtgccaaacgtactacgtgtgacgtactacgtgtaacattcaatgtactatgtgtaacattcacggaccacggaccagtcccttgattttgttggttaagttgctgggcagcctcagcttggtggccagctggcgacgctgaacagcccagagctgctcgcacatgtggaaagccaggtgaccgagcaatttcgccttggagcgttcagcccgccagtcgtctacaagcccgtcgtcgtcgttgctgttgctactgttgttgctgtttcggttgcggaagtagttgcggtttgtgttttggggttcaacaatggcgtcgagcacgtcgtcgattgcaccctgggactgcctgtcgacacccgagtacgcgcccctcaagtcttgcaggctcttgcgattttcgtgtggagactgagggcgcatcatctcgttgattgcgaacaccgcctgcgcgtatgccttgaaaggtcccttgggcttgttcagttcctggcctgcgtacctggaaaacccaccccagaatagtccgccggtgacgtatcccaagagtgtctcgtaccaatgtagatcgccgttcaggtatgccttttccaccgtgagcccccgtgccttgagggctgacacgcgcttgcacaagtcttgcaaccataggatgcggtgcacctgcgtgtagttcttggggactttcaacgcggccctggtcaccggcttgcctgtcgcgggattgacaaagtaatgcgcggcattgaggtggcgtagtnnnnnnnnnnnnnnnnnnnnnnnnnaaacccaccccagaatagtccgccggtgacgtatcccaagagtgtctcgtaccaatgtagatcgccgttcaggtatgccttttccaccgtgagcccccgtgccttgagggctgacatgcgcttgcacaagtcttgcaaccataggatgcggtgcacctgcgtgtagttcttggggactttcaacgcggccctggtcaccggcttgcctgtcgcgggattgacaaagtaatgcgcggcattgaggtggcgtagttgccacgcgttggcctttgatggctcacgtttgtgcaggttgccacccggagccacgcgaagccgttggaactcggcctgtgtcaggttcatggagtgagtgacccttgtgcccttcttggctccggcaacggtccacgtgtaccttactttgccacttgggacggtgttgggggctgtcagcctggttttcttccgcttggggggcattggcttaagtttgcgtaagccacatttgaccgagccacatttgtgagtttacacacacacgtctgttacacacacacgacattcggatacacacgacatcattgattggtgaaagaactcgggcaaggccgtgatgatgtagcggcgttcattgtgcggccgctttggtgcatcatctgaatgtgttgacgctatgctcagtgggctgattgtcaaggagccttgaatcttcagctcacacttcaaagctgtgtgagtgcagcccagggagcaatgtgtctgctcaccatcacaaccgaaagcttgggcccccttgcaagcacagcacgcgcaccttgcgctggtacggcgggatgaggatgagagcaaattaccctcgattccaccttcatttattcaagctcccgcgcgtcctcacaaactcgtcggtttgcccttttcccgcgccgccgttcgaaaagcgaagtgtgatggccgccaagtttgccctcctcgcgctgttggcgctggcaccatgctgtctggcccatacgtgagcccatgcgggcgttgcttgacctgtgctgcgctgatacgcgatgctgtgatgctgggtaccaggcaccttatcgaaaccactgccgccgctccctccttttctcctccctgctgcagctacttcaaggctgatctgatgccccatggagaccaggcaccaggtaggcaagcaaagcggcctggacagcggcagtgaatgagttgtacctgcactacaccctcgcgatgccgtcaccagtttgctgtcatgccgtgcgtccatccccccttgcagatgccccagacgcagctgcggtgttggactttttcgtgcaccagggcgaggccatgtggaccctcaacattacaggcgtggaaggcatgtctgccgctaagattgtgtacggcgacccagacgtctatggcgaggatggtgagggcaactgctctttccttgttgctctctcctttcttgccgctacccttcttgtctggaggccttctacctccaatgccctgccagtcgtccagcgggactcttagcccagcctggctgttgggttcttctctggtcagccatactgacttgacgtccaccccgcccgtggctcctgctgctgcttgcagtggtaacctacctgtcccaggatgagcccgtggacgtggctgagcccaccgtcttcgagggcatgttcaatgccaccgattttttgccccagtatccttggaccatggacgggctaatggccaatggcggcctcgagcatttgtgggcagtcgtcgtcagcaacgccagctaccagaacatcctgctgtctggcccggtgctgaactatgtgccagagggagaaagctagggccgacctcccgctttcatttggctggcgcgctgttgtgaaaacaatatgctgccagcgtcacattcctgtctggctttagcctctcggggatccaggttcctgtcaccaaactgtaatgcacaacaaacaacgcgcaaaacaacacggcctatttgcgggcacgaaccttgatgccgcacggcacaagagatgattcttgaccatcgcaaggtactttaacgtgatgtacttcaacgttttcagcacggtgcgatgtcgcggtgaatgtgagcctgtcaaggacctggcgctctattcagacctcaagttatgcgtggaataccaccagagccttccaacgaagtccgcgattttacgggctgtcttcaccgcaactcgaaccgctgcaatcgcatgatgctgggttgcaagcgcatgtgctatacaagtgccgccgctgctgcccctgccgccgccgcatgtgccgctgcgtctgttaattcacacttgctcacgaccgttgctgctgctggcctgtgtgtgcagatggcggcgttggaggtcagtggtggcaaagtgctcgtgtgcaggctgccgcccctgttcatggcacagcggctggccggtatcagtgacgcggcagctgcctacgccgccacacagtttgccttgttttctcatgcggagctggagccacaccttgaccacacggtcgtctgtgacccccccgccgcctctgtggacgacgtgtgggctcaagtgcggcacgacggcgacctggtgccattcttgatggtgtgcggcagtagcgacgatatgtatgtgcgtgcagacactcaccacaccctcttgttcgtgacccgtgagccttgactgtcatatcttgttacacacaccacagcgtcaaatttcaatggccttgaagcaacggcagaggtctttgcaggagcgatggccgtagctgtcttgcacggactgatttgtttgcttgctgtagtgctttggcggcagccgggggtgtgctaggcgcgggctggggggaaacatgcgacggcatctaattgagctggcgcccacagcaggggctggggtgcgtggctgtggggtgcatgccgggttttatgccatctgtgcatacgtgcagcagcctggagccagcctgaggcgtgttgcaggccggggctggcatgacacccaacgataaagtgctgttgcataacagccatgcagcagggcacccttttccaggtgtattcactgtcgtgactgaacaacaccgcgttgacttgcgcgcttacgcatttggcactcgtcagcatctctgggctctagtttaccgcatgtaatatggccaaagcaagtgaggctgggttcaaagtgccaagtcattcactgacacatcacggtacccaaggcgggcgtcacgcaggccattggaccagaacactttgagaattgccaaaagctttgccttgttgggtatgctgaccaggtcgttctccgagaagtgtgggtctctcttcagttcaccagtgttgaaaagggattccagcaccttgcgaatgacgcctttgggggccatcacgctgcctacgctgttcaccaatgtgtccaacgtcacaggctgtccagtccgagccagcctgtcaactactcgctccaagagacgcacgtagaggccgctgcatcaggcaggaaaggcagctgctcggcacggcataggtagaacaaggcgctcctgtcgcaacagctcttcctcaacgaccagcaacaaatttatagcttgccttttcttttcgtaagccatggcgagcctctcaaagatgtttcgagcagcttgcgacaaccctgggtcctgcaaagcctgattgatctcctcataggtaggcgcctcggagctcatgctgctgatcctgcacggcaaataaagggtggtgaatggacgagcgagcagcggcggtggctacaaggcagcagggcgacggcagcagtggcggccgccatggggaacagcggcgggcagcagcatctcacaacggcgacacacgtaggcttccagtgctgcaagctcacctgtgcagcaggcagcctgtgatcagcagcggcggcgatcagcggcacaggcccagtcgccggacaggggtggcgtaccccaggactcttctggaactttagatgatgagcgcgggcactccgcgtgaaacccggacagcgcagactggtgcgaaccctgccgtactgtacctctcgaagctctgcgttcccgtggcttgctgcgtttagcaattgcgcagtcagagcaataaagtaatcagcaaccgcccaccacccccgactgcgtcaagcagcctactccgcgaggggtctatcaaatggtctggggctttgcaaggagaaaacgtgtatccggttgtttagggtgcgagggaacagtacttccattcttatcttatgcagctctttctcccctctgctaatatgcagcagtttgtacatttcctcgactgtgtaccgccaccgggggtccgacaacctgtcagctcttgtgccacagaatgttacaataaagttgctcgggtacaatcaccggccagaatgaacctcccaattctagccaagtaagcaacggcggcaggggcctggtgcagcctgttagggtaggctgccgttcgttgctccaatcaactcaatcctcaagcagattgggacaacgaagtggcgtgcacccctgccatcttgacctcatcgagacgctgttgcatgcgacggtgatacacagcaaaagccaagctaccaagcaagactacgccagccacacatcccacaacaacaccggcaattgctccgtcactgagactgctgccgcctgagcttgtggcacagctggtgttgttgatattggccagtgccttggaggcagtgtgcagttggcatgcagtgtagctgtcattctcgcaggcgtcgcaccattcgccgatattactcatcgatttgggctccacaaaagctctgaatgcttccaggctgcacgctcccggaccagcaaggatctctgcaccgtctgatgcacagggcagaggaatggtcgtgtagtttgcagacgggccatcctgcaacagtgcaggtgcatgagtgctcaggcagtattacaccagtgaagcacatgaacacggggcacaccactggtaggcttccttaatttcaagacacacctgcattaccaaacgaaccgcaagctcttgagggcgctgtgaagattcgccgccatgcagctcaaacgccattatggcagccaacgaagggattttcctgcattatccacaattcactgtgggcagtgatgtaggcagccccatcaccactcacaggggaacatacttgaaccatgtcaggtttgcatcgtcgagatactgatccaactccattgcccccagcatgccaagttgggtgttgtaatgggcagacacgtggacggtcttgtagtacaaaggaccaatcacattgcttgtgatagctgtcacagcagaatctaaatagttcaacaggtcaccaatcatgattccagacagcaggttctcggtcagattggaccgcatcttactcgtctctagccaatatcccagctgcaagagagggtggggctcacgttgatccctgaactccggactcacaaaactgcccaatatgcaggtttcttacctgctgcatctcagcaaaggttgcgttgtcgatgggaggcatgggcgtgcccacattgaacgtccggtacacgttgaagcctgttccagtgaataatatcactcttaacactttcatattgttgtgcatgcaaagaagtccaactcaccatcatatacgttccaccagttttgcaaagaggtgtccaagcccgaggcctgagccaatatgctgtttcggaaagcttctgtctcctgctccttctgtacaaactccggtgaatcataccactccaacaagcgagcatcgtatacgggacaggccgtgtaaccacggatgagggcgttcccatcttctggatagctgtacacaggaaccacctgtgtgcacgatgcaccttgaaaaattcattagactcgtgggaatatatgccatcagcaccgcctgtgtgcggcgtgcttgcctgttggccatcaggcaggtagcgcgtcgccgtgggcgcattgatgggaaggaacacagcatccaggaacgagcgtgcggtcatgatcgcacggtctagagccgacgagcgaatcaatgtgttgaaattattgaaggagccatttgccgtgccaacaacgccataccttggccctgaattggtttgggacaaaccgtcaaagaaataaaagattgcaacatacgaaatcggcgtccaccttctgaggtaacagtggtatcgaggcaggctcaccttctggggtaacagtggcatcgaggcaggttgcatcggcagaggtgcatgcagtggtgttcaagtaccgcaatcggtaacctgcgcccacattgtaggcctggagctggccctctggcagaagagtggggcccccagcggcatccgtctcctgcaagtagcacttgggcaacaactggggtgcaaacccccaagcctagagcatgttcttgcaacggaaatttaccttcaaagtgtccgttttgggcagaacgttgcgagctccgtggcgctgcacgctatacaccattagcacctctgcttcaacagcgagggccaggcccaggaaggtgacaatactggcagtgcgcattgtagcgagagagccactccacgtttctctaagctgcggttgtgcactcagcagctaggtggggtccgtatccgacccagaacgcgaggataaggcattctggcatatgtactgtcgttgtcccgcccgagcgcactcgacacccatggcccgcgcaccgtggcctgtcgggctgcagcacgcacgcgactttcagtatgcccttgatcattttgtgtgttatgaaaacatgcctggtctattcgagtggatgcggctgttgccaccacgaaccgagttgttgtaatgtctcaggcacgtgatggcttcgatcgcatccaccaccgcacacactttggccgtttcgccaaccgccacacccgtcgaccaatgtgggcacaaaggacaaaggcgcgtcacagcgtggccctgaagtaacggaggaagtctttgcaggtttgctggcgatgagatttccagtcggcgtgttggcacttgggagaacagtataacgcaacataacagccagtgcacatgtgcaacgtcggttcaccttcggaagggcaacctgtgaagttgcagcgaggttcaatgctgatgtaaagctgccgcgcccggcacgccttgtactcagcccgggtgttgaaggcgctggccacaatctggaggacggcccctgtctgcttcgacagcaccaccatgatggcgtagtttgtgctggggccgttgccgctgtcgccgttgtcgctgttgccgttgtcgctgccggtgccgtcgccgccgccgctgtcgcctcttatgcctccgaagcagaagcgcacgtcgtgttgcgagggatctgaagcgagatattctgccactgcatcgcacacaacatccacggtcaagagggctttctgcgcgggtgtggaagtgcacagttctactgtgccatgcagcaactcgcgattgacaacatggaccactgatgtctgtgtgaaagtcattgcgaacagatcaggcacacgatgactccctattgtcaatcgcgtacctcttgtactgggtcgaaacaacagggtgactcagcgcatcggttgccaccgcaaagctgtcgtgcttgtagttcacgtgcctggcaaacacggtaagcatggatgcattatgttgaagcgaggccttgctgcattctcgcgcggagcacgcacaccacgcggagaacacacacacagacacacacacgcatggccccgttgtttgctgcaggctattcaaccatggccgccgccaccgccgccgccaccgctgccgccttcagcgtcctgcccgctgaggtgctggtctgtgtcgcacagaagctgccagtcctcgagaggcgtcacctccctgctgtctgccagcgtctcagggccctgtctcggtctgggcgcttctggtctcacggcgatgactcgtcagtgcggctggtgtacagttctaccgaccgcttgaaggtgctggtgaagttcctcagctccttggagggccccatcacatggcgcagtctggacctggaaataaaatgctgtgtgagtgggttttgggcagcttgggcacagcctgcgccgctgctggggacagcctgcgccgctgctggggaccttagtctgccgtcgacagcgtctcgccccattgactgcaggtacctgacctggacgactacctcttgagcctgggtgtgtcgctgccctggctgaccagtttccaggttgatggcgtttgccctggcgattcgacccctggtggtctcgccgtctcaccctggctgtcgtcttttgtcaagctgactcgcctttccatcacaagggttcctgttctcttccaaggccgcttcccccttgctgcgactgcacgcctgacggagttgacgttatgtcgcaccggcgtgtgccgca

SEQ ID NO: 20 - DNA, 21782 bp, Chlorella sp.
  variation 721..2891: note = n is any nucleotide
  source 1..21782: mol_type = other DNA
ctgtagattggacgtgccagatacggcaagtgtggtcaagtttgcagaagtcccacgtatcgttcccagcgttgcgctgccaaatgccgcggtgtcagacgagatgtcgcctgcccgcacggcgtcgcattcgagccggctctggtgtgcggtgtacgcgtaccatgacatgacttgatcaggcacaacagaataaatccacaactgagccagacaatagcacgcgcgggtcaggttgatgtgaacagcgcacgggcctccttggtgtcaaggcaccaatcgaccatgcgactagggtgccaggtcctcgccatgagctcctccttgtacgccatggtccgctggacgcagctcaagcttccgaacccttgtacaggtcctggtgtggaggggccttgcgcctgacaaccctggccacgccttgaacgatccagtcctcacacccgtttagaacgtcatccgtgtaggccttgtcatcggtgtattggaacgtccgccacacgctgctgacggggtcgtctattatgacgtacatcactccgtggtacatagcgttagacatcacatgctgccgcacctccagctggaacaccacgccgtcaggtctcactgctgatatcgccagggttgcattaatgacgtcagggtcccacaccgtggccaagaactcgcgcacggtcgcgcggaggtccaaccgcgtagcacgcagcacggcctcgtnnnnnnnnnnnnnnnnnnnnnnnnnnnnnnnnnnnnnnnnnnnnnnnnnnnnnnnnnnnnnnnnnnnnnnnnnnnnnnnnnnnnnnnnnnnnnnnnnnnnnnnnnnnnnnnnnnnnnnnnnnnnnnnnnnnnnnnnnnnnnnnnnnnnnnnnnnnnnnnnnnnnnnnnnnnnnnnnnnnnnnnnnnnnnnnnnnnnnnnnnnnnnnnnnnnnnnnnnnnnnnnnnnnnnnnnnnnnnnnnnnnnnnnnnnnnnnnnnnnnnnnnnnnnnnnnnnnnnnnnnnnnnnnnnnnnnnnnnnnnnnnnnnnnnnnnnnnnnnnnnnnnnnnnnnnnnnnnnnnnnnnnnnnnnnnnnnnnnnnnnnnnnnnnnnnnnnnnnnnnnnnnnnnnnnnnnnnnnnnnnnnnnnnnnnnnnnnnnnnnnnnnnnnnnnnnnnnnnnnnnnnnnnnnnnnnnnnnnnnnnnnnnnnnnnnnnnnnnnnnnnnnnnnnnnnnnnnnnnnnnnnnnnnnnnnnnnnnnnnnnnnnnnnnnnnnnnnnnnnnnnnnnnnnnnnnnnnnnnnnnnnnnnnnnnnnnnnnnnnnnnnnnnnnnnnnnnnnnnnnnnnnnnnnnnnnnnnnnnnnnnnnnnnnnnnnnnnnnnnnnnnnnnnnnnnnnnnnnnnnnnnnnnnnnnnnnnnnnnnnnnnnnnnnnnnnnnnnnnnnnnnnnnnnnnnnnnnnnnnnnnnnnnnnnnnnnnnnnnnnnnnnnnnnnnnnnnnnnnnnnnnnnnnnnnnnnnnnnnnnnnnnnnnnnnnnnnnnnnnnnnnnnnnnnnnnnnnnnnnnnnnnnnnnnnnnnnnnnnnnnnnnnnnnnnnnnnnnnnnnnnnnnnnnnnnnnnnnnnnnnnnnnnnnnnnnnnnnnnnnnnnnnnnnnnnnnnnnnnnnnnnnnnnnnnnnnnnnnnnnnnnnnnnnnnnnnnnnnnnnnnnnnnnnnnnnnnnnnnnnnnnnnnnnnnnnnnnnnnnnnnnnnnnnnnnnnnnnnnnnnnnnnnnnnnnnnnnnnnnnnnnnnnnnnnnnnnnnnnnnnnnnnnnnnnnnnnnnnnnnnnnnnnnnnnnnnnnnnnnnnnnnnnnnnnnnnnnnnnnnnnnnnnnnnnnnnnnnnnnnnnnnnnnnnnnnnnnnnnnnnnnnnnnnnnnnnnnnnnnnnnnnnnnnnnnnnnnnnnnnnnnnnnnnnnnnnnnnnnnnnnnnnnnnnnnnnnnnnnnnnnnnnnnnnnnnnnnnnnnnnnnnnnnnnnnnnnnnnnnnnnnnnnnnnnnnnnnnnnnnnnnnnnnnnnnnnnnnnnnnnnnnnnnnnnnnnnnnnnnnnnnnnnnnnnnnnnnnnnnnnnnnnnnnnnnnnnnnnnnnnnnnnnnnnnnnnnnnnnnnnnnnnnnnnnnnnnnnnnnnnnnnnnnnnnnnnnnnnnnnnnnnnnnnnnnnnnnnnnnnnnnnnnnnnnnnnnnnnnnnnnnnnnnnnnnnnnnnnnnnnnnnnnnnnnnnnnnnnnnnnnnnnnnnnnnnnnnnnnnnnnnnnnnnnnnnnnnnnnnnnnnnnnnnnnnnnnnnnnnnnnnnnnnnnnnnnnnnnnnnnnnnnnnnnnnnnnnnnnnnnnnnnnnnnnnnnnnnnnnnnnnnnnnnnnnnnnnnnnnnnnnnnnnnnnnnnnnnnnnnnnnnnnnnnnnnnnnnnnnnnnnnnnnnnnnnnnnnnnnnnnnnnnnnnnnnnnnnnnnnnnnnnnnnnnnnnnnnnnnnnnnnnnnnnnnnnnnnnnnnnnnnnnnnnnnnnnnnnnnnnnnnnnnnnnnnnnnnnnnnnnnnnnnnnnnnnnnnnnnnnnnnnnnnnnnnnnnnnnnnnnnnnnnnnnnnnnnnnnnnnnnnnnnnnnnnnnnnnnnnnnnnnnnnnnnnnnnnnnnnnnnnnnnnnnnnnnnnnnnnnnnnnnnnnnnnnnnnnnnnnnnnnnnnnnnnnnnnnnnnnnnnnnnnnnnnnnnnnnnnnnnnnnnnnnnnnnnnnnnnnnnnnnnnnnnnnnnnnnnnnnnnnnnnnnnnnnnnnnnnnnnnnnnnnnnnnnnnnnnnnnnnnnnnnnnnnnnnnnnnnnnnnnnnnnnnnnnnnnnnnnnnnnnnnnnnnnnnnnnnnnnnnnnnnnnnnnnnnnnnnnnnnnnnnnngacggcgtccagtgctcggtgtctccgtgaacaagcccccgcggggtccacgccacaccgtaaggcccgtgactgggtccttcatgttggtgttttgcttatgtttcataacgtcaggccagaaaattaatcagtcagagcggtttgttggccgtttccaagagcacaagcctcctcgatatcaaggcaccaatcgaccatacggctggggtgccaggtccttgccatgagctcctccttgtacaccctggtctgcttgacgcagcacgacgcttgcgaacccttgtacaggacgtcgctcggggggggcttgcgcctgacagatctggttacgctatgaacgatccagtcctcacagccgttcagagcgtcatccgtgtaggccttgtcattggtgtaggaactcccggcttctaccatcacgctcgtcactccgtcgtgcagccatgtggacaccacgtagtgccgcacctccagcaagaacaaagcgccgccgggtctcctggccagtatttccaaggaagcaaacgtcacgtccggttcccacaccgtggccaagaactcgcgtacggtcgcgcggaggtccaaccgcgttgcacgcaccacggcctcgtcatcgtccatctgatctacaagacctgggtgagcaccctatgtggtcttcttttcaattgtgagtgcggggaaggctcgaagggcccactgatgtacaacccattacgcacaagcacacgtgtcacgtaagtgcttctaccgtaattatctcacccaagtccgccgctgacaccgctgcgatcgcacgtgcacctttggatgctcgatcggctcgagtacacgatcgacaagggcgagtggaagtacaggccgtcgtcgttcgagtacctggcgcgcatgccggtgctggggttcgcgggcgaggacctctactcctctgacgtgctagtgtacggggcacgcaaacgtctcgaggtctggtaccgggggctccaaacagtggcgcacttgtgcatgccggatcatgccaccatggaaggagccagggtgagcttctcgcacgcgcatctcccccaccgctgcaagcgggacgtctgcaacgcggcccgtgctgcccgccggaacgacgttcgggcctacgagcgggccgcggcgcgcttcgatttcggccagcacaatatgtgggcagtgcgcctgtgcctcgtgtccgcactggacatggacgctattgacgtcgcggcgcacatcctgcggcacagtggcttgacaaaggcagacttcctggcggccggagaagacgcgttccatcgtgacagggacgggacccagggctgggtggaggtgcggccccagggcccccctggaacgttacagtgggcaacgtggacgcacgcagtggtcgtcgaggcgttcgggatcaccgcggacgacgtggaggacgttgtgcgcgaggaaactcgggaccgccacggcgagccgtacatgctctgttggatccccagcgggtgcctcaaacgcaagccccgcatatgaattttggtagctgctattgtaacttcgttcggctgtaccccgggcccggagacgtgcacgcgtttaaacgatacttcaaaggcaaaggcaatcacatgtcgcgtgtgacagacgacataatactggcatccttccaagaatcgtacgatccagaggtcctgcggggttgcacccacatcctgaacgttgcggaggagttgaacgtgtcgggtcgcgtggacagggagtacgcgaagcacggcgttccggacgattgcagcgacacggacatcacgtgcatcctgggcccttgcattcaattcatcgcagacgcccacgccgcgggaggcatcgtcttggtgcactgcctggaaggggtcagcaggtcggtgtgcgtggtcctggcatacctgtgcgtgtctcgtggcatggcgttccacgatgcctacgcccgtgtgcgtgacgtgcgcccacacgtcgatgtgtttccacagtacgaatccgacacgaggcgctgggtggcttcgaagtgcaatggcgagtagagatctgtgttgctcgttattgttacatcagtccaatggtaatgttttcacaacagttgtcacggcaactagctgttgccctacgtccccaagacggcgcaaatgctcctccaacatgcgcttgaggacgctcaaatcttccatcatgccgctgcggcgcacgtgtgcgtattcatccaggtcttcgtgatatctcagataccgccccaagtccttaacagtgcgagcaaacatctccagcttttctgcttgatacaggagctcgtggcccgccattgccagcgtgtgcactgactccttcggcagagtcattctcaaagaatgaacaacaccgcgcgacctggcttttatacctggcttgtgtaccttgccacgctgagtccacgttggcacgccagcactacgcaccgcgacgcgtggctcgaggcgtcgaggaaaggacctcgtttttgaataccttcagccagttcagatgttgcttccgctgttcttccagaatttgcgattggaactctttgttgttgttggcgtgcatctctgcaatgtctgcggcgctgattctatcgcccttgcgagttttgtaccggggagatttcagctcacgtagcagctcataagcacgctgctggaaatttgcgttgtcttgtggcccgcagtatgttgcaatgtactctatatggcccaggttttgagcgagccgtttggacacaaacttgctcaatggcgtgtagaccgttcctgtttccgaggtctcaatgatgtgccgcttagccagttgcagattttgcagtctgggtgggccgccggatccgtgcatgttccggaagatggagcatgcaccgtcttcgggtggacatgccacgacaaggagtgccatccgctcgttgtcgtggtagcagtccatcatcacttcgacttctgcttggcttcctgaagggagaactttcgtcttcacaggcttggtggtggtggccgactcgtcgacagtggcaggtgctgccttggccacagcattctcgacgtcgccgcctcctgaaaccagctcagagcgcgacgtgatcccaacatcaccgcatctcttctcttggtgtctcttcacgtgagactcgtggaagctcgtgtatgcacagttggcacattggtggacggtcgcgcgaaccacatagggtttgagactcatgatcttgaatggtggaggtgcctttaaacctgcagctgaccggctgtatatacggaagacgtattggacgggtgcgaagactggaacgttctctgtatagacagggcgtttgagcgcatcccagacatgctgcactcgggtaaagaggtgctgcttgccgtggacaacacgcatacgtacaaggaagagctcatggcaaaggcctggcaccccagccggatggtcgattggtgcctggacaccgaagaagcggcagtgtttcgaaataaaagtctcgaagtcgtgtaatgagacccgaatcatactaccgcgatgccatcaactctggaaaactggataagatgtcagagaagaaacgggatgagttcctgacggcgatgatgaaggacagcatgatttccgccgacgaacggttccggcagcgatccccggtattgcacgccttcaggccgttgctgacccgcgtcgccgatgagaccggattctcggatgcgctgttcagggccagcaagtaacttaaccgaccgatcgattccctccgaatcaaagagatccggtgcacccccagtcgggaatgtgccttgacacgcgcaagggtgctctgggcttcggatgtgtgcaaataattatggctagaagtgcttacgtgacacacacaagggtgcatcgggcttcgtgcgggttagtactccaaagggctcccgtgcgtgtctatggacctgtaattatttgcaccctagtgttcacccttttggtggtgacctgcggacgaaaataattatgaaaatccttttgctgggaacaagttgcgctcaaaccgagagacccggatcgcgttcccacagcaacaaccataagccgtaattattttcgtccgcaggtcaccaccaaaagggtgaacacttgggtgcgaataattatggctagaagcacgtacgtgacacgcgcaagggttgtgttgggctttgggtgctgtagctgtaaaacacgtacccgtatcttctggaattcttcataactatccgcgccttagtgttcacccttttgatggtcacctgcggacgaaaataattatgaaaattcttttactgggaacaagttgcgctcaaaccgagagacccggatcgcgttcccacagcaacaaccataagccgtaattattttcgtccgcaggtcaccaccaaaagggtgaacacttgggtgcgaataattatggctagaagcacgtacgtgacacgcgcaagggttgtgttgggctttgggtgctgtagctgtaaaacacgtacccgtatcttctggaattcttcataactatccgcgccttagtgttcacccttttgatggtcacctgcggacgaaaataattatgaaaattcttttactgggaacaagttgcgctcaaaccgagagacccggatcgcgttcccacagcaacaaccataagccgtaattattttcgtccgcaggtcaccaccaaaagggtgaacacttgggtgcgaataattatggctagaagcacgtacgtgacacgcgcaagggttgtgttgggctttgggtgctgtagctgtaaaacacgtacccgtatcttctggaattcttcataactatccgcgccttagtgttcacccttttgatggtcacctgcggacgaaaataattatgaaaattcttttactgggaacaagttgcgctcaaaccgagagacccggatcgcgttcccacagcaacaaccataagccgtaattattttcgtccgcaggtcaccaccaaaagggtgaacacttgggtgcgaataattatggctagaagcacgtacgtgacacgcgcaagggttgtgttgggctttgggtgctgtagctgtaaaacacgtacccgtatcttctggaattcttcataactatccgcgccttagtgttcacccttttgatggtcacctgcggacgaaaataattatgaaaattcttttactgggaacaagttgcgctcaaaccgagagacccggatcgcgttcccacagcaacaaccataagccgtaattattttcgtccgcaggtcaccaccaaaagggtgaacacttgggtgcgaataattatggctagaagcacgtacgtgacacgcgcaagggttgtgttgggctttgggtgctgtagctgtaaaacacgtacccgtatcttctggaattcttcataactatccgcgccttagtgttcacccttttgatggtcacctgcggacgaaaataattatgaaaattcttttactgggaacaagttgcgctcaaaccgagagacccggatcgcgttcccacagcaacaaccataagccgtaattattttcgtccgcaggtcaccaccaaaagggtgaacacttgggtgcgaataattatggctagaagcacgtacgtgacacgcgcaaggctgtatcgggccctgtacgtgtgagtacacgaaagcgctcccgtgcgcgctgctagcttcgtaactttgacgtagttaccgcaccggcttgatgggcgcagacgtcgcttagttcatggggtttaaaaggttctcacgtacgacctggtgtttgtcgatgccggtgaccttcgacagctcggtcgcggccaagtacccgtggggccccgctggcctgcccttctccggctggctgccacgggtcgccgacacccacactctgccggccggcaatctcgctcgcgtggacagtgcagcgcgtcataccggcccgttcaggatatggcgagggagcgcccatgtggaactggactggggggagcacacgtgtgtcaatttgctggagctgcggttcgccaacccccatgggctaccgctgcaccacattattcatcgcgtcgccctggagatcggcatcagctgcgtcgatacagtgtaccccggagaacagctcgactggctgctggagcaccacgcgcgcggcccggtcacaacctcgtgcgggaccacgcgggtcccgctgccgctcggtggcacccacgctgaggacctcctgccgttggtacggcaccacgtggccaagctgaaggtcgatgtggcagacgggcacagcctcgagcacgcgcacttggaggtatgggcgatgtgctacaccgagccgtttggcatgcccgtgccagcgctgaccggggatcacgggccgccggcgcccatcgagaacccgtggcgggcaggtatcgctggtgcagccacgacgggcgcgtcgacccgcatctccaccgtgcacaagaacgcgtggaagaaccccgcgccacccggcaagcgactccacgtggtgcgcttctgggcgcccgcgtcaatgaccatcgaatgcatggcagtgtggccggcagacgacgtcgcgctcctcacggtgttagcctcccccggggtcccgcaggaggttctggccacgtgggagcccgagccggctggattcgaggacccgcgcgtgcgggcagcagcgggatgtctgagaatgctaccgcccgagctggtgtcgcggatcgtaaggccgctgttcatgcgcccggagccccgtgccgtcatctcgttctccacgcccgtcaaccccaacacggcaaacctgctggtggagctgcagttgagagaaggcgtaccagcggacacgaacttcggctacgcgaccattggcctcaatgccatggtgtttggtgggggattgttcggcctgatgtacggtggctgaggcggggaaccacgggctccatgtgtgtgagcgtgtgtgtgtgtctgtgcgtgcgtgtgtgtgtgttacaggttcaggtgtcatatttgctccaaaaatggccctgctcggctgggactgtttgccggaatattccaaaaaactatgggtgtctatggtaattaacgcgttaaatctcgaactttaatatgtctaccctcaccacgacaatacacaccgtgcaatgctcatctcaggcaagaaggcggctgcacagctcggggtctgtctcgacaccctcagacgactcgcagacgacgggcagctcgcaagcatcaggctcccctccggacacaggcgctacgacatctcagacgtacttgccacaagcacacaccccggtgacaatgccagcctcaagcgaaaattctgctactgcagagtctccaggaaacaccaacagcacgacttgcagcggcaggtcgagtacatgcgcgaacgcttcccagaacacgagatcgtcacggacatcgcttcagggatcaacttcaagcgaaagggcctgcagaccattcttcgacacgcgatgctcggaaatgtccaagaggttgtggttgcctacagagaccgccttgcaagaatcgcgagtgacctcgtggaatggatcctcacaaacaacggagccaaactcgtggtgctgcatcaggcaatggacagccccgaaggagaccttgcagaggacctcatgtcaatcgtcaacgtcttttgctgtagggcaaacgggcgcagaaagtactcggaccaaagcaaagaagcctccaaaagaaggaaagaaaccccaggcgacacactcgcggaaagttcgcatcttcccttgccgtgaagacggagagaagctgacgcaatggatgggttgccatcgggtcgtatacaacagggctctggcgtttgcaaagaagactggtcaacggaattacgcggagatgggcaaacggttcgtggcgtccagaaacatcgaggagccgtggttgaagcaatgccctcaggtcatccggagttgcgccatacgtgacctcaaggccgccttcgacagcaactttgccaagcggaagatcaacccagaacacacatttgacgtcaagttcaaggccaagaaggacgacgtgaccgctgtgcgcatcgagcgagtgaacggtgcgttcaaggtgttggacgacggcaagcacgtctccttcttccccaagtcgttgaagcccatgggggtggagcccagagctttgcaaggcatcgaactgaaacatgacatcacgctaacgaaggaccgcctaggcagattcacactccatgttccctaccgtcgcgaaaaccaagcggcacaggaaccggacacgtggtgtgctattgaccctggcgtccgcacctttgccaccgtattcagtccagcagacgcctgcaagattggcgatggagccgcgacgagactggccaagctgtgcgcacacctcgacaagctgacttcggacacgaccaaagccttgggcctccaaaggagacggaggatgaagaaggcacaagtgcgcgtgcggaatcgcatcatacacttggtggacgaactccattggcaggcggcttcgtttctgtgcaagcactacacggacatcctactgccagtgttcgaaagccagaagatggcttgccggctgtcgaggaagatcggttcgaagacggcgcgctccatgctgacgctgagtcactataagttccgcatgcgcttgatccacaaagcaagggagcatgggtgtcgcgtgcacctttgcacggaagagtacacgtccaagacctgcacccgttgcggcgcgttgaagcacaatctgggaggtgccaaagtgtacaggtgccctgtgtgtatgcttcgtatcgaccgcgacattgcaggtgggcgcaacatcttcctgaaaaacgcggtagctcttgattgagctgcctttgcctcgttagagcctcgtccaatgtgacgtgcagaagactccccctcatgagctgtggccatcgattcctgtggcaacgcaggaagctgtgaaagcagtaatgactgacgggcgagcccagactttatgttgaagtctgtgagttcttgagttttaatctagcggcccagatgcagacgacaacactcccggcagggacggcaaacgtcttcaaaccgcccggaagcgaatgtatggccgctcggagctctccggatacttcttcggagaattcggtttccagcgattcccacagcttgcggtgctcgtcggtcacactcgcccacggcaccatcaacggctccggattgaaggccgcgtgcatttcggcggcccaatctcccgtggacacgtagagcaagtactcgcgaacgtgctcggcttcggcgatcgcccgtcgttggcgcttggcttcccgagcggcggccctctcgagcgctcgctcggcggcggcagcctggcatacttccgtgagagacaaagacatcgagagaaaaaaaagtgcccgaaccataagccgtaattattttcgggaggtgcgaataattacggcctacgtggcttagcacgcgcagcacgggcctacttgaacagtcggttctcccgttcttacactttgcaatgtctgagttcgcgttgcttgtagagcacagcacggaaaccgtgttttacctgataccacaggcgcagcttacggaccccgacaggtcgttgttgggcaggctgcacggcaccgatttggacaatgacgggcaaacggaggacaaacaagcctacgagcgtatgatgtggcgattcgtggactgtggtggcgacgtcatctacttgccccgcggtggaaccgtcacgctcgtatgtcagctctttgtaacaacttgacagctctttggaacaacttgacagctctttggaacaacttgacacatggacacaattcagtgatgcgtgtggctcgtctcgctaccggcaaggcttgctgtctctgaggtgtcagtcacgtcagtctcgtccgtggtctcacgagtcaaatcccgggtctccttggggacctcgtgtgcgcgatcgttgttctggtcttgccgcagcttgtacttgccagtgtccttgtcaaactcgtacttgccattgtcgtctcccagctcgtgcgtgatggtgcggccgtagtgcaacttgtagagccagcccagcgtggccccatcagccaggatcgtgaggaacaacccggacagcgctgcgtcgatgggcatggcaccgtaccaagagccatacttcagctgcaagtttttcaagatcacgtacaatacgatgtacaggaacgcccccaccaggaatgtcctcgcgttgcgtttgccgtgcccaggttcctttgaagcaggcaggaacgagtgacacgcataccacagcatgtcttggctgttcacgtgacaaaaggaatccgtatttgacgcgtggtaattacatacagacaacacgtggatgcataccatgcggcagtgtcaatcggctggctaagtgatcccgttcaaacatggactccactgtggcactggccccgtacacctcgaggtccaacggtgtggttgtgcacagcatgggtgccgctccaaggtcgctgcgcagcttgatgagctccaaggcttgcgcattgatgcatttcagggcgggcaagggctgagccagcaacagatgagtctgcgttcgtatggtgccgagcttgcggatgactgtcagctcttccagcctgctcagggtgcccggccggtcgagcaccaccactccactgacccattcgcggtcttggtaatagcaagatcccagtaccagtctcttgaggcggggcgggtccacgtccaacagggccttgatgcggactggggcagccggggcagcctgaacggaccaagacaccgctcagaccaccactcatagcacaaccaggacagcccgtgttccaatgagcacaacgcaccttccgtctgttttggcaggtgccccagtacagcgcgcccagcacgagctcctcgagattgggcaatttcctcagcgcttcctcgaaccagccatcagcatggtaggattgcgtcgacacatccaggctggtcaacttgctgaagtccagccacggctgcttgcgctgacgccctatcatgcatctgaacaaggtgacggcggtcttggagcggcatacgtgcgcggcaacgactggctgcctggcccagtccttgcacaccaggcggtggtcggccgggcgggaggtcaggtccagcacgcgcgcctgtagctccgcgggcaaatcgttccatgtagcggtggatgcgcgcgcgactgacattgaaatgagcgaaatgtggctgcgcggagctcttgacatcgcgtgccagggtggcgtcctacgtggcatcatgactacagcaatcggaaattatgcctccctgccgccggcctcctcaccccccactcttgttgcccatgcgcaccccaggatgcctgcctgcctgcctctgagttccagcggatagtcaaggacctgtcttccattggggacaccggtgaggcagggaaggagggagggaggggtctcacagggctgctgggagagcaggggtggacgggaggcatgtggctgccagggtgtgcctgactggctgattgaggggctgaggggcatatgcgaggcgctggctgtgggagacgcatgtgacagcgcagatgcgggtgtgaccttgtggtcggctttgcggggctgggcaaactagagcctgcaataaacctatgtcaccccgcgatctattttgccatgcctgttgttgagctcaccggagttccccgcaccacgagtgttgaggacatgtgggctttgtgcgaaagcatcggggaagtgttgagcttggatttccatttcgaccgcgaaaacgggctcgctttggtgacatttgcgtctgattcggaggccttgactgttgctgacgtgaccgtaaattgcacacgttcgacgggtgacaggcttaaaggttttcacgtgcgttacatttacggttttcttctcgactacacaagcatggatgacgaccaagcaaagtatgtcgcatccaggaaggcagcaacttactacgactgcgacccaagaacactcgtcaattgggcggacaagggactcgtgccatttaggctcacaccggaaggacagcggaggtacgccatccccgtcaacgacgcaccccgcaaaaaagaggcggacaacacaaaagcaaagtactgctactgccgagtgtccacacagaagcaacgagccgacctcagcaggcagcaagacgccatgcgggcagaatacccaggccacaagctcgtctcggacatcggcagcggactcaacttcaaacgcccgggtctgcttgccattctggaatcggcaatgcgcggagaggtcgaagaaattgtggttgcccacagagacaggctcgcgcgtttctccatcgaactcttcgagtggattctacgaaagcacggagtcaggctcgtggttcaacacgcgtcgttggactcatcaccagaggcagaacttgtcgaggacctgctcgcagtggtcaccgtcttcgcctgcagaacccacggccgcagaagccataagaagcgcaaggcgggtgaggctgttcccgacaccacaagatgcgcaggtgctgaggcgctgggtggggtgctacagggcgctgtacaacacggcggtggctcactgcaccgagacgaagacatacaactacttcaaagtcaggccaacattgaccaacgacgcaactgtgccggcccacctcaagtgccttccggtcgccatgaggaagtacgcagtgaaggacgcgacacaggcgtttgtcacaaactttgccaagaagaggaagaactcggggcacagcttccaagtgaagttcaagaccaagaaacactcaaccaaggtcctcaagctggaggccgcaaagatgggcgtcaagatcgtggacggccggccaaggcttgtcgtgggagacgcaaggcaacaccagctagggcgtgaaggcatctccttcgaccgccggggagaggccctggtacgagacaccaaggacccggttcttcaaatcgacgaccttggccgcttctggctcatcaccgtgtgcacccgccagcccgagacccaagggcagcggacgcaaggtgtggtggccttggacccgggtgtgcgtacctttcagacgacctacagcccagatgggacgagctacaaacttggcgacaccgcgtccaaccgcgtgtacaggctgcttctcgtgcgtgacaagtacattggcttggcgcacatgagagggccatctcgccgtgttcggcggtcttacgggaaaaaggcagccaagatcatggcccgcatccaacacatagtggacgagctgcactggaagacggcccgattcttggcacaaggttggtccgagatcctgattcccgtgtttgggaccgctgccatgagcaagaagtaccaggcgtcgcgcgccaaacaccggtgcattggccgcaagacgacgcggcagatgttgcacctgcgccactacacgttccgccagcgcctccatcacgttgcgaagatgacgggcacgatcgtgcgcgaagttaccgaggagtacacgagcaagacgtgtggtaactgtggcgagatcaaggcggacctgggcggtgcaaagacgtaccggtgccaagagtgcggcgtgtgcttggatcgtgacggcaacggcgcccgcaacatattcatcaaaagcgtcctttaggggacttcggacggtacaccctctcttcggagtgctatacacccgggcaagagtcttttgacttggagcatgctccctttgttgcctgtttcttccatgggttacggatgaatgtggtgtttgaagtaccggcattggcttacgcaaagaatttaagtttgaccgagccacaatgttgtcatcatgagttcgtgaaagcactcgggcagggccgtgatgatgtagcggcgttcattgtacggccccggtggtgcacgcgaaatgaacgaagaggaaaacacgtctatcagcttgtcaagcatgtcaggaacgaggtgatctcgtatcggtacaaatcgatctcgtatcggtacaaatcgatcgtggttggttccccgtgcgtgcaccagcaagtgacccgggctgtgaatgacagcaaacaggcgttccagctcattcccagcaactttggccgcttgcacatccttcagccgtgctgcccgaaacctggcttcgactgcatccaggttctgcctgtaaccttcacgcagagcacggtccaattcagtgacgatcgcttcgacgagagctggatgggtcacctctgccgcggcgcccggtgttcctggcattgcgagcgcctcgacaaccagcgctgtgcccgttcccgctaatgttgccgtgaacacttgtaggtcgtcagtggcgcggccaaggaagttgaactcccccagggcgtggcgcatgctgacggtttgcggcggcggcgaggatgtgtgcatcctggaaaaacagaacgttcgggacatctgtctgaacgagcgaattgattccgaacccctgtttcagctacgcaaatgtgctgcggaaccctgcaatgccgtcagtgtgttgtactgtttgttgtactgcccacgaaggccacatttcgcatgctgagcctagcccgcgctgacaacttttcaagtatttccgcggccgcagtctctttgcaagccaacactcgtagcccgagggccgccaggcgccagtgcccagccccgtgccctacctcaatcggtatcatgaagccgcgtgtgaatgtgttttaggcagcacgtttgtctcgcgcgtgctgtagggctggttgctgactgaagagtacctgccgcaattgcgtgcaatacgaataacaactctgcacgcactctggccccgtttgtcccagggccacgccgcaaatcgcaaatcggacaaaatcggacaagtcgtcgccttgcgcgaatcgcttttcgcacctgcgttgcacaaccatggcgaccgctggccaggtaaacatcagagcactgatatcgcatgagagtgggtcatccaccaagtgactgaacctgctggcaacctgtttgtgacctcctccagatcgccaaggacagcagcagcgaaatcgatgtggtgcacagctcatccgagcttgtctccggcagcagtgactctccgtcgcaagacctggaacattcgtggtcatggcgccagtttgcgtccttttgcggttctggccttttgatggtcgctgcattcctggtgggcttcagatctatgatgcctgttatgtgcaggctgatgcatacagcgcgcctcttcctctggtttccgtcttcaatcacggtgctggtgtctcctctcacaggatcctggcaacctagaagctgatatccaagtaggcgctaagacaggttttgcacttctgtggtgggttgctcttgttacgcttatctgtggcagctcatttcagtgcctcagtggccgcttgggcctagtgacgggaaaggacttggcccgtcactgtggcgagcgctggccacgtgtcacctgctggttcttgtgggtaatgctggagctggccattgtggcagtggacatccaagagacaataggcagtgcccaagccctctttatgttgtccaacggacagttgcctctctgggcaggtactgtcgcgctaggtggactgcccttatgttgcggcctattagtgggatgattgtacctgagtgttgtatgtgcacctcccttttcatgcttctgggaagcgcacctgacgtgtagcctcacctacctctcccacgtatcatgtgtaggctgcattgttgtctctttctcagccttcattcttctgatgttggagcgctttggcacacgatggctggaagcgctttttggtagcattattgctctaatgggggtgtcaatggcagttaatttcttccgttctggtgtgccagcaaaagaggtggccctgggtgaggaagagaaattgtttacaggaagatgtgcatcagaatttgtatgctagatatgccgaacttgccgcaagtgcctaacagatgacctgattcatatgctgttgacgggttcactgccagcctgcttgctgacactgcaccttctccctgctgcaggcctattccgaccaacgctgccggcaggttctattggcccagctgttggcactttgggggccctggtgatgccgtacaacttgtttttccattctgctgtggttggtactcggtgcgaggcaaacgctcatttcaagtgagctacgctgctgcagagtttgcttgccaagccacgtgcctcttttctcctcgcaggcgtcccagcccaccatcccctggcagcatgcgtggtgtgctgcgctacctgcgtttggagacagttatcgtgctatttcttgccttcttgatcaatatgtgtgttatatgcgtgtttgcacaggggttctatggcactggtgcgtcggcatgctgtagctctgtttgcttccaagttgcaaaagtctgtgtcttccccattctgctcttccccataaatgctcagcgcccggatttgctgtagatcaagagattgggttgcaggcagcaggtgacctgctggccgacaagtttgggtcagaattcaaggtgttctgggcagtgggtctgctggcatccgggcaggcaagcaactgtgttccctgtgtagcacttcagttctgcggttcatgagcatgtcgttgcatagagaggtgcacgtcaggcattggtatgctgttgccccgggccatggctgaaccgctatgctgctaccttgctgtgtgcatttctaggtgtcgaccattgcattgacatacgctgggcaagttgtgatgagtggcctactgatgattgatgtgaagagctggctgcgcatgattggcacacgcctttttgctctggtgcctgcactgacaggtgcctgttcttctgctctagcttctacgcctgtcctcagcatgctatccccagttgcctttggctcatgcctcggtgcccagaaagatggcctactaaccctgctaagagcactccggctgtcccgcttcctttgtgcagttgcgctggttagccaaacaaacaatagctttgacaggctgaatcagatgctgaacgtggtgcaaagtgttctactgccttttgcaatcattccggtaaggtagcattgctcattgccttgatgctgtatttgaatgagcctgagcttgaacagccatgccgacatacgggtagctagctgttgcattgagatgcgcctctctctgggccatgccttgctcgcagctcatccacatggctggcaaccgggcagtgatgggcccaccgggtgcgtttgccacagcccgctggctcaatgtattttgctccgtggtggctgtggcacttgctgccatcaatggctatttcctggtgacttttcgacaagaaaatttgccagacggcactggtaagcttcgtgtgtaaagcgattgtttatctgtgatgataatgatataagcccagcatgcttgttgttttgttgtgcctgatcatgcttgctcggtggttccttgcctgtgcaagcaagcaacaatgtgcttgtagttaggcagcagtgaagtgcacagagttcgtgttagggtcgcgctgctgatgctcctaaacctgtggctgttttcaggtgtcatggtgggctggggcttcctgatggctgcttactactgtgccatggcgtgcattgcgattggtccagaacgactggatttatgggtaacaccccacttgcaccgtgcgcgaggctcagtaacaaaggcaagcagttcggccgttcgcgcagctggtggcatggcagagtgggtcaagggaatcaactggcgtgaccctgagagcctagtggaggtacacatctaagcttccagtattattgattactatcaatgcaccatggcaactggccttgctgggaagctgctcatttccacaccctatctttttttttttgagcacacaacaagctcacacatcatctctgtcccagcagctgatccagttccctcatgtacaactgcactgtttgtcttgttgcttttctgcatggagttagagcttgtctatcactctctgaacttttgatccagcaattcgtgccttaagttgcaagaaagcatcagaaatgtgatcgtcagagcagtcagcgtgccaagtttgtgacgatattgccatgcggatgggtgggttggtgacaagcacatgtacacatgcggaggcaaacatgcctctccagcagcaacagacatcactagtcagaacctctgctctgtgctgtgccatgactgaggctgccgttagtttctcgctacatacacctgcccacatgcagttgccgtgtgcaatttcagcagtgttggatgtagtacctggctttacaacaacagggtcgcaaggcacaatcaatcagcagcaaatacctatcgtgcaaaggtcagttacaatcaccccactggtaggccgcgtcagcagacctggggcaggaggcaaacagcaggtgcttataagctaaaatggcaaatggatgatgcagtgtttacgcatgtgtcagcaaaaggtgactagtactcacaaagggatgatgcgaggggtggtgcacagatacaaaattgacatctggtgcaacggctttgggaacagccataagggttgctgtgcacgataaacaacatggcatgcacgttaggtgcagggtgtgagcatgggcaggtgcaaaagtgcatgcaatgtgcaggctggacagctagcagctgctggctagctggcagcaggcagggcgcaaccgctctgcttgacaaacgggcctgtgggcagtggttt

SEQ ID NO: 21 - DNA, 14348 bp, unidentified
  misc_feature 1..14348: note = Fanzor polypeptide
  source 1..14348: mol_type = other DNA
ggtcctgtggcacagctttgcaggggtgctgagcctgctggctggcaggtggcgcggttcgaggcgatggccatcccggcgctgggcacggcctgcatgggcattgcacgacatgtcgtacattgcaggggtgatacccctgcggcaggcctattttcctacactgatgggtcgtttaaaatgaaacgttgccgtagccattcactgttgccaatgtctggcagtcataattttgagttcggtttgcgtcaaaggaaacctggattgaatttgccacatgccagcgtatcccttcatttaccgtgtacgggccattgagctggttcggcagcttggcctggctgtgacccttcgtcagctgaaggtgtcacggaccacgttgtggcgctggaggaagactgccattgattcttggctcatgcaaaaccatggcaggcccaagcggcatactcagaaagcaaggcgtgttgcgccactgctcaaacccttactcgagcagagcccgcacatgacacaaagcgacatgcgcaaagccttgctgcacgtgcatggacttgatgtgtcatgtaaaacaatccgcaccgccctcaagctgttggccatgacacgtaagcgtgcaagaacaaggggaccttcgcatttcacacatgcgcatcaagacaggcatgtacggtgtcgtgacatgctggtctccgccaatttggctggacgccacatggtgtccgttgatgagtgtggctttgatgagcggcttgtacccaagtttgggtactccacggttgggacaccagtcttgctgaagtgcccaggcagctggaagcattacagcctgctcttggcagtggacaacgagggccgcatcctgctgtcccgagtaaaggaaaaggggtttacaaagcacgactttgcgcagtttgtgtgtgatttgcagcttggccccgcctccctgctgctcctggacaacgcctccatccacaagaatttgggcgtagatccccgctccacgccagatttcctctacattccaccgtactcgccgcagtacaatccaattgagatggtgttccatgctgtcaagtctcggttccggcgtggctttgctgccaatgatgccgacgtgccaacacgaattgctgatgcgttgctcggtgcaacaccaacctgcgtccgtaactgcttccagcatgttctggagatgtgtcgcggaagctacagaccagggtaaaaggacttaaggtggcctggcgttgatgtaagtatggtcagcaggcagtaatcgtgtccataccttccgtgcttgtgcagttgtacacagcccaacagcgggtttacccacggagcattgcacccaaacggacttaaggccgcacgaacatacgttttcatgacgtgaagcaagtcctggcaaaggcaagccaatgcccaccgttgaggaaatacggagaaagtgcagccaccttccgaagccccgtaaattcagccaatggaagaaggctgactggcttgcctttgcgcagacgcatggcatagatctcggagcgggagacaacagtgttcaatcacctgctgggccttgtgaagcagagccagtagcagagccagtagcagagccagcccctgagtacgaaccggcaaccaagaatgccatcatttccgtcatcaagtgctccctgcgccacgccatgcagatgtcggacacagattaccaggtgttcctgcagcgtgtggatgcgctcgtggagtatgtgagtgtacacctgcggaacgcaagcctccgtctggccaccgacatcacagcgcgacttcgctatgggcaagagattccggacctgtacaacaagtcagacgtgttctggaagaacctgatcaagaaccagaaaggcgtgctggacgaggcagcgcatttcaaggtggtgcgtgtctgggacacaagcggagagatgaagctgaaggttgtacggcatgtaccattccagctggatgctccacaatgcaaggtcaagctgagctgcgatgacaagacgtcctacgtcaaggtgcagctaaccaagcccaagtacgaacagccctttggcctggaccaagtggtgcagtacgcagggattggcttcaggaccatggttggcaacaacgcctgggtcctgctgtggaaccgcctggcgcgcctgacctccgcggtggtcaagcgctgcggcaaagtcagaggctgcaccacaccaaaagcctacaccgtggtgaagtgcatccgtaatggcacccttggcgatggcgcagccaccagcagcgacaactggtcccggtggccagaacccatcaagacgttcgccacggaggcgcgcaacaggctgctggcaggcaacgatcctgcaaccgtcatgtacgacgagtacgccaagaagctgtcattcagcaacgtcatgcgcttcaactactggatgcagcagcagtttgaggcgctcagcgtgcgcaggatgaagctgatgcccatctacgatgtggggcgcaagcacatccggctcgataccaaaagcttgctgggcctgctctgtagcgcgttccctgcagaccaaaacgtcctggccctcaaacagcttctccgggccagcgcagagaggggagaggaggaagaagcggaaggggaggaaggggaggaaggggagggagagggtggagcgaaggacgaggaggacgaaatggaaggggaggaagggaagtccagcacaggagaggacgcggagggcaagaagaaacggaacaagggtcgccaccctgacagctacatgctgccagagctgcggctcaccaagggccgcagaggcatgagcaaggcagataaggaggagcttacccagctccaagcggcggagcgtcaggcttggctgcacgaggtgcaagccgtgcggcaaactgtggcgtaccaggcggccaaggagcgcggtgacgcgttgacagccgcggaggacaaggtggtcacgaccttcttccgaaagctgccagtcaagaagggttacaccttcgactgcagcatcatgacagacggcgtgtcagtgagcctgcagtactcgaagcccggcaagaagcccccaagtggtggcagcaagcgcaaagcggcggcagcagcggcacgcgcaggcaaggatgccatcccaccgcttgtggattacgaccgaacgcccgacatgtacattgcggagagcaacactgtcgtggtcggcctggaccccgggaggcgccagctggcatccctggcggttgaaacacatttcaggctcaacccagacaccggcaggctggaccgggtggacaagaaacaggtgcacacctggtccctgtcccgcggccagtaccgccaggagtcgggcatccgggcggaggacaagcgcaaggccagacgcacacgtgagctggggccgctctggcacagcctggccagcgcggaaacagcgctgcggacgacagaccccgtcacaatcatgcagtacgtgtccaaggcagagccgcgcatgcagcgctggtgggagctggcactgcggaagcgcgaggcccgtgccaacctggcgcgatactcaggcaagcgcagcgtgctggacacgttcttcagcaaggtgaagaagaggctggacgggctgttcccaggcgccagccaggtggtcgcgtatggcagcagcggacccaccatgtcgccgtcagggaagggagagtgcgcggtccccacaactggcacctaccacgcctgcaagcggaccttccagcagcaagtgcaccttacagacgagttccggagcacactggtggactacgcaacgggcacccggacgctggctgtttacaaggaggttcgggaggccaccaaacaggaggtcacgcggcaaaagaaattgaagctgcgggctgagcagcaaggagtcaaacagccagagacatccaggcgacaggtgaagaggcggctgcaggagaagcgacaggagaagcgcgggtgtggttctggcagtgacttgagcagcaagtgcacagtggaggtgctgcacgccacccaagcaaagcgaggcccactggtcaaaccaggggacaagcgctttccgctgctgagtcggctgctggggaagcgcaaggagaaggacagcaggagacggggtggtggtggggttcacggggatgtagcgggtgcatgtggagacacggagggtctgagattcccactggtgatgggtctgcgcttttcgaccaaaacgcgcatgtaccgcaaccgggacgttgctgcagcactgaccatcggcaagcttgccatgtatgaccgggcgggcctggggcggccggctccgttctgccgtggcgtcaagctggttgcatgatggccaagagttgctgaccaacgaaacaaaacaacggcgcagccgccaatgtcatactgttctgtgtgcaatgcacacgcggtacgagtgaggcgccgttcgcagaacatgtagagttctgcattacagccgtcgagggcggatgccctgtggatgattgatggcatgcaacgcttcacgctgcgcatgtttcatttgtcagtgacacgactgtatcaaacgaccactctgctcaactaagctcgcagctctgtactcgaaatggcgaacctctttgggcctcaggcacgtgccatgtccaccgccaccaaaggtgcgcagggcgtgccgcctgtagagttacacttcaacaaacctacgggtcccatcagccaggtcgtcctagagcacattaacgagcgcgccattgtggtggccggcgccaaggtctacttcctcgacatgcgcggcctggcccggcagcgcaaggctggcacccgctcacacccgctcgtcttcgcgcccacggagaacatctctgtccgcccgcgccgtaacatctggaccgctcgggctgtctttgacgacgcctacgcgcagcttcagcccgcccaaggcgtccaggtaggcggggcattagttgtcgctacgtccagtcgacaccgccgctgcaagtcagtcacataagcatcaaaacatcccacaaagaactgatgcgaaaatgatgacagacgcctctctctcgtatttgcacgtgggatgtgccttgggatggggatgggcctcagacggcaattatttgcttcatatgcaatattatgccaatatttgcatgagatttgcgtgtctgcgctcatgccggctaacactcatgccggctaataattgctacaaaattcctctacattctgactgatctggttatcaaagccattttgtcacttgaggtatgccgccgcggctacatgctgagtgttcggcggcatttgcgatttgcgcgactggctctgacaatcggctttttgctcgttcaggtgtacaagcacttatatgtgttctcggacggacgctggcagcagctggtcgacgtgtcccgacactggagcctgaccgcgccgacgcgggcgcccaggggggtggctttagggtttgcggcgcagccggccgtgagcgagcctgcgcggtacgatggggatgccatggaggacagcgacgacggtggggttgacatgtccgacatggccggccccgccgccgctccccccaccaccaccattgccgccgctccccccaccaccaccatcgccgccgctccccccgccacgaccatcgccgccgctcccactgccaccaccaccgctaccgccgcccccgccaggcagccgcctcccgccctcaccgccgctgcccctgcagccgctaccgctcgcgtcatgcagcagccggccgcccccgccaggcagccgcctcccgccctcaccgccgctgcccctgcagccgctaccgctcgcgtcatgcagccgccggccgcccctgccaggcagccgcctcacgcccacacctccgtgctgcagcgacacgccctggccaccgctgcccctgcagccgctaccactcgcgtcatgcagcagcccgtctcctcctcctccgccgccgcccccgtccctgcctctgcgcagccggacaccgcctccgacatggcagagtgctgcatttgctacgaggacggcgtcgagcgcttcacagcgccgtgcggcgccgtgtactgcaagccgtgcctaaggatttatttcggtggcgacctgaagtacaagctgcccaagtgcgctggcggcgccggccacgaccacacgctgatgctgacgccggagatggcgaaggcgctgccaagcagcagctacctgcggtggaccaagcgggtgaacaagggcgcggacacccacgagtgccccttgtgctgccacccggtcgccttgcccatgttcgcggcgctcttctactgcagcaaccccgcctgcatcaacccgaagtacggctactgcgccgagtgcaggcgcggggtcaagcaggtgccgcaccggtgcggcacggaggaggatgagcacaacgaccggctgtgccgcacgtacctggccgacacgggcgtgcacccctgcccggactgcagcttgtgcgccgagaagagcaaccaggaggagtgcaaccacatgacctgccgctgcggcaccaagttctgcggggcgtgcggccacaagtttgcggtcgacgcaaggggcagcgccgtgcaccaccacaagtgcgcctcaaacaacatcttccacctgaacacccccagcgagcgcgccatggtgcgcaaggcgtacggggtgaagtagtgacctttggagggcgggaagggtgtgggaagggtacgggaagggtgggtagagtgcgggaagggggcagggcacttgggttgcgcatgcaagggccaagggggggggggaagggtcggggggggggcgagcaccatggcgggagtgccagacttgaacgaaggcccggcggtcggggcggcggatgggtagggggtgcgtgcagaacataaatagtagcgggtaagggggtgcggtggagagaagtggggtgggcaggagcaagggacggggcttgagctgtgcacgcaagggccatggtggtgcgggttgaatcgcggggtgacatgtaggtgcaaggaggcgggttgagtgtgcttgcgttgcaacgggacatctggctgggacactgggtgtccaaaggcgtgcgcagggcatgtgtttgcgggtggcaggcgcggggcgacggggcgaggaggccctagctgtgccttgcgccgccaagtcgctctgttgttgagtgtatgagtgtatgagtgtatgaggtttttgtgattacttattactgaactcgaagtcaacgagtcaagtacccatcgcggcctgcagcagcgcgagcacgccggaggagcggcctaaagcacggtgggtgggcgggggcgggccgccaggcggtaaacgcagagtgaatagtcctcggggcggggcggcgggagggtactgaaatgccgtgtgtactacggcctcttgcactccgcgcaacccttgcgtgcatacccctgctgagcggccgctgctgcgcatgaataagcactgtgcgccctttccccgttcccgttgcccgctccctgcaggccccatggcgtcggtgtgctactggctgcacacgccccttgccgcctgctgcgttcctggccctgcaacccctggcaaggtaggtggtagtcaggggtggggcgggatgggccctgtgtacggctgccgggcgggctgggtgcgtgatcctgcttggggagagggggtggggtttttgcctgatgcccacgtattcctgtgtttaccctgtacgggccgttgagctggctctgcggcttggcctagctgtagctcatcgcctgctgcggcgctggtcccgtgctgcaaccagccttcctgtgccctcgtgctggcccaccccccacacagggccccatggctggcgcgcggcttgcgggcggcggtgccgccctgccccgccctgtgcgtttcaccgcccgcttccctgggtcccctgcggcggccgcgcctgcgtgcgtgctgtagcgggtgagttggaccgtttgtcggtgctttgtccgggcgcggcggggtgcggagcagcgccgagggtgtgggctgcgcagggttgtcagccgggagcggtagcggccctgtgcatgtgtagcgatgcacgccggtgtctggccgtgccaagggacaggatggtcacgaacggccgcaccatgcgcatggataccgtaagcactgtgcgcaacccctcgctcccgttgcccgctccctgcaggccccatggcgtcggtgtgctactggctgcacacgccccttgccgcctgctgcgttgccggcgcggcaacccctggcaaggtaggtggtagtggggggtggggcgggatgggccctgtgtaaggctgctgggcgggctgggtgcgcgatcctgcttggggagagggggtggggcttggctggccgaccggcgctcggccttggccccacccaccagctccgtccggtctccccgtagccctcgcgaccgcggtcgcaaccacgccacccgccggtctttcctatgctgcgcgacgtttgcctgatgcccacgtattcctgtgtttaccctgtacgggccgttgagctggctctgcggcttggcctagctgtagctcatcgcctgctgcggcgctggtcccgtgctgcaaccagccttcctgtgccctcgtgctggcccaccccccacacagggccccatggctggcgcgcggcttgcgggcggcggtgccgccctgccccgccctgtgcgtttcaccgcccgcttccctgggtcccctgcggcggccgcgcctgcgtgcgtgctgtagcgggtgagttggaccgtttgtcggtgctttgtccgggcgcggcgggtgcggagcagcgccgagggtgtgggctgcgcagggttgtcagccgggagcggtagcggccctgtgcatgtgtagcgatgcacgccggtgtctggccgtgccaagggacaggatggtcatgaacggccgcactccactgccccacccccaggcaccggcgcgccccgcctccgcgccgccgccagctggttgcctaagtgcttcggctcacgccgtggccctcagcacggtgggtgggttgggttggggccgcgtgcaccggggccgggtgttgacatgccgttcttggtcttgatgcacgggtggcagcacaagggggggggcttcgtcctgtgttcgtgccctgtgggttcctctggttccagcgccgtgacgcgggctctaggccgcccagcctcccgccgtacttggcgccacccttgcgtgcatagccctgctgagcggcctctgctgcgcgtgaatatcgtaagcactgtgcgcaacccctcgttcccgttgcccgctccctgcaggccccatggcgtcggtgtgctactggctgcacacgccccttgccgcctgctgcgtgccactgctgcggcaaagcccagcaacgtgctgcgttgcctgcctgtcaaggtgacggatgagtggggcaccaacaagtacgacatggagagcggggagcccaagcgcaaggtgcatcgggtgatcaccatggagaagagcagcaagactggtaagatggagctgcgcagcaaggcagtgccctgccagctgcagcaggacgggagcagcagcgcgggccctccccctgtgccacgtggggcccagcaggctgtggccctgtggtgcaagcgtgagaagcagcgtgcagctcggcgctgcggaggagggagacgtcaagacgaaggcacacgcaatgcacagagaagagcagatggcttgtggtgtttggaaaaggagatggcagatctcacggaggaggatgtgatgaaagcagggcagtaccctgaggtgcgcggtcttcaggccaaccaggccgggaagtttgtggctcgggtcaaggccagtgctgttgcaattgggacgtgcagagtgatgaagctgctgggcaagggccgcccggccccattctgtcggtcgcacaacaaatcgtagagttccgttgagacgaacggagacttggcacagaagtcctgccaatacaccacgcatggctcgtcatggtgtcacggtctacggtatcaccgtcagcggcacggtaccggcagaacgttgcatatagcgttttgctgccttttgcattggtgttttggtgctgcaagcatgagccatggaggtagagctgcgatcggtggtgcatgcgagatcactgccgtacgttgcaagtctatttgagcgcagaaccgcgacgttgtcgctggttcttgtacattttctgcgtaagcgttatgtgacacaatggaccccgctgtggttaggcagtgttcggccgagcctcagcgtaaccatcggacacatgtaacaacccgtgcagagaagccgtctcccagttgcgtttcctagcagctagttatagcggctagaggtcatttcagttgcgattgctgagcgatcgggcggcattgggcgcagccgtcatgccgatcgtccacaagtggccactaggcacatgaaatgcacgtctgcactacgctggaccgtgacaatgggaggttacatttccagtcgttccaggtgtacggctccgctttggcaaggttggttgcgggtcgctgggcggccttgggaacttgtggcggcaggcggatggagagagagagagagcagagagacggtacacggtgtatttggggcatgggtggcggaagcatgggcgcgcgttggcgaagtcgaggtgggtgtatgtcaaggcccggttcccctgcaaagccccggctgagactggaatgtcgtggagactcgtgattcgtgttactgtcggagttcagttcgcatgcacattggcccgtatacgctgtggacgtacaagacagggcaagtgtgtaagtactttgaggctcggttgcgttcaatttcccctgtcgtctgtcgtttggaggtgaggcatcgatcggttgttgctgcaggttgggtaaggttgagggcagacgggggcttgtgccggcgggcagctccgtggcggtgcgggatgggcgcatggcggggtgagtatcgcctgggaactggggcctcttttttggcccgtttacaatgccttagttccggacttcggcacggcttccgtgtcaaacgcaagtaccggtactgtcaggtgtctgacacactgttgtggaaggatttctggggaccatacttgcatgtgcagcaaatacgtccgaatgcgatgagccacactgccgagatgcggggaagcggcgaaaccctacagacactggggcccagtgggaccgagcggcgtgtgtggctctgttttggcagcagtaggcaggtgcgtcagcgccttgcccgcatcaacaacgccgtgcgtggagagccccgccctttcgtagcctactgccgtcggtgcactgcgcatgttcggcttgagcgcctgccgtgcgtagtagtcatcgcaaagggcctcgcgtgtgatcgcttgccggccccagggcagggggctgcacttgcaacgagcagcacggacaatcacggcgcgtgcgtgcgaggcaccttgtgtaaggctccttgcatgcggcaaccaccaagacccaccgtgcctggaaaccgtgtacggactgctttgcagtaacgttcggttggcgtcaccgcgtctcatcccacgcagcaaacgcacgcacaacagcacaccgcccctacacgcggcgtcggtacgtcagatgtcaggctccttgggccgtttcttgagtgaacctgaaactgaatgcaccctgatgcgaccaaaggagttcgtttcctgcctgcgcgtcctgggccgtacggacatccggcccccgtaccacaagctcccacctacgggtgctgccagctgcaggactgcggagctgtgcataccccctttcctgattcctggctgatttccgccgttcgtattgaggtgtacgggctaggactgggcgcaggtgtgcaactggaaggcatgatccgcctgcatccgcttagggaagcaaccaaggcgcagggcaacggagtacttagtcttcacaaacgaaattcctccacaattttccgctgcgcaccgctaaggatatattggctgtgttgcgacaggctggcggtggtgacaggctggcagtatagtgtgttaattggctgcggcggtggctacaggcatgactcagactgcatgactcagatgcgattcaggcctcacgcaaccgtaatactccattgaatgctgttcatttacaagcgatcaggtcggcgacgcgtttggctcttggctcatttgggttcgtcgggcaggtgcatcacagctcgcactgtgacattccgacactcgaccatatccgcctacacctgacagaccgtcgcatccgcgttgtaaacacaaacaacagctatgatacttaagtgcatggcagatgaacttgatgcagcggcatggcaaggcccgcatcgcagcagccggggcgcctcacagcgcaacgccggcccaagaagtcacactgaggagcataggctcgcctggacaaggcctcgggggtgctgcaggcctggcggtaagccgcgtggggggagtggaccaccgcagcggccctacgtcgatgtgcaggctcgggctcgtggaccggcgcagcatgctcgccatgcagtgtaggagaacacaaactcattgacggtgttgagggtggccgcggggccatcggaccagtgcatgcgaactcgcggctgtccgacaaacgccgcgccgctgacccttgtgcaaagaaagtgccaaccttcgctctatgcgtgcaaaaagctctacagagcggccaaaatttcgcgctatgaactcctcctgaaccccagtcctgcacccgacaggcccctgtcctgccatctccctcccctcccgtccccacgcccacagcccctcaactgtacaagcaagaccgctcgctgagccaccaccgcgctgtcaggcgccttcccccagcccacaccaggtgcgcattgaggcgacgaccgaggaccgactcgctcacgcacgcccactgcacgcacggcacagcaagccagcagcagcacgcccgactcacatcctgcccctgcacaccgggcaggtcaggggttggccgtcgttggaccgcttgatgagccacggccggacgcacttggggtggtacacgtgtccttgctcgcacggcgcgtccaccgccgcatcgtccgccagcgcctctgtgcagatggcgcaggtcccgtccgaacgcaccgtgacgctgccggacgccaccatgtcctgcactgtcctgtgcttgcggctgactctgcactcccgctgcgccatgatggccaattggtcctcgtcgtaggaaccgggcaccggctgcgagcgccgcggccgggaggcagcgatggtggtgatgggcgggaggcgagcacggcgccgcatcgtgtccatcacgtccacggcgtgctgcgtgtcccggtaggtggcggggaggggtggggcccaagccgcaacggccgccatggtggcggtcatggcggcggccagggccgggggtgaggcgggggcggaggcggggccggggccggggccgggggtggaggcggaggcaggcgcaagggcaagggcagggagggtcgcgaggatgttggcgatggcgtcgcagtcagttgccgcctgcacctgcagcaccatgtattccgcgtgacccgcgtcaatgaaggtggggtcgtcttggtccatgggtaggtagttcacctcgtgcgccttagccttacggggcttctttggggtgtgcctcatggcgcaggcaggcaccctgcgggcatcggcatcatcacagccgccaggaccttgcgctttacggatggggtagggtttttatgtaccgtgggagcaacattggggggtggggtggggtccgggacgcggccatgacatgacctgtatgcgaacggcggcagcagggcgggggcgtcgtgtggcattcgcccctgcgtggcctcgctcaggccccggcatcttgtgcgcagtgtgctgcttccctcctcccccctgtgcaccccgccaaccccgtcgcacctggctgcttggctgccttggactgcaatgcaggtggaggcggcgggtacgcggcacggcgtggtgggacgagggccttgggctcgggcttgggcttgggctcgggcttgggctcgggcttcagctgggagctggcgcagcggccggggcgctgagcatggggcgagaaggcgtcgccaaggtgagcgacagagtgacgcctaaaatgcgtgaaagccacccaaaatgcagtcgcagtatgcaagttagtgagcgcgttggcgccatggcgcgacatgtctgacgcgca

SEQ ID NO: 22 - DNA, 14348 bp, unidentified; identical to SEQ ID NO: 21
  misc_feature 1..14348: note = Fanzor polypeptide
  source 1..14348: mol_type = other DNA

SEQ ID NO: 23 - DNA, 21536 bp, unidentified
  misc_feature 1..21536: note = Fanzor polypeptide
  source 1..21536: mol_type = other DNA
gcgctagtcgccacatctggaagcggcttttgtgggcttgctctcgttggggcaccccacgctcccgaaaaccagacaaacgaatgcgaacgacgatccccatgtggtcgacgcctgtgtccataccaagccgccgctatacgcacttgcactacgcagactgacggccccaccgtcaaagtcactcttcaattgtcctcctcccacaacaacctccgcctccataatgacaatcacacaaacttcgctcgctctcctggtcattgccgctgccgcttccaatggcctctccgacgccgcaaacctgcgccaggcgcagcgcaacctcgccgccacctacagacagccaagcgactacctccccgccatggtggcccgagtcaacaaggagcgagctgctgtcggtcttcctccggtctgcgcgaacctgaagctgcagtcttcctcccagcgtcactcggacgacatggccgaccacgactacatggcccacggcggaacggacggctccacgatggagaagcgcgtgacggacactggttatgcttgggacagggtcggagagaacgttgctgctggccaggaagacgtcgatgcggtcatggacgcctggatgaggtcgccggagcaccgtgccaacatcttgggcgactacaacatgctcggcgcctcgtacgctttcaacgaacgcggcacgtaccagcactattggacgcaggacttcggcaagagcaaccgcgagtcgtgcagcaatccaggcagcatggccccgaactcgagtcctaacactcctggccgtgtccctccaagcaacagcgtacctcaaaacaacggcgtacctcaaaacaacggtggcgcccccaacaaccagacccccaagcagcaggaccaagagcagggcgaagctgaccccgcagtgcaggagaacattatgcattatcctgaagcccggagcgctctgagtgcgaaggagctggaggccgacctgggcgttgccgtctcgccggtgccaaagactgacgtgcacgttgtgaacgcgaagactccgtgccccgcgggtgagcggtcaatcgaggagccggtcgtccaatccgacgcggagaaggactgcgatcccaagttctaagacgataggaaagaagtgctctgtgttcctcaacgtataatatagctgttgttcaacatactctaccttggcaatagtacttgcacctctaatcactaccatgatggctgtcgtagcctacgaatctaccggtagttcgactcgcaggcaacgcaagtcaaactgcttgccggacgatcgcaatttggctgcaactcaaaaagttatctgacgcacttattaatataataatacatactgtaaaacctctaattgtgcccctggggtactaagttagtaccccacccacgcaaggggggtggggcactatttgagggtagtgcccagctaaatgcccccacaaagaccgaacacgctgctactacataaactacacagtaggcaaatactactttctgtgctatttggtgcagttttggggatagtcaatatatccagagtaaacaaatcagcggctgctatcgcgcagctgcgtaagataaacttaccttcggactggctggtaagataaattcgtttttagaaaaaaaatcagtggcctcctgtcgccagtccaaaaccctccctcctcccccgcaggccgcaagcgatcaggtcctgaccccgtggcatggtgcgtacgcgtgagttagttcatgtattccctgcttaaggctaacctgtacgtatccataccctatgtcaggccccggacgacgacatagctgccgatggagctcgcgatgtgaatccagaagctcctctcgagatggtcactgtgaatgcaacacccagccaagcaagctcagcccaagctcctcccaccaccgatccacccccactcacgccactagaagaagcagaagcagagcggatacggcttcgggcgaagaagcgacagcagcaagaaaacacagtgccgaagtctagacgctcccccacgctgccaaactgacgaggatcggccccgaaacgctgaagcggacccggcagacagtcaatcccgtgccgaccaagctgagcgttgggagtcccgcctggcccgtcatctggcagctgacaacgaggacgaaagtgaaggtgaagcagcgctagcggaagtattggcgcagcttgaggaagaggatgaagatgagtctccggacaacagtggcgattcggactacaacgacgatcgacgaacacctgagggcgatgacgatggagactcctgtgacggtattggacgcgctactgacatcgattccgctgcgaatagtgtgccgacaccgcaccaaacaccgaagaagcaccaaaacccgaaggcgaaccaaaagtctgtccagtgcgaggacgaagaatcggaaagtcaaggtggtgtggaagatgtaccagtcgtcggtgactacttggaaggatttcctatgtactggtcgtcgtggaaagtttctacgaagctttcgacgagctccaagaggctacgtaccagcgcttctcatcccgcacaagtacctcaattaagtccaggaacaagcaaattgctgccgcgcagaaagaggtcaaaaagaaacaaagtaagccgaagacgagaaaggttcgcgcccaccgacagagcacaggtggcacactattgccagagtcatgggagaaatacggcagggacgttcgtgtgcactcatgctattccgtacgagagtcgtggagaaggcttgcggcagcatgacgccgtccgttttgtggcgtgtactgctcgtgtcaacgcacgggtttgtagtcgaccgagtggtgttggatttcatatcgttgtgaatgcaacgggaatgcacagccattctctcaccgaacatcagtggtataactacgctgagaacagacgcgtcttgggtccgtcctacgccgcgatgtggcagtcatgagcaaggcgggggccaagccacgagggatattagcgtatcttcgagccaaaacaggttggtggttttggtgtgtattctgtatattgcacgaaacactaataaaatttggtttggtgttctataaaggcaagcgaacgattctacgagacgtgcacaacatgatccaggacgctaagaagtgctttaatggaggtcgaccggatgcggagcgcgctgtctccgtgctggacgaattctgcgagatgaacactggaaatgtggcggagttcgtcattgacaaggagaccaacgtggtgcaagtgataacgttccagtcagcgcggcagaagcgtctctttgcagccttccccgaggttgttctggtcgactcgactcataacagcaacgcgaaccgttataagctgtttagcttcgcagtccacaacgtcttcggccgggtgggtaaatgctttcaggctctaacaaaaatgtactgaacatttgtataattttctgtgtggtttattttcttagggtcaattcgtgcaacacgcattggtgcggacggaagagaaaccgaacttggctcttgttgtcgcagcattcaaaaggcacaaccctgagtggtccaagatccgtgttgtgatgtcggataaggcactgcatgagaaggaggtgctgttggaaggatggccgaatgcgcgccagctactatgtcgttggcacgtcgaaacgtggttgaagaaacagtgctccagactgggagacgtcgggcctacagaaacgaaggaactcaagtcaattatgaaaggattggtgaatgcggcatctcaggagcactatgacgacctgaagaaggctctgctcgagacagtcgggaataacgacgaaaacctgctctacaaaagttttatgaagcactgggatacgactgctgacgagtgggtgatgttcaagcgtggtgacgtcccacacctgatgaacaacacgaacaaccgtctggaatcggaatgggccgcctcaaataggttattgacggtagtttcactgttgatgagctcctctccatgctgataacaatgcaagattacactgaagaacgctacctggctgatttccatcgtgtcagcagtcgccctcccattgctgaagatccagagttaactgcagtggccatgcatctcagcaactacgccttcgagatggtggcccatcagtacacattggctgtcggacctcaggcctgttacgacatggagacgacaccagatggcaaggcgagagtgacaaacctagcgacaggcaattcgcacgttgtagatgctcgggtgatattttggttcaattttggtggtttggtaaattttcgggtgctgtgactaacgctgggttttgttctaccaacagcttgctgcatgcgactgtatattcaggcagacctgtttgctcccgtgccgccatgtcatgtacgtccgtgccaagtctaactacgagacggtagttccgccaatggttcgtttcgctacccgttggatcgtccaaagtccagctaacaacatcgatgaggggcctgtactgacggggggattaaaccgcatcaactgcccaccccgccgtgccccacgagcactatccagcgacgcgaagtacagccaaggcaaacatattacagagaagatcatcgatgtcctctcgatccagccgtctaccacacacaaactggcaatgcagtggcttacgggtttctacgacgcgctacatactggcaaactggaggagttcactggccaagatctgtgtgcaacaagcggcttcaactcgctgtctctagtctcttcggttgctggtgtgacagcatcgcagctttcttttgctgagatgagcagcgcgcccgaagacgagtcgaagtgcgatgtgacggcagggacggaccttgaagaaaaagcgcccgtcccagtagccgcaccaccggaatcgactaatcaccagacgactatcacaccgtctcagcatgagaatactgtaggtcgaagtccagcggatcctatcaccttagcatcgccaccgaagcgtaagggattgacgcggcgtgcggagaagcacgaagcgtcgaccggagagctgcaagttgcaaacaagattcggttgcgcatctcagaagggagaaaggcgcgtgccgttaagctctcggacatggcgattcttaaaggcccgtacagcagacgcaccaccatgtcgttcatcgaaaggttgagcttgccatccgtggaagtggctgggaagctcgacgttcgtagcttcaacattgggcagcccgtcccagtgattaaggcgattcctcaactggaaaagatcgaggaggccatagaagcaatcgaaaacaagagcaacaaggcgctgcttgctcggtgggaggactatgggtttgccacgtacgggtaattgacgctcatggctcgagtgatcaaggcacgaaacaacttcaagttagtcgaagatacgatgaagtggattgactccttggcgtttcgagttgccagtattgtgtgccgttcaaagacatggaggacgtgactaaggtaagatttccttgcaccgaaagtataccaaaagtatactaaatcaccaaacttactgatgtgctttgtgtttaggtggaccataagcaagcagtagacgagctgaacctggggcggtggtacgttggccgacatgaacaaaatggctgtgaattcctggcttttcgagagaagctctggctgcactcggggtctatcatcggtggtcttttggcactccaatccgagtatttggatgttgccattgtcaaccctcgctttcacgactttgatgatgctgatcagaagatgtgcacagcaaaaggatatggcgctgcgaatgccagggccaagttcgtgtaatgggcctaccttagctcactactacggcttacacgtatgccacgtgtatgaggaagcgtaggtttcttttacttgagtaagtatactcgagatccacgagtatactttaaacaagataaagactccaagtagcgagttttggtaaaagatgagaactgctatttgtgttttatgtttctgacttcctctaaatgtaatattctaaactaggaatctgccaacggctggttggcaggattctgctaacatgcaagtcactcattggctaaaagatgctgctttcagccaataggaatcctaaatgtgtatggaccacccgtcgtggtggttgtaaatgtatgtagtcattggtgtaccttacaccaaggtcgaggaagtgttcaaacctctaacagacatcgcatctgttagagtaacaagtgactgtagccacttgtgcgtgtaaccccgttacagttcgtcatcagcgtgattaacttggggcaccacgggggtgcatttttcgtggagacggagacgaagatctgctacctgtttgaccccatgcagctgactagcaatttgtccgcgctgaaggaagcagttctcactgtggttgagaagatgctggacatgaccgaccaactggactaccacgtcattgcccactaccaacagagggatggtacgtcgtgtggcatttggtgcttggtggtgttggaactactactgtttggtgcaactcctgaaacctggtctgactactggaaggactctctgtacgaagtggtgggctacttgaggttgcgctacctacggaaggtgattagcttgcagcttcagcagccccagcaggtttagtaggcaccctaacttcaatacatatctttggtagatgatttttgtgccagatcaaaacaccaaagtcataccgaaactaagggactttgttagcgtttgtggtagttgaaagtagacgccactccaaatttttgaatattaatgtaccttgtattttccaatactataattaagtgctcctataggtactcatcctcatctgtcacagatgttgctgtgaaagagagcattggctaggatgaatgaccactataacctatgctgatacaacgcacaggaatacgtaaattactggctccccgtaatatattcttgtagacgacaagcctcgcacccattatttgaagctatcatttaataacactttctgtagcagcaacacgatcccacctaaaattgtcgatcaacaactgggtgcatcctgaaatcacattttagatttgtgacgcacatttgtccaggttatgatacatttactacgtgattatactcgacgttgctgcctctacggagaaaaatagtactgaaagtaccattattttgaggctacttgagggtatccaatgggtttttgtataggatggtcacccctcttggcaaccccttttgacaacctcattttattgtgccttttgtttaatttgccgacagcaaaatcggacttcaagtccgattttcatttactaaaacaagggagatagtaattcgttatagtatagcttccccgaatatcggagttcggttttccgtgctttgctccttcggttttgctctcgttttcattcgaggtcccgaatggcggtgatttgttcgccatctgggacttcggctcgaaaagcgctatcgctttccctcgctttcgattggaaagcggagtcggatcaccatccctccgatttttcaaatcgggggtaggtcccctttattttaactcgtaaccctacctcaatagtaaaagtgatagtttttgaggtccgtttagccaaaaagatgaaaggcacaatacgtcacaaatttactccactgcttgttttctttcacttttgatacgagaccaatttgtgatttctggattttttttagctgtaagtgggtgcatccttttaacattccttccaaaatcagttttcatccctgttttacatcctaatcactcattactttaatttaatttaagttacatgtagctgtgcggtatgagtgagagcaacgatggtagctgtaagaatagaaaagtgtggcatcccaacagacaacgcatacatcacccttctcatgttagacaagtatttgaatttgaatttgttgcggtttaatcggctacctactcccggagacgcatctccgcgtacggtgatcgtgtcgctagatctctaggatatgagcccgcggtaggcgcccaatatgttagacaagcaacaagaaacttcacgctgccaataattccaatactaaggttgggaggggtactgtactaaattttcagtggagagtggggtactttaagagggtggggtactattagagggtggagtattacttgtaagtccccacccaaagtaatcaaaaatgagaggtggggtactaattgagggtggggcacaattagaggttttacagtatttagtccaacataccaaaaatggtccaggatggacaaattttcctgtagccatctgttacttttgctcagaccattcgtccaacgccggtgatggaggtagggcgccgccgggattgaactcacaacatacctgtagaacatagctcgttagaccgttacaccatacaggcgccccggtcatcgtctcttcgggctgggacttgacactgtctgattgcatattccaacactccccctcaatcgagagtgtcaggacctcctgattgcgacctatcctgcagcttgttggtccgactccaacgccgttgctgcaatgacctccctgggtttaaggccacccgtgtctccccctggaaacacattccgttcacagacacctcgtgttgtgacacgaaccacacaaccatcactacgatccacattccagcaaccattgaccatctgcgttctacgcgcttgggaaacgtattccttctccatgttgtaggtcggctagccgtgcacgttttgcagagtgtggaagacactccgcttggtcgaaatgtgccgcaggaccatttttctggcatctactgcacccattcgcactcctcgtccagcacaacgttcgttttgcgtacgctgcggttcattaccgtcctcgcgaacccgatttacgccgagtcctctacgatgcgcttagtcaacatttgccacacggccttcttcgttacgaggatcgacgatagcgatctccgctaggatgacgatgacgcacaagtggcgccaagtttgaaagtgcaacttgaagttgcgcctcgtcacagggtcttgatttgtgagtgaccatcactctgtggatcttcgatgtttggtgttatagcgaaacggcgcagtgcaaaatggcgccaagtttgaaagtgcaacttgaagttacgtctcgtcacagggtattgattggtttgagtcgcgggagaccatcactcagaacacgcattagccccggtgctccatgttgcacttcacttaaagcgacaggggaatgggcgataccgcgtttggaggcgtttggtaccgaagccgcctagcacaggtgggtctcattccgcaatttgcaagataccgggtaagcgcaagaagcccccccccccccgccgactcaacccccgtctacacgtatcaaagcgtcaagatgaagttcaatcagctctgcgacctcgacttcctgaccgccgagatccgcacgatggcatcggagctcaagctggtcggcttgctgggatggaagattgctggcaagcacgtcctgcggtgtctacaagagggcgcttccctgccggccctcgactccaacttcttctaccaggatgaaacggagaagaggacgaggaacagcccagagtatccggacctccacccgaccttcgtgagatactgggagctgtgcgaacgacttcccgaatacctccccccaagcagcgtcaattcgggtcccatgaggcgcgcgatggccgatacgatggagacgaacaccatcaacatgctgggtcttcactttcgaaggaggcttcaccagtacatccggttccgctacgcgacgacgggcaagctccaactcggctataaggcgacgcggaagctcgttgctggctgatatcgtgtcaaggaagtcccccacctcgatgtcgacggcgtggacaccggcaacgtggtctatgtatgggacgaaccaagatccactgcggagcgtgagctccacgactggcttggcttcgtgccctgggagtggcgcattcgccaaaacccgacccactttttcgtgaagctatacgacatgctccagtggatggaggcatttgtcgagaagcacccaaagacaaagggcgcgcgtctctactccctgcctccttactccagctcattcatccccgcacacgtgacgctaaacattacgtcgctgcatcaagtgttctgccgacttttcacggaccctgagcgtcaggcagaagtcaagacgtatgtgaaggacgagcttggcgtggaatgcggatctacagagcaagttcgccgccagtttagcgaaaacaaggatgctgtttttcggaagatgtttcggctaaatggacttgagaccagcacacgagagttcgcgtaccaaatcacaacggatggctatgcagcttccgttttgctgcgccgccagacgctttgccgcgaggatgacgacaacgcggaccagcctcgcaagcgccaaaagaataataaaggtgaagtagtcaaggctccggaagcggtcgaggaagacgccctcgaagcggcgatgaagaagttgccgcccggatatgctcctgacgtcatgatcggcatcgaccccggcgtgaggactgtgtgcaccgcggcatgtgaaggtagccttccaactcggcagtcgcgacgccgacggaatcgacaagggaagcgaaagcacaagatccgacgggcgaagcacaagcgcaagaaccgacacaggcagcggaccgtcgccatcaacacccgcgagtactaccacatgtccaaggctggcaagcatcgcttctggaacaacggtctgcgggagaaggaggcttcctacgccaagatccttgacggtatgccgacgttcaagacagcaagatatcaagtctacttggatgaactgcggtattttgtgaagcacgcaaagtacctggtgctgttctcggcacggcacttcttccggaagtggcgctttttactgtactgcatgaaaatgaaggcaatcgacactctggccaagcggcttgtgccgacaccaagtccacaggtgtgcgtcgcattcgggggctggagctgccaagacggactccggggcaaccctcgcgatccggtgaaggcgttcaggaaggcgctggagcggcgcgctactgtgctgccgatggacgagtttcggaacagtaagctgtgctcctgctgccaccagagtcttcgcagagcccgactgctgaccaaggtcaaggacaaagacaccaaggaggacaagatcgttttgaagggcaacagaaacgtcctgcactgtaagaacagtcgctgcagggcccacttctggaaccgagacgtcaacgctgccatcaacattttggagctgctcaagtgcaggctgcttgacctggcgaggctggcagcattccagcggtaatgacgaccaaggtttttgaaatatgtgaggataggctgttgtgtgggcatgcgctctgcgcattgtcagcgcaatggggttccgtacccgagcagacggtgtggaggagggaaactccgatgacacagaagccggtacatttttttagtttaaagaagggatttttttttccttttttggataaataaaaaggaggtggagacatagaaaaaaagcaagcaatggtgtacgacgtaaccgtagacgagtccagcgcgcagcagaacatggctggaatgaagtttagaaaaaggaacttgataaaccggtttatcaacttcgtcggcgcggggtttcaaagtttgaaggcggtatatcggtatttgctgttcaaaccaatactcttgcaaaaccaggaagtgtaacggatcgcaaacggctcagcttcgcttcctggagctcctatttgctcctcgcgcagatataattggcttcggataaagccgcaccctttcagtaaggtcgtggagaaaaggcaaaggcacgtacatgtagtttcctcactcttggcaccttttcccggcagcgtatccaagccgcactatcgttccaacgcaagaaaggcaaatggcgacagctgcgtacgccacctgcagcttctaggacgccgtggcgcgtagcaacctcaccatctttgctggagacgtcacatttcaattgtccctgtttcgagcacccctatcgtctaccacttctcgtcttcaacacttctcccggcccccaagctccacaacttcgttgtccctgaatcacatcaactctttgagagttcgccttcgctcctcgtgcttttatcggtaagtgctaaatgaatgccggaatcagcttttcgctatctagattgctctctctctctactaatatatgtagcgggccgcgccacaacgcgtgactacggcaaacgggcggtcaaataacccacttcactgtcgtcgccagaagcggtcgggttgcaagtgacgatggaccaactctcttccagtcgtgatttcaatgctgaaggaccagcctccactcgaggtgctcgaggtgttgatacagcaccatcgtctcctgtcgagtatgattctgaagattactgtgatgacactactgaagtgacggctacacgaggctacgcaaatggccagcagtcccaagtggaatctgctgttgctggagcaagaggagggcctgcccaaaacgtcactcacaactcagcatttgcgcgacttccgttatcagaacaagcaaggacgtcagcatcccaacagatacccttcacgcaatcagcacccccaataacttcgagtctaccctgcggtgatttccgtcggacgacttcgaactccgtaggacccggtgctggagctacgacaccaacgccgcaccagccacccgacgttactggccgtgacttttgtgagtggcctcccgagccgacggcgctgtatgatgcagacgatattgctcggatcccagcatgaatccgtgaggcggtactccagtttaggccaaattaaacgtgtacgccgatgcctctgccccgaagccatcggtctattacgttcaaatatggagtccgcgtgaagtgctggttccgcgaatcccttgttgtcgggtggttgtgcatggcaagcgatgcgtgccgtcgggatatcacgttcctgcccttccatggagaaaaaccactaatgctacaaagcacttgtgggagacgcaccaaatccagtctgaaaagacgaccctacagaatacgcgtaagcgggaccgcgctgaaggggtcaaccgcattctagcgtccgcgttatgccgtgacgatgcgaagcgtttgtgtttgttgctggagacgattcgaattgtctacaacaacttgccattccggtttggtgagtacgaagagtcagtcattctgaaggaagtcgtcacaaaagatgagttcaagacaacagtgaactcaagaacggtgacaaattcacttgtcgagttgtacgcatccggtcgccaagagctgatagggttcatcagagacaatcgtttgggacttatcaagtgtttgacgatggttgttgacttctggaccccaaagcatggtggcgaaaagtatctcggtttgcgcatctacttcgtcgactcccacttccgactgcgtactgtactcgtcatttcttgcccatgtatggagaacgcgaccaagggattcgcggcccttttgagcggtggatttgcggtattctgtttgactttggcctgtccccgagcgacttcttcggctccaccactgacagcggccccgacgttaaatggacgatgaacgaagggcttcgattgaagtgggaatggtgcatccctcacaaggtgaacgctgccaccaagatggcctgcggcttgacgcgaaaatcgcacaatcccgagatgtcggcgttgctaaacaagctatctcaaacggtgtacgacacctccaccaactcgacgcttggcgatctgcttcccatgctgatgataatgttgggggaaggcaatggtacccaactagtaggctacaagccgcatcgcttcatggggatggcagccacgatggagcgggttctggagaagtggccagctctggaggcatggtacgaggcgcgttcagctcagcatgcacggaaaaagaagcgagcgccaccagggtttcaccttgccggttgtcaacagcatttggtgcagctattatcaatccttacaccgattcttctcgtgacgaagcgatcacaggcgcaggatacgaatcaagtgcaagtcctgctgtccttgtatacgatgtgcatgacttctctcgcacttgacagccccatcaggcgctacgacacggctccgtcgaacgccgtcaatattcacccttttcaactaacatcgctggtggcgaggacaaggatgctgctacagaaggcgttttaccacaacttcttccgccgatatgtagacattgtatccggttcctacatttttgagatgcaactggtgatgtatccttcggttaagcacgtggggagtccgatggacgaagtgattgccgccgttgcacgtactgaagggagaatgcgggatgatcttgttgctggtcatgttgtcgccgtttgagctgcaattatgaagcgcttgaagtcgctaatgcgcttagtagccaacagtcaagacccagcacccgttgatccgattgctgctccagctgtgcaggccaatgttttcgatgacgacattttggcaacctttgcagttcaacccttccgaagcaccgaacgacctgctcaacaacgtaacaagcacgatactctcatcgccggtgagctgaaaaggtggctagaagattcggatgggctgcagatgataacagttcctgatccagccaagacgagcgtccgcagaccggagagtatcctggaattttggcatcggcagcagcagtccaagcgctatgtcttgctacccatggttgctcgcatcctgtttgcagtcccatcttcgtctgctcagattgaaagggacttcggcaacagtgggcaaatggtgactgccctgcgagcttctacaagcacggctaatatcgacatggcttgcttccttcatcaaaaccggtcatttgtcgatgtgtgccagtgcccaaagctgaaagcatccgaagtcgacgaacacattccaagcaatgtcaagattaacctggaacccgaggtagtggagcgaatggaatggaatcagctggcacaagcgtgcttttcgacatcaagcgcaagcgcatttgcttcttacaacgaggaggagacgaaagactcaagctgttagtttaaacgagtaggaggcgaaagactccagctggtagtttaactgcttcatatattcaaatatattcacctagcatattcgaagtggctttagtagtcaattccatgagtttgtcaagtccagcatgggataaacattacgaatactgcagcgcttttaccttcgcttggtgtgatttctccagcgcacttgcacgttcggcagcgcgtaatgctgtttcgagtgtcagttccgcgcggatttggtccagtctcgatagattggccacggcttgcggcttcgaggtttgagctgcggttggtttacgcctcactttacctgctccagctctaagaacgcctttggggtgcaatgctggctgatcgttgctgtaggaagtcttgcgaccttgtcgaccttgtcgacctggggaactagctgcttcatgatccgactttgcctcgtgcagcgatttcattgttgcttcgatcgagttcctgaatgaagtcatcgcttgattcacctctgcctttattcgggaatccataatattctccttgtcttgaagaatactctggttcgagacaacatcttgctgattgtggccctgtgtagccatctccgcacgaagtttcacaaatttacgctcctgcttgcgctgcagcttgtttagttttgcgtcaaaacgcagctccactatcagcaacaagtttttgagatccgctgtctagattctgtctttcagcgcgcaactgggcagaaatcaaatcagccacgctggagtcacgctgttgaagacgttcatcgacataggctttcattaccgctgtcgctttattattcaccgctgtactgcacgactccatcgctatctgaaagaagtgctgcgtccacgacttcgtgtcctccactttgcagtccaggtcactcatatgcgcctgcatctcggttcgtatcctctcttctgaagccccttactacactgtctcgcctgcacagctaattggcgctcgacttctgcaacgtgatgttctcgctctgcacgaaggtgagcttgaatatcgttctgcaggctgcgtgtctgaacttgaagctcttcattaagtcggtgtgatgcttgaataccttctaccatctgctcgttcattcggcgctcactttcttggcgggtctggcgcaccagagtttgttcttccgtcctgcgtctggcctcctgcagctgaagctccatggcttgacgctcgatgcttccgtccaccagcaccagatcttcttgtacggataggtgtttctgctgatccttgatggaaatgcttcggttgcgcctcgcgtgtggcgggtttccgctttgcagagcttgatcatcgtcgtggagctcacttgtgtacgatacaagaggcgcgtatgagtgctgcatactgcctcgactggtgagcaagatgcaatggcgttcacggtgcagggaaagataccgtatttcgcatgtagaaagctgcaccggcatatgagatgcactttgataactaccattcttttttttacttgctcaaaaggatttatctcattttctttttattattattgtttttctttttaggctggtggaacagtgatctttcgctaaggttcctacattttcactttggtcaccgcacgtcgcatgcagagcccgggatgacttcagcggccactggaccgctgaagtgctggtctacgctgcatctattagggtggtgctgctgaaggtgcctccccatgctacgtctatttgccagcctgcagacgtagcatggaatcatccgttcaagacttggctgcgcaggttttggctcgaggacatccagcggcaactgatgcagccgcgcgacgcggaagccaagtttaagctgactccaccaggccgcgccgggatgtgccattggattcgcgctagttgggagagcctgagctccgacaccatcgcgaatggatacaagaaatgcgacttacacctcaacgaggagtgcctcgccgccgcgtcgctggtggcagagctgcagaacctatcgctagtagggccagtggccaaggcggtcgaccaaactcaagacttcgaccgcaatgtcattcttgacgaagctgtggtgtagctttcttctacaatacatattttgatgcacatcgttttttaaaggtatgttttctgttgtgaacatcatgtgcagctttctacatgcgaaatacggtatgtgctctggtaaggccgcgcacttaaccgagaagtgcccgacgtctcacatcaaggctatccagccaatgggagaagctaggcatgaactcgtcgtttcgttctctcgaataagttaaaccttcgttcgcttcctcccgcttaagttttcatgcgtttgaaccttaaaacctcaggaactgcggttcctgaggttaatggattcgtcagttccgtggccagccatgcagcagaagctgctgcgcgacgcgcagtcgacggacgagatggcgcgcctgctcagccaggagatctctctgtttcagcgcaacatgtacaaaaaccacagccagcaccggcgcgccttcttcttccagaacctgcagcaggtcaagcgccgtctgcgcgatttcaaggtggagaccctcaccggctgctttgcggaggctgcgggcgtcttgaagcaactggagctcgacgcaggagcgcaccacatttcctggaagctgctggcctccgacctcaaggtcggcacggacgccgtgctgcgcaagctcgtgacgctcacaagggcggccgccgaggtgatccgagcagctcagaaggcctacaaaggtgcggaactgtagcgtttatactggtgtgctgtgtgtactgagctgatttggtggtggtgtgcttctgtgtgcagctttaatggtgcagttcgccatgacgtacttcatgccgttcgcgctcatgatgaacagcgtcctggcgcggttgacggtgctgttcaagacagtgatcgtgcgggcgatcgagctgcacggaggcatcacgctgctgtatctgaacgaggtgaccaagtcgaacccgctgcgagccaaggtcactgccgtgcagctccgcgggtaccagattcccagtgacattctccagctcgccaatgcgtagattggacaataagcattaggtacaggcagaagcgaggagtaacacacgtcgtaaaatacatgatatagacagcaagccagcatgaatccaacatactacaggtatgcggtcgcctcgtgaggtatcgggaacggggactgcagacaaaatggagcagctttgttgcgcggaagacactggcgactactgcgcagtctctaatcacgagctgttcgggggagtggtgtagccaacgatcgtcttgtggaactccacgacaccctgtgagagcagtcaactcctccaagtcaatagccgattccgtcgagactattttcaataaaaccacgcacctgcacgctgaggtccagtactcgtgtcgtcatgtcctcatccatttccacctgcacaccaatagtacgcatcgtgggcgctgcgcaacacaactccagtcagcagcatacgcacccccaaatcccagtacgctccaattcaaagctcctcaccgctacaggtacacgacttcttggagagaccacagcgattacacttgtagttggatggcacgagtggacacacgtggcccttcttgggctctccacactgcagccagccagccatacgcacagcaaattagctcccagctccaccctaccagcacccgatatcttcctccttcgcaccttgctgcagcggtagtttcctcggttccggttctgctgcgtcttggtgctcaggtccaggtcgaagctggcggcgtccagccccgccatggccttgttgccgtcctgcagctggtccatgaagccgcccgtcgggtccgccatcatgggcatggcccctatgccgtagtccatcatccccactacatgggaccgagcccaaaccgtcagttctgcacccaaatcttacatcaagccacggtcattatagtacgcactgccattcacgtccatgggcatgttcccgttcatcttgcacgcgctcggctgaccgaagcaaatgtgcgtcttgcgtgcgggataaggttgacgagctgagaaaaatttcggccgcgtcacaccacgtttacaccatctacctattcagccacatactacacgccgcatgccgtagcatgggaattgagccatccgccccaagtcagcgactccatccaaagactcgagccatgtccttcagcttcggccagaccagcggcggcggcagctccggcggcttctcgttcggcgccagcagcgccgcggcgccggcctcgacgtccactgcggctccgagtggcggcttcagcttcggctccacggcgtccacgacggcgtccactgccgcagccccgagcggcggcggcttttccttcggcgccgcccccgcgacgtccacggcgccgtcctcgggcttcagcttcggcgccggcgccaaggccacgagcgcggcgcccagcaccagcagcagcggaggattcagcttcggagcgacgtcggcagcccccgcggaggccaagagcagcgcagcgccggctcctgcggcgcccacgggcttctccttcggctccaagcccgctgcgacgtccgccgcaccttctagcactagttcgggcttcagtttcggtgctaaggcaccggcagcgcccgcagcggaggccaagccggcggccagctcgggcttcagcttcggggccacgtctgcggcggcggaggccaagccgacggctgcgcctgccacttcgggcttcagctttggagcatcgtcgactggcgcggaggcgaagacggcgaccacgacgtctacggcgccggcgacgggcggcttcagctttggagcgaccagtggagcgtcgacgacgacgatggacgcggccaagccggcggaggccaagcctgctacttctggcttttcgttcggagctactggagctagcgctgctacggggtccagtgctgctgccacgagctcgtcgacgaccgcgtcgacgggcggattcagctttggaggcgccaagcccgcgacttctacggctgcggagagcaagacagacacgacaactgcaccggcgttcgggttcggaacgtctagagcggcgtcgactgctggtgcgtcgactacggcagccacttcgactgcgaccaccacggctatcacagcagcggcgccgaccgagacggacaagcccccggctgagtacatgggccgaacgatcgaggtgagactggttggccatgtggtggacttatcaagcatattactgatggtttcttttcgtatgtgtcgaattgcaggatattattaatgcgtggagcgagcagctcgagcgtaatgccgacacttttactacagaagccgttaaaggtacgacaccctctccagccatcggatgctattacgcttgtttcatgtagtgatgcgttttgctgataaattggcagtaagcaagtgggacagcgacctcatggacagccaacggcagctgggcgacatcgccggcgatgtccggcgcatccaggtggctcagaacgagctggacacgaacctggacacgatttttgcgtatcaaatggagctgaagtcaacgcttgaggtgcgaatgtggatagtagtgattaactgcttgggtacttcgatctaactgttgtggtggtaattgcgtgcatttagcaattggagaagagcgtggacaagatgtacgagtctcaagatcagatgcctgtcgctgctgatattgagcgcgagcagactctgcagctatccgtggatatcgacgatcagttgaactcgatgacgacgacgctgaaggagacggtagagaaactgaacaaggcccaggtcgacgtggcagacgacaacaatccgatggtgcagatcatgaaggtgctgaacgtgcaccacaactccctccagtggatcgagggcagcgccggcaagatcaacagtgaaattgcgcagctgtcgcgtaaactgcaggactcgtccatttaaatggctccgcacgaagcacgccgtgagttgcaagttgcaagaagagctgctttgtgccccgcaagctgaagacgcacttgagatctc

SEQ ID NO: 24 - DNA, 21536 bp, Phytophthora sp.
  source 1..21536: mol_type = other DNA
gaggcgctagtcgccacatctggaagcggcttttgtgggcttgctctcgttggggcaccccacgctcccgaaaaccagacaaacgaatgcgaacgacgatccccatgtggtcgacgcctgtgtccataccaagccgccgctatacgcacttgcactacgcagactgacggccccaccgtcaaagtcactcttcaattgtcctcctcccacaacaacctccgcctccataatgacaatcacacaaacttcgctcgctctcctggtcattgccgctgccgcttccaatggcctctccgacgccgcaaacctgcgccaggcgcagcgcaacctcgccgccacctacagacagccaagcgactacctccccgccatggtggcccgagtcaacaaggagcgagctgctgtcggtcttcctccggtctgcgcgaacctgaagctgcagtcttcctcccagcgtcactcggacgacatggccgaccacgactacatggcccacggcggaacggacggctccacgatggagaagcgcgtgacggacactggttatgcttgggacagggtcggagagaacgttgctgctggccaggaagacgtcgatgcggtcatggacgcctggatgaggtcgccggagcaccgtgccaacatcttgggcgactacaacatgctcggcgcctcgtacgctttcaacgaacgcggcacgtaccagcactattggacgcaggacttcggcaagagcaaccgcgagtcgtgcagcaatccaggcagcatggccccgaactcgagtcctaacactcctggccgtgtccctccaagcaacagcgtacctcaaaacaacggcgtacctcaaaacaacggtggcgcccccaacaaccagacccccaagcagcaggaccaagagcagggcgaagctgaccccgcagtgcaggagaacattatgcattatcctgaagcccggagcgctctgagtgcgaaggagctggaggccgacctgggcgttgccgtctcgccggtgccaaagactgacgtgcacgttgtgaacgcgaagactccgtgccccgcgggtgagcggtcaatcgaggagccggtcgtccaatccgacgcggagaaggactgcgatcccaagttctaagacgataggaaagaagtgctctgtgttcctcaacgtataatatagctgttgttcaacatactctaccttggcaatagtacttgcacctctaatcactaccatgatggctgtcgtagcctacgaatctaccggtagttcgactcgcaggcaacgcaagtcaaactgcttgccggacgatcgcaatttggctgcaactcaaaaagttatctgacgcacttattaatataataatacatactgtaaaacctctaattgtgcccctggggtactaagttagtaccccacccacgcaaggggggtggggcactatttgagggtagtgcccagctaaatgcccccacaaagaccgaacacgctgctactacataaactacacagtaggcaaatactactttctgtgctatttggtgcagttttggggatagtcaatatatccagagtaaacaaatcagcggctgctatcgcgcagctgcgtaagataaacttaccttcggactggctggtaagataaattcgtttttagaaaaaaaatcagtggcctcctgtcgccagtccaaaaccctccctcctcccccgcaggccgcaagcgatcaggtcctgaccccgtggcatggtgcgtacgcgtgagttagttcatgtattccctgcttaaggctaacctgtacgtatccataccctatgtcaggccccggacgacgacatagctgccgatggagctcgcgatgtgaatccagaagctcctctcgagatggtcactgtgaatgcaacacccagccaagcaagctcagcccaagctcctcccaccaccgatccacccccactcacgccactagaagaagcagaagcagagcggatacggcttcgggcgaagaagcgacagcagcaagaaaacacagtgccgaagtctagacgctcccccacgctgccaaactgacgaggatcggccccgaaacgctgaagcggacccggcagacagtcaatcccgtgccgaccaagctgagcgttgggagtcccgcctggcccgtcatctggcagctgacaacgaggacgaaagtgaaggtgaagcagcgctagcggaagtattggcgcagcttgaggaagaggatgaagatgagtctccggacaacagtggcgattcggactacaacgacgatcgacgaacacctgagggcgatgacgatggagactcctgtgacggtattggacgcgctactgacatcgattccgctgcgaatagtgtgccgacaccgcaccaaacaccgaagaagcaccaaaacccgaaggcgaaccaaaagtctgtccagtgcgaggacgaagaatcggaaagtcaaggtggtgtggaagatgtaccagtcgtcggtgactacttggaaggatttcctatgtactggtcgtcgtggaaagtttctacgaagctttcgacgagctccaagaggctacgtaccagcgcttctcatcccgcacaagtacctcaattaagtccaggaacaagcaaattgctgccgcgcagaaagaggtcaaaaagaaacaaagtaagccgaagacgagaaaggttcgcgcccaccgacagagcacaggtggcacactattgccagagtcatgggagaaatacggcagggacgttcgtgtgcactcatgctattccgtacgagagtcgtggagaaggcttgcggcagcatgacgccgtccgttttgtggcgtgtactgctcgtgtcaacgcacgggtttgtagtcgaccgagtggtgttggatttcatatcgttgtgaatgcaacgggaatgcacagccattctctcaccgaacatcagtggtataactacgctgagaacagacgcgtcttgggtccgtcctacgccgcgatgtggcagtcatgagcaaggcgggggccaagccacgagggatattagcgtatcttcgagccaaaacaggttggtggttttggtgtgtattctgtatattgcacgaaacactaataaaatttggtttggtgttctataaaggcaagcgaacgattctacgagacgtgcacaacatgatccaggacgctaagaagtgctttaatggaggtcgaccggatgcggagcgcgctgtctccgtgctggacgaattctgcgagatgaacactggaaatgtggcggagttcgtcattgacaaggagaccaacgtggtgcaagtgataacgttccagtcagcgcggcagaagcgtctctttgcagccttccccgaggttgttctggtcgactcgactcataacagcaacgcgaaccgttataagctgtttagcttcgcagtccacaacgtcttcggccgggtgggtaaatgctttcaggctctaacaaaaatgtactgaacatttgtataattttctgtgtggtttattttcttagggtcaattcgtgcaacacgcattggtgcggacggaagagaaaccgaacttggctcttgttgtcgcagcattcaaaaggcacaaccctgagtggtccaagatccgtgttgtgatgtcggataaggcactgcatgagaaggaggtgctgttggaaggatggccgaatgcgcgccagctactatgtcgttggcacgtcgaaacgtggttgaagaaacagtgctccagactgggagacgtcgggcctacagaaacgaaggaactcaagtcaattatgaaaggattggtgaatgcggcatctcaggagcactatgacgacctgaagaaggctctgctcgagacagtcgggaataacgacgaaaacctgctctacaaaagttttatgaagcactgggatacgactgctgacgagtgggtgatgttcaagcgtggtgacgtcccacacctgatgaacaacacgaacaaccgtctggaatcggaatgggccgcctcaaataggttattgacggtagtttcactgttgatgagctcctctccatgctgataacaatgcaagattacactgaagaacgctacctggctgatttccatcgtgtcagcagtcgccctcccattgctgaagatccagagttaactgcagtggccatgcatctcagcaactacgccttcgagatggtggcccatcagtacacattggctgtcggacctcaggcctgttacgacatggagacgacaccagatggcaaggcgagagtgacaaacctagcgacaggcaattcgcacgttgtagatgctcgggtgatattttggttcaattttggtggtttggtaaattttcgggtgctgtgactaacgctgggttttgttctaccaacagcttgctgcatgcgactgtatattcaggcagacctgtttgctcccgtgccgccatgtcatgtacgtccgtgccaagtctaactacgagacggtagttccgccaatggttcgtttcgctacccgttggatcgtccaaagtccagctaacaacatcgatgaggggcctgtactgacggggggattaaaccgcatcaactgcccaccccgccgtgccccacgagcactatccagcgacgcgaagtacagccaaggcaaacatattacagagaagatcatcgatgtcctctcgatccagccgtctaccacacacaaactggcaatgcagtggcttacgggtttctacgacgcgctacatactggcaaactggaggagttcactggccaagatctgtgtgcaacaagcggcttcaactcgctgtctctagtctcttcggttgctggtgtgacagcatcgcagctttcttttgctgagatgagcagcgcgcccgaagacgagtcgaagtgcgatgtgacggcagggacggaccttgaagaaaaagcgcccgtcccagtagccgcaccaccggaatcgactaatcaccagacgactatcacaccgtctcagcatgagaatactgtaggtcgaagtccagcggatcctatcaccttagcatcgccaccgaagcgtaagggattgacgcggcgtgcggagaagcacgaagcgtcgaccggagagctgcaagttgcaaacaagattcggttgcgcatctcagaagggagaaaggcgcgtgccgttaagctctcggacatggcgattcttaaaggcccgtacagcagacgcaccaccatgtcgttcatcgaaaggttgagcttgccatccgtggaagtggctgggaagctcgacgttcgtagcttcaacattgggcagcccgtcccagtgattaaggcgattcctcaactggaaaagatcgaggaggccatagaagcaatcgaaaacaagagcaacaaggcgctgcttgctcggtgggaggactatgggtttgccacgtacgggtaattgacgctcatggctcgagtgatcaaggcacgaaacaacttcaagttagtcgaagatacgatgaagtggattgactccttggcgtttcgagttgccagtattgtgtgccgttcaaagacatggaggacgtgactaaggtaagatttccttgcaccgaaagtataccaaaagtatactaaatcaccaaacttactgatgtgctttgtgtttaggtggaccataagcaagcagtagacgagctgaacctggggcggtggtacgttggccgacatgaacaaaatggctgtgaattcctggcttttcgagagaagctctggctgcactcggggtctatcatcggtggtcttttggcactccaatccgagtatttggatgttgccattgtcaaccctcgctttcacgactttgatgatgctgatcagaagatgtgcacagcaaaaggatatggcgctgcgaatgccagggccaagttcgtgtaatgggcctaccttagctcactactacggcttacacgtatgccacgtgtatgaggaagcgtaggtttcttttacttgagtaagtatactcgagatccacgagtatactttaaacaagataaagactccaagtagcgagttttggtaaaagatgagaactgctatttgtgttttatgtttctgacttcctctaaatgtaatattctaaactaggaatctgccaacggctggttggcaggattctgctaacatgcaagtcactcattggctaaaagatgctgctttcagccaataggaatcctaaatgtgtatggaccacccgtcgtggtggttgtaaatgtatgtagtcattggtgtaccttacaccaaggtcgaggaagtgttcaaacctctaacagacatcgcatctgttagagtaacaagtgactgtagccacttgtgcgtgtaaccccgttacagttcgtcatcagcgtgattaacttggggcaccacgggggtgcatttttcgtggagacggagacgaagatctgctacctgtttgaccccatgcagctgactagcaatttgtccgcgctgaaggaagcagttctcactgtggttgagaagatgctggacatgaccgaccaactggactaccacgtcattgcccactaccaacagagggatggtacgtcgtgtggcatttggtgcttggtggtgttggaactactactgtttggtgcaactcctgaaacctggtctgactactggaaggactctctgtacgaagtggtgggctacttgaggttgcgctacctacggaaggtgattagcttgcagcttcagcagccccagcaggtttagtaggcaccctaacttcaatacatatctttggtagatgatttttgtgccagatcaaaacaccaaagtcataccgaaactaagggactttgttagcgtttgtggtagttgaaagtagacgccactccaaatttttgaatattaatgtaccttgtattttccaatactataattaagtgctcctataggtactcatcctcatctgtcacagatgttgctgtgaaagagagcattggctaggatgaatgaccactataacctatgctgatacaacgcacaggaatacgtaaattactggctccccgtaatatattcttgtagacgacaagcctcgcacccattatttgaagctatcatttaataacactttctgtagcagcaacacgatcccacctaaaattgtcgatcaacaactgggtgcatcctgaaatcacattttagatttgtgacgcacatttgtccaggttatgatacatttactacgtgattatactcgacgttgctgcctctacggagaaaaatagtactgaaagtaccattattttgaggctacttgagggtatccaatgggtttttgtataggatggtcacccctcttggcaaccccttttgacaacctcattttattgtgccttttgtttaatttgccgacagcaaaatcggacttcaagtccgattttcatttactaaaacaagggagatagtaattcgttatagtatagcttccccgaatatcggagttcggttttccgtgctttgctccttcggttttgctctcgttttcattcgaggtcccgaatggcggtgatttgttcgccatctgggacttcggctcgaaaagcgctatcgctttccctcgctttcgattggaaagcggagtcggatcaccatccctccgatttttcaaatcgggggtaggtcccctttattttaactcgtaaccctacctcaatagtaaaagtgatagtttttgaggtccgtttagccaaaaagatgaaaggcacaatacgtcacaaatttactccactgcttgttttctttcacttttgatacgagaccaatttgtgatttctggattttttttagctgtaagtgggtgcatccttttaacattccttccaaaatcagttttcatccctgttttacatcctaatcactcattactttaatttaatttaagttacatgtagctgtgcggtatgagtgagagcaacgatggtagctgtaagaatagaaaagtgtggcatcccaacagacaacgcatacatcacccttctcatgttagacaagtatttgaatttgaatttgttgcggtttaatcggctacctactcccggagacgcatctccgcgtacggtgatcgtgtcgctagatctctaggatatgagcccgcggtaggcgcccaatatgttagacaagcaacaagaaacttcacgctgccaataattccaatactaaggttgggaggggtactgtactaaattttcagtggagagtggggtactttaagagggtggggtactattagagggtggagtattacttgtaagtccccacccaaagtaatcaaaaatgagaggtggggtactaattgagggtggggcacaattagaggttttacagtatttagtccaacataccaaaaatggtccaggatggacaaattttcctgtagccatctgttacttttgctcagaccattcgtccaacgccggtgatggaggtagggcgccgccgggattgaactcacaacatacctgtagaacatagctcgttagaccgttacaccatacaggcgccccggtcatcgtctcttcgggctgggacttgacactgtctgattgcatattccaacactccccctcaatcgagagtgtcaggacctcctgattgcgacctatcctgcagcttgttggtccgactccaacgccgttgctgcaatgacctccctgggtttaaggccacccgtgtctccccctggaaacacattccgttcacagacacctcgtgttgtgacacgaaccacacaaccatcactacgatccacattccagcaaccattgaccatctgcgttctacgcgcttgggaaacgtattccttctccatgttgtaggtcggctagccgtgcacgttttgcagagtgtggaagacactccgcttggtcgaaatgtgccgcaggaccatttttctggcatctactgcacccattcgcactcctcgtccagcacaacgttcgttttgcgtacgctgcggttcattaccgtcctcgcgaacccgatttacgccgagtcctctacgatgcgcttagtcaacatttgccacacggccttcttcgttacgaggatcgacgatagcgatctccgctaggatgacgatgacgcacaagtggcgccaagtttgaaagtgcaacttgaagttgcgcctcgtcacagggtcttgatttgtgagtgaccatcactctgtggatcttcgatgtttggtgttatagcgaaacggcgcagtgcaaaatggcgccaagtttgaaagtgcaacttgaagttacgtctcgtcacagggtattgattggtttgagtcgcgggagaccatcactcagaacacgcattagccccggtgctccatgttgcacttcacttaaagcgacaggggaatgggcgataccgcgtttggaggcgtttggtaccgaagccgcctagcacaggtgggtctcattccgcaatttgcaagataccgggtaagcgcaagaagcccccccccccccgccgactcaacccccgtctacacgtatcaaagcgtcaagatgaagttcaatcagctctgcgacctcgacttcctgaccgccgagatccgcacgatggcatcggagctcaagctggtcggcttgctgggatggaagattgctggcaagcacgtcctgcggtgtctacaagagggcgcttccctgccggccctcgactccaacttcttctaccaggatgaaacggagaagaggacgaggaacagcccagagtatccggacctccacccgaccttcgtgagatactgggagctgtgcgaacgacttcccgaatacctccccccaagcagcgtcaattcgggtcccatgaggcgcgcgatggccgatacgatggagacgaacaccatcaacatgctgggtcttcactttcgaaggaggcttcaccagtacatccggttccgctacgcgacgacgggcaagctccaactcggctataaggcgacgcggaagctcgttgctggctgatatcgtgtcaaggaagtcccccacctcgatgtcgacggcgtggacaccggcaacgtggtctatgtatgggacgaaccaagatccactgcggagcgtgagctccacgactggcttggcttcgtgccctgggagtggcgcattcgccaaaacccgacccactttttcgtgaagctatacgacatgctccagtggatggaggcatttgtcgagaagcacccaaagacaaagggcgcgcgtctctactccctgcctccttactccagctcattcatccccgcacacgtgacgctaaacattacgtcgctgcatcaagtgttctgccgacttttcacggaccctgagcgtcaggcagaagtcaagacgtatgtgaaggacgagcttggcgtggaatgcggatctacagagcaagttcgccgccagtttagcgaaaacaaggatgctgtttttcggaagatgtttcggctaaatggacttgagaccagcacacgagagttcgcgtaccaaatcacaacggatggctatgcagcttccgttttgctgcgccgccagacgctttgccgcgaggatgacgacaacgcggaccagcctcgcaagcgccaaaagaataataaaggtgaagtagtcaaggctccggaagcggtcgaggaagacgccctcgaagcggcgatgaagaagttgccgcccggatatgctcctgacgtcatgatcggcatcgaccccggcgtgaggactgtgtgcaccgcggcatgtgaaggtagccttccaactcggcagtcgcgacgccgacggaatcgacaagggaagcgaaagcacaagatccgacgggcgaagcacaagcgcaagaaccgacacaggcagcggaccgtcgccatcaacacccgcgagtactaccacatgtccaaggctggcaagcatcgcttctggaacaacggtctgcgggagaaggaggcttcctacgccaagatccttgacggtatgccgacgttcaagacagcaagatatcaagtctacttggatgaactgcggtattttgtgaagcacgcaaagtacctggtgctgttctcggcacggcacttcttccggaagtggcgctttttactgtactgcatgaaaatgaaggcaatcgacactctggccaagcggcttgtgccgacaccaagtccacaggtgtgcgtcgcattcgggggctggagctgccaagacggactccggggcaaccctcgcgatccggtgaaggcgttcaggaaggcgctggagcggcgcgctactgtgctgccgatggacgagtttcggaacagtaagctgtgctcctgctgccaccagagtcttcgcagagcccgactgctgaccaaggtcaaggacaaagacaccaaggaggacaagatcgttttgaagggcaacagaaacgtcctgcactgtaagaacagtcgctgcagggcccacttctggaaccgagacgtcaacgctgccatcaacattttggagctgctcaagtgcaggctgcttgacctggcgaggctggcagcattccagcggtaatgacgaccaaggtttttgaaatatgtgaggataggctgttgtgtgggcatgcgctctgcgcattgtcagcgcaatggggttccgtacccgagcagacggtgtggaggagggaaactccgatgacacagaagccggtacatttttttagtttaaagaagggatttttttttccttttttggataaataaaaaggaggtggagacatagaaaaaaagcaagcaatggtgtacgacgtaaccgtagacgagtccagcgcgcagcagaacatggctggaatgaagtttagaaaaaggaacttgataaaccggtttatcaacttcgtcggcgcggggtttcaaagtttgaaggcggtatatcggtatttgctgttcaaaccaatactcttgcaaaaccaggaagtgtaacggatcgcaaacggctcagcttcgcttcctggagctcctatttgctcctcgcgcagatataattggcttcggataaagccgcaccctttcagtaaggtcgtggagaaaaggcaaaggcacgtacatgtagtttcctcactcttggcaccttttcccggcagcgtatccaagccgcactatcgttccaacgcaagaaaggcaaatggcgacagctgcgtacgccacctgcagcttctaggacgccgtggcgcgtagcaacctcaccatctttgctggagacgtcacatttcaattgtccctgtttcgagcacccctatcgtctaccacttctcgtcttcaacacttctcccggcccccaagctccacaacttcgttgtccctgaatcacatcaactctttgagagttcgccttcgctcctcgtgcttttatcggtaagtgctaaatgaatgccggaatcagcttttcgctatctagattgctctctctctctactaatatatgtagcgggccgcgccacaacgcgtgactacggcaaacgggcggtcaaataacccacttcactgtcgtcgccagaagcggtcgggttgcaagtgacgatggaccaactctcttccagtcgtgatttcaatgctgaaggaccagcctccactcgaggtgctcgaggtgttgatacagcaccatcgtctcctgtcgagtatgattctgaagattactgtgatgacactactgaagtgacggctacacgaggctacgcaaatggccagcagtcccaagtggaatctgctgttgctggagcaagaggagggcctgcccaaaacgtcactcacaactcagcatttgcgcgacttccgttatcagaacaagcaaggacgtcagcatcccaacagatacccttcacgcaatcagcacccccaataacttcgagtctaccctgcggtgatttccgtcggacgacttcgaactccgtaggacccggtgctggagctacgacaccaacgccgcaccagccacccgacgttactggccgtgacttttgtgagtggcctcccgagccgacggcgctgtatgatgcagacgatattgctcggatcccagcatgaatccgtgaggcggtactccagtttaggccaaattaaacgtgtacgccgatgcctctgccccgaagccatcggtctattacgttcaaatatggagtccgcgtgaagtgctggttccgcgaatcccttgttgtcgggtggttgtgcatggcaagcgatgcgtgccgtcgggatatcacgttcctgcccttccatggagaaaaaccactaatgctacaaagcacttgtgggagacgcaccaaatccagtctgaaaagacgaccctacagaatacgcgtaagcgggaccgcgctgaaggggtcaaccgcattctagcgtccgcgttatgccgtgacgatgcgaagcgtttgtgtttgttgctggagacgattcgaattgtctacaacaacttgccattccggtttggtgagtacgaagagtcagtcattctgaaggaagtcgtcacaaaagatgagttcaagacaacagtgaactcaagaacggtgacaaattcacttgtcgagttgtacgcatccggtcgccaagagctgatagggttcatcagagacaatcgtttgggacttatcaagtgtttgacgatggttgttgacttctggaccccaaagcatggtggcgaaaagtatctcggtttgcgcatctacttcgtcgactcccacttccgactgcgtactgtactcgtcatttcttgcccatgtatggagaacgcgaccaagggattcgcggcccttttgagcggtggatttgcggtattctgtttgactttggcctgtccccgagcgacttcttcggctccaccactgacagcggccccgacgttaaatggacgatgaacgaagggcttcgattgaagtgggaatggtgcatccctcacaaggtgaacgctgccaccaagatggcctgcggcttgacgcgaaaatcgcacaatcccgagatgtcggcgttgctaaacaagctatctcaaacggtgtacgacacctccaccaactcgacgcttggcgatctgcttcccatgctgatgataatgttgggggaaggcaatggtacccaactagtaggctacaagccgcatcgcttcatggggatggcagccacgatggagcgggttctggagaagtggccagctctggaggcatggtacgaggcgcgttcagctcagcatgcacggaaaaagaagcgagcgccaccagggtttcaccttgccggttgtcaacagcatttggtgcagctattatcaatccttacaccgattcttctcgtgacgaagcgatcacaggcgcaggatacgaatcaagtgcaagtcctgctgtccttgtatacgatgtgcatgacttctctcgcacttgacagccccatcaggcgctacgacacggctccgtcgaacgccgtcaatattcacccttttcaactaacatcgctggtggcgaggacaaggatgctgctacagaaggcgttttaccacaacttcttccgccgatatgtagacattgtatccggttcctacatttttgagatgcaactggtgatgtatccttcggttaagcacgtggggagtccgatggacgaagtgattgccgccgttgcacgtactgaagggagaatgcgggatgatcttgttgctggtcatgttgtcgccgtttgagctgcaattatgaagcgcttgaagtcgctaatgcgcttagtagccaacagtcaagacccagcacccgttgatccgattgctgctccagctgtgcaggccaatgttttcgatgacgacattttggcaacctttgcagttcaacccttccgaagcaccgaacgacctgctcaacaacgtaacaagcacgatactctcatcgccggtgagctgaaaaggtggctagaagattcggatgggctgcagatgataacagttcctgatccagccaagacgagcgtccgcagaccggagagtatcctggaattttggcatcggcagcagcagtccaagcgctatgtcttgctacccatggttgctcgcatcctgtttgcagtcccatcttcgtctgctcagattgaaagggacttcggcaacagtgggcaaatggtgactgccctgcgagcttctacaagcacggctaatatcgacatggcttgcttccttcatcaaaaccggtcatttgtcgatgtgtgccagtgcccaaagctgaaagcatccgaagtcgacgaacacattccaagcaatgtcaagattaacctggaacccgaggtagtggagcgaatggaatggaatcagctggcacaagcgtgcttttcgacatcaagcgcaagcgcatttgcttcttacaacgaggaggagacgaaagactcaagctgttagtttaaacgagtaggaggcgaaagactccagctggtagtttaactgcttcatatattcaaatatattcacctagcatattcgaagtggctttagtagtcaattccatgagtttgtcaagtccagcatgggataaacattacgaatactgcagcgcttttaccttcgcttggtgtgatttctccagcgcacttgcacgttcggcagcgcgtaatgctgtttcgagtgtcagttccgcgcggatttggtccagtctcgatagattggccacggcttgcggcttcgaggtttgagctgcggttggtttacgcctcactttacctgctccagctctaagaacgcctttggggtgcaatgctggctgatcgttgctgtaggaagtcttgcgaccttgtcgaccttgtcgacctggggaactagctgcttcatgatccgactttgcctcgtgcagcgatttcattgttgcttcgatcgagttcctgaatgaagtcatcgcttgattcacctctgcctttattcgggaatccataatattctccttgtcttgaagaatactctggttcgagacaacatcttgctgattgtggccctgtgtagccatctccgcacgaagtttcacaaatttacgctcctgcttgcgctgcagcttgtttagttttgcgtcaaaacgcagctccactatcagcaacaagtttttgagatccgctgtctagattctgtctttcagcgcgcaactgggcagaaatcaaatcagccacgctggagtcacgctgttgaagacgttcatcgacataggctttcattaccgctgtcgctttattattcaccgctgtactgcacgactccatcgctatctgaaagaagtgctgcgtccacgacttcgtgtcctccactttgcagtccaggtcactcatatgcgcctgcatctcggttcgtatcctctcttctgaagccccttactacactgtctcgcctgcacagctaattggcgctcgacttctgcaacgtgatgttctcgctctgcacgaaggtgagcttgaatatcgttctgcaggctgcgtgtctgaacttgaagctcttcattaagtcggtgtgatgcttgaataccttctaccatctgctcgttcattcggcgctcactttcttggcgggtctggcgcaccagagtttgttcttccgtcctgcgtctggcctcctgcagctgaagctccatggcttgacgctcgatgcttccgtccaccagcaccagatcttcttgtacggataggtgtttctgctgatccttgatggaaatgcttcggttgcgcctcgcgtgtggcgggtttccgctttgcagagcttgatcatcgtcgtggagctcacttgtgtacgatacaagaggcgcgtatgagtgctgcatactgcctcgactggtgagcaagatgcaatggcgttcacggtgcagggaaagataccgtatttcgcatgtagaaagctgcaccggcatatgagatgcactttgataactaccattcttttttttacttgctcaaaaggatttatctcattttctttttattattattgtttttctttttaggctggtggaacagtgatctttcgctaaggttcctacattttcactttggtcaccgcacgtcgcatgcagagcccgggatgacttcagcggccactggaccgctgaagtgctggtctacgctgcatctattagggtggtgctgctgaaggtgcctccccatgctacgtctatttgccagcctgcagacgtagcatggaatcatccgttcaagacttggctgcgcaggttttggctcgaggacatccagcggcaactgatgcagccgcgcgacgcggaagccaagtttaagctgactccaccaggccgcgccgggatgtgccattggattcgcgctagttgggagagcctgagctccgacaccatcgcgaatggatacaagaaatgcgacttacacctcaacgaggagtgcctcgccgccgcgtcgctggtggcagagctgcagaacctatcgctagtagggccagtggccaaggcggtcgaccaaactcaagacttcgaccgcaatgtcattcttgacgaagctgtggtgtagctttcttctacaatacatattttgatgcacatcgttttttaaaggtatgttttctgttgtgaacatcatgtgcagctttctacatgcgaaatacggtatgtgctctggtaaggccgcgcacttaaccgagaagtgcccgacgtctcacatcaaggctatccagccaatgggagaagctaggcatgaactcgtcgtttcgttctctcgaataagttaaaccttcgttcgcttcctcccgcttaagttttcatgcgtttgaaccttaaaacctcaggaactgcggttcctgaggttaatggattcgtcagttccgtggccagccatgcagcagaagctgctgcgcgacgcgcagtcgacggacgagatggcgcgcctgctcagccaggagatctctctgtttcagcgcaacatgtacaaaaaccacagccagcaccggcgcgccttcttcttccagaacctgcagcaggtcaagcgccgtctgcgcgatttcaaggtggagaccctcaccggctgctttgcggaggctgcgggcgtcttgaagcaactggagctcgacgcaggagcgcaccacatttcctggaagctgctggcctccgacctcaaggtcggcacggacgccgtgctgcgcaagctcgtgacgctcacaagggcggccgccgaggtgatccgagcagctcagaaggcctacaaaggtgcggaactgtagcgtttatactggtgtgctgtgtgtactgagctgatttggtggtggtgtgcttctgtgtgcagctttaatggtgcagttcgccatgacgtacttcatgccgttcgcgctcatgatgaacagcgtcctggcgcggttgacggtgctgttcaagacagtgatcgtgcgggcgatcgagctgcacggaggcatcacgctgctgtatctgaacgaggtgaccaagtcgaacccgctgcgagccaaggtcactgccgtgcagctccgcgggtaccagattcccagtgacattctccagctcgccaatgcgtagattggacaataagcattaggtacaggcagaagcgaggagtaacacacgtcgtaaaatacatgatatagacagcaagccagcatgaatccaacatactacaggtatgcggtcgcctcgtgaggtatcgggaacggggactgcagacaaaatggagcagctttgttgcgcggaagacactggcgactactgcgcagtctctaatcacgagctgttcgggggagtggtgtagccaacgatcgtcttgtggaactccacgacaccctgtgagagcagtcaactcctccaagtcaatagccgattccgtcgagactattttcaataaaaccacgcacctgcacgctgaggtccagtactcgtgtcgtcatgtcctcatccatttccacctgcacaccaatagtacgcatcgtgggcgctgcgcaacacaactccagtcagcagcatacgcacccccaaatcccagtacgctccaattcaaagctcctcaccgctacaggtacacgacttcttggagagaccacagcgattacacttgtagttggatggcacgagtggacacacgtggcccttcttgggctctccacactgcagccagccagccatacgcacagcaaattagctcccagctccaccctaccagcacccgatatcttcctccttcgcaccttgctgcagcggtagtttcctcggttccggttctgctgcgtcttggtgctcaggtccaggtcgaagctggcggcgtccagccccgccatggccttgttgccgtcctgcagctggtccatgaagccgcccgtcgggtccgccatcatgggcatggcccctatgccgtagtccatcatccccactacatgggaccgagcccaaaccgtcagttctgcacccaaatcttacatcaagccacggtcattatagtacgcactgccattcacgtccatgggcatgttcccgttcatcttgcacgcgctcggctgaccgaagcaaatgtgcgtcttgcgtgcgggataaggttgacgagctgagaaaaatttcggccgcgtcacaccacgtttacaccatctacctattcagccacatactacacgccgcatgccgtagcatgggaattgagccatccgccccaagtcagcgactccatccaaagactcgagccatgtccttcagcttcggccagaccagcggcggcggcagctccggcggcttctcgttcggcgccagcagcgccgcggcgccggcctcgacgtccactgcggctccgagtggcggcttcagcttcggctccacggcgtccacgacggcgtccactgccgcagccccgagcggcggcggcttttccttcggcgccgcccccgcgacgtccacggcgccgtcctcgggcttcagcttcggcgccggcgccaaggccacgagcgcggcgcccagcaccagcagcagcggaggattcagcttcggagcgacgtcggcagcccccgcggaggccaagagcagcgcagcgccggctcctgcggcgcccacgggcttctccttcggctccaagcccgctgcgacgtccgccgcaccttctagcactagttcgggcttcagtttcggtgctaaggcaccggcagcgcccgcagcggaggccaagccggcggccagctcgggcttcagcttcggggccacgtctgcggcggcggaggccaagccgacggctgcgcctgccacttcgggcttcagctttggagcatcgtcgactggcgcggaggcgaagacggcgaccacgacgtctacggcgccggcgacgggcggcttcagctttggagcgaccagtggagcgtcgacgacgacgatggacgcggccaagccggcggaggccaagcctgctacttctggcttttcgttcggagctactggagctagcgctgctacggggtccagtgctgctgccacgagctcgtcgacgaccgcgtcgacgggcggattcagctttggaggcgccaagcccgcgacttctacggctgcggagagcaagacagacacgacaactgcaccggcgttcgggttcggaacgtctagagcggcgtcgactgctggtgcgtcgactacggcagccacttcgactgcgaccaccacggctatcacagcagcggcgccgaccgagacggacaagcccccggctgagtacatgggccgaacgatcgaggtgagactggttggccatgtggtggacttatcaagcatattactgatggtttcttttcgtatgtgtcgaattgcaggatattattaatgcgtggagcgagcagctcgagcgtaatgccgacacttttactacagaagccgttaaaggtacgacaccctctccagccatcggatgctattacgcttgtttcatgtagtgatgcgttttgctgataaattggcagtaagcaagtgggacagcgacctcatggacagccaacggcagctgggcgacatcgccggcgatgtccggcgcatccaggtggctcagaacgagctggacacgaacctggacacgatttttgcgtatcaaatggagctgaagtcaacgcttgaggtgcgaatgtggatagtagtgattaactgcttgggtacttcgatctaactgttgtggtggtaattgcgtgcatttagcaattggagaagagcgtggacaagatgtacgagtctcaagatcagatgcctgtcgctgctgatattgagcgcgagcagactctgcagctatccgtggatatcgacgatcagttgaactcgatgacgacgacgctgaaggagacggtagagaaactgaacaaggcccaggtcgacgtggcagacgacaacaatccgatggtgcagatcatgaaggtgctgaacgtgcaccacaactccctccagtggatcgagggcagcgccggcaagatcaacagtgaaattgcgcagctgtcgcgtaaactgcaggactcgtccatttaaatggctccgcacgaagcacgccgtgagttgcaagttgcaagaagagctgctttgtgccccgcaagctgaagacgcacttgagat

SEQ ID NO: 25 - DNA, 14416 bp, Chlamydomonas sp.
  variation 996: note = n is any nucleotide
  source 1..14416: mol_type = other DNA
aaacactccgccctagatgataccgaccgtaaggaccgttgtgagattgcaagccagaggtcaaaaaggctatccttttcaggcgcacgacttgcattgtacagggcaaaccccacacgcggccagtccccgtaattagttgcacgaatgggggacatgacctgcatgacaagggatgtgatgatgtcttgctcagacattgacgtggactctgtagagcacgcactgattgagggagcattgatagatgcggtctcggacaccgttgacggcaaatccgtgtagcggcggtgcaggtcatcgtcgcaaagctcttcatgtacaggatcgctgttatgaacatcagtaccttggtatctgcggttgtccattaggaagcgcaacagcgtctctggcatctcagccatttttcgctcatacggcgcttgtgcagtacgccaaaccttgccaggtgtagggcacacgctaataagtcctccagttcctgtactgcatacagtctttatgtcaatggaaagcacttcttcgtcgtaatctttgttgacaagactcatcagaagccgggcttccctggttcttggtacaaacttccttgcgccatcgtacgtgtgcatgtcatcgcaggccggtgtgcgcttaaagaagaagtggcgccctttcgttgtttcttggatgactgtgtctgccacctcgggatatgagttctccaggccgtcagccacgcgtttattgtcaacgtcgaccacaagaagttgggaccgtagcagaatgaggaccccttgggcgcagttgggcctgccttgttcgtcccactgcctccacaggtcatcggagggcacgttttcatgacgccacgccggttgcttcccgctacccccatccatgttgtagttattcctggtggggagcagaacacagtctggatgctcgtggcgcaggaaggcttccaactggatcagcgtttgtgacatgtggctggtggtgaggtggtggtgnacgcacacgcacggggttgctgtgtgactcaccccccaccctacacacttcggtgtgctagccataaagctggacataaagcgatgaagcgcacattgtgtgtcgtcccaccgtgtcacgatggacgttgccgaacttatatgtaccaagcttcaggcggacatctgcccagtgtacacgcagaacgatgcagacgctgacgcgcgggccctatgagcggcgctgggcctgcccgcattaccaaagacttccttctccaaatctccttctccaaagtcctacttctttgacgaagcagcgaaagcactgcatgtgcagaaaggccaatgggatgcgctgtgtcggtgcgtcaaggaggtgggccgcactcgaggcggctcggtgaggctggacgctgagggcgtccgtcgcaagctcctcgctatgttcaacggtgacgccgtgcagtggctcgcacacgtgcttggacacggatgccccgtctggttcgcacgcgtactcctgccgctgcctgccgaccagccggcactggtgtcacaactccaggaagtatggcgtgtcctcacgacacagccgggcacttcggacacaccggagttccggcaagggcttacacaatactggaagtcgcacgtcgaagaggagtgcttacgcggcagacacttgccgttgggctacatcatctcgctggtcaaaaacccatccacaagcaagatgtacggcatgctcctgatgttcatggaaatcggttcggcctcgccagtcgcgaggatactccacctccagctccagctcgagtcaacatcgtggaccttaccgcactggctggccgcggcaaagagggcaagttctctgaaagagcgcgtgagctttgtgcgaacggaggatgtcgccaaacgctgcgtcatgtatgtcgtggccggctctgactcagcgacggactatcaccagctcaccacggatcttgtttcagagatgcacttgggcctggtcacgcgtgcggctgcacttgcggagcaaggcgtgacgctggactttgaagagccgctggacttccgggacttcacgagcctcagagagctccgttacgcagtcgagcgccaggaagcaatcttggacattcaccgtgagtacaatgcatgcgggctgcgcgccatcatcgactttgaggaggtgctcgatgcagatgggtttcccgtcctgacccgcgtcgtgcacaacgcgtctggcctggacaccagagtgctggaggttatttacaagctcctgggtctcgaggtcgaaaagaagaggggttatgactggccgaatccatggcttgaggacaacccgcagaaactgcgcaatcggtttgagcgccacgtgcagctgcgtgacgcactcgagcaggcggggtgccaggtaagggaggactcgcgcatatgcgcggagtacgtcgtccacggaacatacagcggggcgcgcatcgagggtggtgagatgatacctggcgagtcaaagaagcgtcagaagggtctcaatgcgctgcagagtgcagtggccatgatgcgggagatgcagttcctgtttgacaggacggcgtactccaacttcatggcaaacgtccgtgacacagagaaggccaagatcctcgccgtgcgcgactttgtcaatagctcgccgaagactcgagatgagcgagtcaaagagcttccaccacggctggcggcactcgtgagccgccacgggacagaaccgctcacgcaggaggaggagaccctaggcgagagccgactctactacgatgattacgacacggaatcctcgtggtccaacagcgagtcaagcaatgacgactactggtgaatctctcttggaggaggattatacaaacgcccactcaagcgacgatgcaaaatggccacgcgttcaacactgacgttggctggtcgatcccggcgagggtccgtcaagcgcgagggcggttcctacagtgagggttgataatgaatcgaaacagagagtatggtggtgcaatgtactccatcgagtttcggaggctcgccgtggcgtacctgcggaggattggcagttttcggaaggccgcaaggttctgtaaaattagcacgagcaccctgcattgctgggctactcgaggtgttgcccatgggttgaccaaaccaaaagggcggcccgttcgcaagtgcgagcgagccctgcaggtcctccggtcgtttctgtgtgcaaaccctgtgaccaccctttgggagatgcggcaacaccttcaggactccttgtcactgcaggttggcatggattatgtccgcaccatgctgaagcagctcggggtctccaggaagcgcatgtcaaagcgcctggccaggccggttgacccacccgtacagcatgcgcgcgagaccgctttcctgcaaagccttcagcaagcgttcaccgctggatcacctcttgtttccattgatgagtgttacttttcggagaaaacgctgcccatctacggttactccatgcgcggtagacactgtgtcgttcactccccctgctcctcctggaaacaccgctctctcctcatggctgtgggagctgacggcacaagcacatcggagctcgttcgtggtcctgtcatccgccaggtgttctgcaattttgtcttggcattgccgtacccgcctggggccacgcttcttctggacaacgctagcatccaccgtggaggcgcttgtcaatcagctttccacgagaaggggtacatccccctattcacacctccatacagccccgagttcaacctcatcgaaaatgtgtttgcttgggtcaagcacgccttccgcgcgtcttggccgtggccagggggggctggacgcatgcgtccaggccgcggtaaggcagcttcctgcaggccatgtgtggggcagcttccgccaccttctcgacaggcttctgtagtcttctggggtcttctgaagaagtcaggaggcgcactggaatatcccacataaaagccgccaaagctactgcttgagtaccacataggatggcatgcctccaaagcttggagtactctccaaggagatcctggtcaaacggctccaggcgagcaacacgcccgaggcctgtctagaggatggccgaaattacacttgccaggagttgctggagcaagcccaccgcgccaacctcgtcaccgacctggagtacgaccggacggatgagaaggagaacatcgtccgcaagcgctacctacggaccatggtcaaggacccagtcttcctggacgccatcgagcgctacgtcaccgcagcgtcgctggtgcgcgccgcgggctccaaggtggccaacctcttcgtgcagcacgccttccaggccggcctcttcgaccagtccagcttcctggaccagacgttcaaggacaccacgttcctcaagtactgcatgatgcccttcaaggcgtcgttgccgatgccgggcgtgtccatccgcgaggccgcgagcccgccccaccccgagctggcgcacgtgtggcaggcgaatctgccgctgctggagccgctctacccaactctggacgacctgcgcttcatgagctgggaccaggcgctcaccgacatggcccgggagtacgagggcgcgctgaccgcgcacgtgacgacgcacttgaccgctcgagtgacgcggctattccagcgtcgcatcgccgacatgggagggtacacgcgcaaggacgcgcggatgggccgtaacgttatgacgtttcctggcgacgcagcctgcttcgccagcgacgcatacaccgccctcaacgccggggccgggcccagcatgaggctcccacccgccttggcagcgctggtggccgagctgcgcaggcgctgcgggctgacaggcagtgcgcgtatggaccgcttgaacctgacgccgagagtgttcaagctgcacatggagttgtcccttgaggccgaggcgcgcggcgaccacgcctggagcgcctgccccatcatcaagacgtcgcgcacgtttgcgtacatcgacgagcgggtcctcaaggagctgctggcgctgtgcggcaaccgcatcggtggctccttgtatgaggagcgccccgcggcagctgcgggtgtcccgttgctggcctgggcattcggagcacaccgcagcgcatggctcgccgcgaacaaggccgctcgctcgcaacacagacaggcggccgtgacgggcagcggcggccggaagcagaagagtcgctgcggtgcaggcagctggccggacgacgcccaggagccgcggtgccgctcggtgatgatggatggcgtggcgctgtgcatcgtcctcgaggtgaagccgctgatgtcgcgagccaaactccgggagctgcaggccatcagccaggttgagcagttgcgccgcttcctggcgtcgctgtcaccggagaaacaccgctcgctggtcaaaatggcggaggacccagggcgcgtcaacctgtcgcaggcgctggtcaagtgcccgccgctggacttgccacacgcacccgcggaggagcaccaggagcgcctgacgcgtgcgtcctacctgcggcggtcgctccagacacgacacggagtggaggtgaagcttcgccgccggcaagaccagctgctgcgcttgggcattagccacctgggcggcggcggcgagtcctggcgcacttgcaaccctcgcgacttccaggcgatgctgcggcggctggcggtggtccaggacatcctggcggaagagcacgtgtacgatccttggtacgcgcgctggaagatgctgctgtggcggcggcgacagggggtgatggcgcactactacgccgacctcatccgcaagtacgcgcccaagggcgcggcagtggtcttgggccgtggtgacgccggcttcgccgcgactggccgcggtgaagtgtccgtgccaaccaaggctatgggcaaggcggcgtgcaaggcgctcggctcgctgaagacgcggcaccccaagagccgcgtgcagccgctggatgagacgcgcaccaccgccacgtgtcaccggtgcggcaacgtgctgcaggacatcaaggacgaccacggccgagctctgctggggctgaaggagtgccgtggctgccacgagcatctgggtggcaagggcgtggacacgtggtgtaagctcttgcgcacgaggccgagcgaggtggttcaccacccccaggaagagggggtggagctcttgggcgtaaggggcaacaagggaagggagttggagacgctgaagttgtgcgtggtgcgtggtcgacgcacccaggagcacacatccagggtcttcaaccgcgacatcaatgccaccaagaacctgctcctggtgctggaggcgctcctgcgaggcgaggaagagaggcctacgcacctgcggaagcagacgcgcagggctcgagcggttccgcaggagcgcggggaggaggaggatggcgttggggagctcgcacattgatgtgattacgcctgatggtagcgagtagaccggggtttaggatagttagaccccagcaacttggtacctgacggaaacgctggacggtgatgagcggtctgggggtacccgttcgattcattacccgacggcactgtagggtattacactaaagcccatgtcgcggcatagtggtcccagacctacggggatgcacaccagagtgaatgtagtaggacaaacgggccgtaatgtagataattgacgttcggcagggaagatttagtagacgcaccagaacacgcggatcacaccagatgtcttacctactcaatcttgcgtccgcggaggactttgagcacatcatggagtacggcggcggcaaggcacgcatcatcggctacatccctgcgcgatacaccatggtccgtatccgcaacagtggtcccgtgcaggaccccaaagacacgttccgagtggtgaacgagctaggcttcgtgcccgtcggtagcttcacgtgctccggttgcgccgcggtgcacgagctctccttgaagagcatcgcgcgggtcaccaaacacgcgctgtactgcaatgcttgcgcaaaggtgagcccaacggacgagttcgacgacgaggacttctgggtcggcaagcccttcgtgcggaggagtggttgcgcgtgggccggtggcaacctgacgccggacgggcccctgagggccaagacatcccggtccatgcctgattggaactcatcgtggaaggacgagagactcctccgcgtatgggaggacgtccggcctgacgcggagatccacaaggactgctgcttgtggcagggactggcggcgctcaggatccccgacctggcggtcgaccagatcatgatcaagatcatgacgcgccgcatcttcgcgcgcgtgtacgagcgccaggaggcaccgtacgtcggacagctgtcctatgccaaggcggcgctcctctgcgcattcccggcggtgcctacggaggtctggatgcgcatcatggaaatggcgctcgccctcgaccggatggtcaccgttgacgaggtcccgcagctgacgctcgggcggcgctgaggggttcaccccaccgggggtgggacgaagaaaggtggtgtcaccactgacctcgttgggacagactattttcgagggcaaagaagacacggaagacgagttacacggaaagcgcaatgcaacgagtgcactggtcggcgaccacccgcatccctgctctactgtagtgtcgaggggatgcaggacaatttttcggacttttacatgactttcgcaacatttcagcgcgtgtcacccctcccatggagcccgtcccgctccttcgcgaccgtctttggagccgatcgcgacatctcggcttcttctaatctttacgttgacctcaatggacggagccgaccagagactgaggctgacctgtcgtacttcagggccgaacatggcgttatgttatgcactcgtgattctttcctcttttctcgaacggtattgccggctacccagtgccatggccgctccaggccattgccttacaccttagtgcgatgccgtcgcgtacgtgtcagcgggctcccttgccgtgtgagcagggtctactgccgcacgagcaagctccagtaggcgcgcgggagaagctcgcgaagttcgcgggcctgggagagctcgcggagcgactcctcctgtccaggaatcttcctgagctcgacacgctagacaagctagaggagctgagggtcttcctgcagggtgaaaatgcccgttgtgaggtcctcaaggatttggctgctcgcgatgggctcctgaagctcgtggccgtggcgctgtggctgcccgtgaagccggcatacgccgcagacacggacaaggtcgagcaccaacggcgtgctgtgcgggtctacgcgtgcgaatacgcggagttactgctgacaatggagccacccgcgccgctggctgtggcagggcagctggagctagcccagcgcctgctcctcgacgagaaggtcaaggccctgcacgctgctggggcgcagctcgcggcgtcggcgaagctcctgcgggaggcgggcccgccgccgctggtcctgaaaccggggcgtctccatgcgtcgtccgtcttcttcacgcccatactgctcctgaccagactcaccaaggttgcggagggcgcccacggcgcagctctgcgcggcccgctggtggcggccctgtcgacatcgcacgtcctggaccacgccgcgctcttcctcaacacctcgctgcgcacgtgcgggcccctgttgacggagggcgagttggccaagatgtaccaagagtacgcaagggcctacgggcagttcctcgaccacctgatcaaagtggaggcggggaccaaggagcagctgcggcgggccctcgccagccactgggccagccacatggtctgcgccctggggtgggcagcgctgcgcggactcgacgccggactcgacgccggactcgacgccggactccggcagctagcgagcacgcacaacgagcagagcagagtcctaacgctaacgaccctggcgagcaggctgcacccaaacatgccggcgcccgcgtggggtcccttcgcgacggtcaaggtgctcctccgcgcgtggaccgctgcggcggcggcggcaacggcgcgcgggcccacctgcctgcgggggtctgaggagaacgccatggtcgccgacgttgtgatgcgctcactggtggactgcatcctgtcccgccatccctggcccgggcgctggacggatctggcggccgacgtctggcgtcaggcgtctctcttctgggaggtcgccgcaactgctgtcgtggggcttgcgcagatgctggacatcgacgcccacgtcggtacgtagtgcagtagccatttccaattactcagactcagatgttcctactctaatgttgcacattggtccttcccagtgcaggcagtagtggaggcggagggggtggcccaccaggcgtcgtggcggcgctggccggcggcgcgctgcccttcctggagcggctgctgcggcgcactgtatcggaggtcgtcgacgtccccaaggtcggccatgctgccgtggcggagcggctgctgcgggacctggagcagctgctgcaacgcgcagggccggagatagccaaggcccccaaggtcggccatgctgccgtggcggagcggctgctgcgggacctgaccagggacggcgaggccctcggacccgcgcgcactctcatgtccctcctggcctacggggacggcctccaggcagcagccttcgtggcctcggtgaccaagcacctgaggcgagcgctgcgcctgggagcacgcactttcggcggaatcgccttgaggctggccaccagcatcctggacgcggccgtcaaccccgcggtcttcaacggcgccggcgttccggtgcagagggcggagaccttgggcctcgtgctgtccgtcgccgtcggcgagtggctgccgatgctctcgagcctgctatggcaaaatgtcgtcatgtttgccgccctggcctctctccacattcaggttgggtggttcagttgcttccgcaaggtcatggactcggccgcgtgtgccggcgtcctctcgtcgtcctgctccaatgacgggtggcgccgcgacgcgatcacacaggcgggcctcgtgccgctggtgggcgcggcgatgcaagtgctctgagtcctcgagaggccccccagtcgcggagaggacgagcgcttcgtcgctgacagcgcggcacgcctggtgtgcgctgccccagacgaggtcctgcgggcgcacggcgactgcgcatggcggccggaggcggtgcaagtcctcgcgcaaacgagcgagagctttggcccgcgtgcggggcccatcatcctctgtctcctggcggcacacctggaggcagggtcaccagcgttcgaaagcaccctgccgcaactgcagccgagcaccaaacctgcgagcctgctgcaaacgctgtcgccgctgctcgtgccaccggccgaggcccggcggcgcctgggcctgccgcccgcctgcgccagtcccgcctgcgtcaacctggcgggcgacagcgaggtagcgctgaagcggcagaagtgcggggggtgccggcgggtggagtactgttgcaaggagtgccagtgggaggactggaaggcggggcacaaggcggcgtgcggagggccctgaaaggggcgctgagaggggcgcggggggtgaagtctcttgtagagtagactctttttgagcgccgcaaggtgttccgggagttggcagaggtggcgcttggccccctgattcagaagtcgaacggcatttccaacatttggcgcgggtggacggacgctggcggtggacgagttccagtcgacaagggtgtaccacgcagatgatggtatcatcctggagaaggtggcgaggaagatcgtcaagaggggaggcaaggtggagatggttgcggttcgaggcttgctgtggtgtagttccaccaagcagtcaggaggcaagttcatcaaccgcgacttgaacggagccctcaacatccgacgctgcctgctgctacccgagcggcccgcaagcatggacagagccgcctgcaaagggcagccgctgatgggtcggattgggaagttcatttcgaggtgatcttgacgtcaagagaaagaataccgggggagtagcggtgtcttgtgtagagcgctacagactgcggagtaggcagccgccgatgacgcatgaaacaggccctggtgttggagtcaggtagcgcgtctgcttagggtgcggagagacgtgcggtaggcctgctctagacacgaagaagacgggaaacaaatggatgctgaggtgtctcagaattcatttgattgagtgttgagacaggtaccagccttgtactgcccaccccgaatgtcctccacgaccaggtatccaagctcggcagccaatgatgcgatctcggcaggtacaaccagcgccccaacagccacggacagctgggcgccctgcagcacgctgagagagcggcacagctttgtgtacttgtagtcaccacaggcatccatgcccatcgcaatggcgcccttcaggtgtcagatgttgatgtggactttgtcgaactcttttggtgtcatgttgctcttggcctccaccgccatggccaccatgcgcgtcttgtcgtcggcttgacccgtcgtcacagcgtacaccaacagcccaccaatctcgccgaggtgagtgccacactgatcgtacaattagatgtgctgcatccggtcctccaggtggaacccaagctccgcttgcaccatggcggtgggggttaatagtgaccgccgtgggctcgagggctgagtcgtgcatcccggcagcggctgcagccggctcccccccgccgccagcagctcctgccttgtggccggctgcatggctcccggtcgcaaggccggcagaagcggcaccctcgcttctagccaacgccccggcataaggcagcaaatggcaccgcgattaaacggccggttcagagcgcatggtcgacatgcttgggagacgtcgcagggtgctcgcagcgggttggggcattttgatgctgagatggggcactgagcgcgacgcactcgcggttgtgcaacgagttgcgccaaacacatgtgtattccatgaatgctttgcgcgatgtgagtccctgcgcatggcctaaagtttcctcgtgcatgcgccaaggtcggcccacccgcgtgctccattcggcccagcccggccttttagtctgcgaggaacccgctgcacgaactttggcggcctctggggccccacagagtataaggacatgccccggtgacccagggtcacccccagctcgacttcgtgattcgacaggcggcatcgcgtcgtgagtttgttgccaggccttgcttatactgcaaggcgcttatgttgccagtactgggtcagcaggtggggctctttcggcgcttttcgggcacgcgttcggggcatcaatgctcgccgacgtcgctcgcgcacaagtgctgtgactcgcttgctggctgcgtgagcctcttgcagaaagtgcacttttgactgtgctcgcgacgcttgcgggctgggtcgcgtcgcgctcgcggcgcgtcgcccggcgctgcttggtcctcacgtcggggcctatcgattgcgctgggtccggtggccgcttgcggcctgctgaatatggcgccccgcgcggcgacccggggtcggtcgagtgggcggatcgctagtcattgagccgcttaactagcgtgtttgtgcgttgttgaagcggtctttgcaccagtgaggaaacgggagcgcgggggcagcgcggaggctggtttccagtgctggaaacgcgctcggggctgggagggcgtgccgcgttttggacgcgtcggcgttgaccacatttgaccgcattcacgcgcgatgtttggcttgttcagcagccgctgtgttgtctgcatgcagcgaaatgttcgttgagcacctgggagggaggtcggcgcgacgtttggcgcgcgagcatcgacgtttgcagtcggcctcgctttggcctttggagggctgcagtacgcagctcctagtccacaggctcgtttgatgtgattgtcgacgggattcgctgcttatcgcgtgcgccgatggtgcaatgttgtgtggcggcgcggcggtcctttcgccttgcgatcaggcgcgctgtgattgaatacgttgtgagagctgcgagatagtcagagaagttgaagtcgctgcgtttcggcgacgcgcgcgtcgcgcctctatgtgcaagcggtcgcctgcgctcgcgcgcacggtctttgggccagctgcgcgcgcctcatcgcggctttgcctatgcgttgcgcctgggctcactggcaaaagccgttccgagtttctccggctgacccggggtcggcgagctggcgggattgggggtcacagagccgcttaaatagcgggtttagcgtgaagcagtctgcgggggggggggggagggggggggggggcgggggggggagggggccggggtgggggggggtcgaagctggcctgggatctgggccgcaggctatgcgggaggctggacgtggggcatgctgctatgatgtgcacctcaggcgcaagggctgtgggcccacgggtggtgaggacttgtttggctggagctgccttgaagatgcagacagatgctatgcaagccagctgcccacaccgcacgcgggctgggatgtgggagcttgacaatgttgcttgtgccgtgagctgggttgaagaggttgccggaggtagggtcaaggactgcgcggggccaagggtgctgagcccgaggatggatggatgggcttgaggagggctcttggtacaggacgagttatgagctgtatggctactgacctacatgtatggtacatcgagtttgtgtgctcatcgggcgcgggagttgtgagtatggtgcagcgcgatacattttgctcgagggccatcgccagtcgccgggttgcggcccattggccctcacgtcagcttcttggcgcctctgcaggtcacagttgggcctgtcaagtaaaaacggttggtcgcgacgcgcgagagcctcccgctgctcggggagcgccgtttcagtggggatttggcaccacgagtgcttcttagacatgaaagcatcgattggtcaaggtcatgtggcgttccgacgcgataagagggagttcggtgctcaatttcgagtcgatttccgcgaccccgcatcggcgcggccccgcgccgctctctcgcgcgctgtaatgcatctacgtatcctcgcgagccaagtccgccgggttcgggcgcggagtgagaacggcgacctggggtcgttacttttgccatcatg

SEQ ID NO: 26 - DNA, 14416 bp, Chlamydomonas sp.; identical to SEQ ID NO: 25
  variation 996: note = n is any nucleotide
  source 1..14416: mol_type = other DNA

SEQ ID NO: 27 - DNA, 22001 bp, Mucor sp.
  source 1..22001: mol_type = other DNA
agaagcccatcgtctttatccacggtattggcgctggcctcatgtgctacatttcctttgtgcacaagctcttgaccttggatgctcccattttttgcattgaactcccttttgtctctatgcattgcgtcgaagatgtacctacgatgcaggagaccattcgcgatctgcagaatatgctgcatcgtcatgatttcgacgatgccgtgtttgtagctcattctctgggcacggctgtcacttcctgggtggtgaaatacatgccgcagagtgtcgctggcgtggtgtttctggaccccatctgtttcatgctgcattacaaggacgtgtgctccaattttgtctatagaacacccaaaactgctgctcaggtaagatactttagtgtgtatgtgtatgcgcatatcgctcatcatcagtatgacactacagggccttgtcaagtactttgcgtccactgaactgtacatttcttactacatctctcgccactttcactggttccaaactgccttgtatgtcgcccccactgtcacccatcataaccactcttatacctcctccatcaagatgcccgacaacaccaaggtattcttgtctgaaaaggacaacatcatcgattcgaatcgtgtggacacctatctgagccatcacggcgtcgatgccactgtcatgaaaggattggatcatgcttctttcttgttctatccttcttggcaaaacgaaatgttggcttccatcaacaactttatatgccaaaaggcctaatttctgtttaaaattactgtacatatctactactgttactatctatagaccttcttcattgtatccccccccccctcttttttacaagctaatttaatgttaccccattcatttcgttattaaaaataaaatgaaatcatccagaattcatgcaggcttcgttaagtcaatctaaaacggttgattcatttcgtcatggtcgaattgacaaatcgagtgtatattaaaagtacaattggagtaggaggaggtatctctatacatatcttggccctgtcgcacactatacaactgtaactccaatgcgctgtgctaatcgttggtattgttctctggcaatctttcgctgtctccacatgaacactgctactgagatgactacaactgctgcattgatgccctgttgtatacggataaagactgcattagtatgcgaattcgttaaatggtggcgattctaaactactcacctcaaatttaataaatctggctctttccacactcctcactcgaggacatgctcggaaagacggtaaggatatcgcgtcatcttcataaaaggctgtttggttcttcttgtctgctagttcgggatcgtcccattcgcagcgcactggctctttattaccaaactcgacgcagtagggttgtgttttctacagattgtcaatacggatttctctctacatggaatgcgacatgtttaccttttctaacggcgagcacacttgacactctccaatcgaatagcaagtgtaggtcgatttgtccactgtttcatgtgaatgagtatagtctcccagattgcgagaagcagcgtttgtatcttgagcaacaccaaaaggaggtgttcgtcggtattgagtttcggctagtgtgattgtaaaaatacaactatacaagatacatattaataccatggacaatgctgccgagagtcccctactacttgcctgaatatgactagagcaaggtatcgcatttgcttgatatgatggtaaatgaagaaacccacacacacattcgatgctattcagcatttaactgagttcttaatgtgacgctttcgcaaaggccatcaaccccccttctaaacggtttctggatggtttttgtttagatttcaactgtcaaaaatgcaaagaaagtccttgtggggttcctataaagcattatcaccgaaaactagaattacattgggtctcggtaaggcgccatgtctttttgaaatcaagctagcacactcacatgttggcatgatttgcaggtggaatgttgtttgctacagcaggcatgtatttggctgacctgattgaagagcaaaaaccagcatctgaactggagaagcaagagcttgaaatgatgtcccctattgtcgttgtggatcatcaacccaagaaataagtctacaccacaaaataccatcttcaaaactgaaatatcaataaatcaaggtctctttttaaacctggccatgtgtatatatacagttttcgtcagcaatgtgtgagagccatatataaacaacgagagttttatgcaataagtattgattcacccatatacacaacaaaaatgaaatttctgtccatctacaatgcaatcacgatcactgctttctggttatcggctactctcactcaagctgctgtgatcccattacctgcagcaaaccctaatcctgtactcaactcgtttactcaattcaactggtctaccgatgctcaattgctggatcagacgttcgctatcgacctggatgcgccttcaagagtgcatgttactgatttggatccccatggcgctggttttgctgtctatgataatggcaattttgttggcgagacggctactgtcattaccaaggacaatccatatggcgcagaagagtaccattatcgtcaaggcttctttaacttggataccggacatcatgtcattactgtcaagttgaagggagatgccaagactggaagcggggctatcagaatggtgcctggtgtggataacgaaatgactgtattgtatgacagtgctgaggttgtcgatcaaggcgaagcggctgctgaggaggctgtcgctgaggaggttgttgttgaggaagctgatcagattgaggacgtctttgaagcggacgaaagccatgataacgaagatgaagacgatgaagacgatgaagatgatgaagacgatgaagatgatgaagacgatgaagatgatgaagacgatgaagatgatgaagacgatgaagatgatgaagacgatgaagatgatgaagacgacgaggacaacgaggatgatgaggacgacgaggacgatgaggacgatgaagatgatgaggacgatgaagatgatgaagatgatgaagatgatgaggatgatgaggatgatgaagacgatgaggatgatgaggatgatgaggatgatgaagatcaagaggagggcggtgaagacgagtatattaccattggagactctacccaggattttgattacttgaccaatatttacggtgttcctcaagacacatcacacaccatcacactcactactacattcatagtggatgtatacgccacagaaacatctgatgaaacagagacagaaactactacgtcgacaatagtcattgagccctcctttttagaagactctccagaagaatctgctgttgcagaagctgttgaagaggacaatagtgctcaagagcagagtttgtccatttaaacaaatagaattgacattatatatatataaagtgccatgtaatttactcaataaagcgaaattaagcatcttcctgatactctgaatgttgttcctggaactttaggattttcatccgaaagagatccattgatccgattggactaactagcaataaaccctgcagaatgaccaagatgaggctattgaattcgctcatctatcaattgacgcatctagcttgcacatttgatacaaaattcaataaggcccctacacagacttgggtggggttcctctgaaatagcacgctattgacatttgaaagttgaaaaatccttgtagtacgagcgaaataaaggtctcgcatgatatttcccatgctatttgttttcaagcatgcattttattttctcttacgacaaatttgaatacaagtgtataccatttttgctttgtagagatacttattgaagtgaatgccactgaataccaatcaaataaaccctgccattataatacatgagtgagtcagcagccttatgtaatccaccctgagcatagaagatggacgctccggctttagcattgtttacacgttcgaaagcctgcaagagccatcagatgatgatgactccatggcaaccagagtcacaattgaaaagcatttacatctcctccttcatggccaaacatctctatcacatctctttttctccattactcaataccgaaactaattgagagcatacagaatgactacagaatatcgtattgaaagtgacacctttggtgatttaaaggtacccgccaacgtatattggggtgcccaaacacagaggtacattggtgttcaagtcgacatacgcgtttcattcaggtactaactgccaatatacagatctcttgagaacttcaagattggtggtcccagtgagcgtatgcctcctgccttgatcaaggcgttcggtatcctcaagaaggctgctgccaaggtcaaccttgagtataagctggatcccaagatttctgaggctatccagcaagctgccgatgaggtacgacattgaatctaagtttttgtaaacaggttgcacaagcaaagaaggttttaacaaggttttttcttcattaggtgattgcaggtaagcataacgaccagttccctctcgttgtctggcaaactggctcaggaacacagacccagtaagttgcttccgtgtgcttccatatcaatgttgcttatacttttgtattttgcataatcttctagtatgaacgtcaatgaggtaaggtttggcatgaaaattcggcttcccaaatcggcttacatcagtttgcctctccataggtcctgtccaacagagcaattgaaattttgggtggtaagctcggtagcaagactcctgtccaccccaatgaccatgtcaacatgagtcaatcatctaatgatacgtacgtatattgccatgtcatccaaaaagatccatagctaacggcatttacagcttcccaactgccatgcacattgcagctgttgttgagatcaacactgatctcatccctgcattgactcaactgcgcgatgctctgcaagccaaatcagatgaatttcaagacatcatcaaaattggacgtactcacctccaggatgccactccattgacattgggacaagagttctcgggctacgtgcagcagttgacatatggtattgaacgcattcaagccactttacctagactatctcgtttggcacaaggcggtactgctgttggcactggtttgaacacccacaaaggatttgatgtcaatattgcaaaggctgtctctgaatcaacaggctttgcctttgaaacagcacccaacaaggtaatctggattatataaagtgttgtctagagagagatattgacacggctacacagttcgaagcacttgccagcaatgatgccatggtagaatgctcaggagcactcaatacgattgctgtttcattgatgaaaattgctaatgatattcgctatttgggatccggtaataagtcgatttcaaggatgaacaatgacatggtaattgacgaaaggatcgttttacataggacctcgttgtggtttaggtgaattgagtttacctgagaatgagcctggatcttccatcatgccaggtaaagtaaatcctactcaatgtgaggccatgaccatggtctgtgctcaagtgatgggtaaccatacaactgttactgtctctggaagctatggtcaatttgaggtaatgcaataccgtagtagatgagacgtgtgtgtgagttggtatattaactcgccgtttgtatagctgaatgtgttcaagccagttattatcaagaatgtacttcaatcaatcaaactgttgagcgatgtatgccattccttcaaggataactgcgtcgttggtattgtcgctaatcgtgaacatattcagtccatcatgaacagagtaagttgtcttttgtgcgtatcagtgggttcgtgaagtctgataattttgttatgtagtctctcatgttggtcacatcgttgaatcccgtcattggttatgataaagctgccaaatgtgctaagaaggcacataaagaaggtagtaccttgaaggaggctgtgctctctcttaattatctctcttcggaagagtatgatcattgggtcaagcctgagctcatgattaatcctcagtaaaataaaaatcagaaacccaaaatatatttccgccaatcaaaggctttaaacattgcgaaatattaccaaaaatggaaggctttgagtgtactttactgaggccgagttgactttattcatgtcttgtagcgaggggactttaagataaagctactcgggaatagcttaagctatggcaaaaacaccacatgaaaatatacgatatctaacggatatgaaactgacgaaatcgtagcaaatcatagctaaatcatacgtgtaagctgactccagagcatactggcatccactactatgtgatccggagttgtacttgactaattacacatctcatattgattgcctagacaattaagaaagcctgttagataagatgttgcgtggtgggcttgcctgctgacttttttcttgttcttgtcttgctgcttcatgcaaattcaattgcctgtcaataaatagatgccgccagttagtgtcagtacagaataaatttgtaggaaatagcaccctataaccagacaacaatagcatgtgggcaccatattcatctcatcaacgtgcacttacttgagccaccaccaacagtatttcatgtatctcgcatctctaatgagaattagggcacaatgtgagtagaatactcgtccatcagccccacaccctcaccttatccgtcaccaagagcatctcttgcgtgctgtagtgaccatgagcataatgtatcatctacatatcctcaagcaacgatgcactgtaagcgctacaaccatccatcaccaacaaaaacttaccaaactcacagacaaccaaaaaccttgtaccttgtgcgcctcatctacgctgtatgcatctgtgcctggaagcagcaacgcacaatgagtggtgtatccatccattactcatagaaacttactaagtctacaggcaatcacaaacactgtaacaagtgcgccttacctgcgatgtatccatttgagcctggaaacagtaacccacagtgagtgatgtatccaagcatcagctccatccacctaccaaatgcagcatcagctacacctcacgtaacaagcgtacatcatgagccatgcataactgagcctctcaccaaagcaaaatagaccaaccattgcgagaggtttaaccaacagccagctgcaccatgtcattcactgcaaagcactaaaacaagcacgttagtagacatctatcattaatgttgatgctacctgcttgtaattctgtgcgtggcaaaaggactttgtagacagttgatagtaaccacaaaagcactcgtttcattccaaacaacggcgagttcatcgtctagacatgttttagaaagcggcaatctgctgaataagataaaagcgaaagggggaagctgaaattgacaagtgaggacagcaaagcagcacgagactggtatcgatagctaaattgaagaaagctgctgcttctgatgcgtagaacagacgttctgtacacgcagagcacatacacatgctacattaccaaagactaccaggtggaagagtggaggaagtaaacgaaacaagggaaaaaaagggaaatatgggggaacgcttcgtttgacaggtacgcgcgttgttacaaagcatcaaaatactggctctgatacgcagaatgtgccctgcgtacacccggagcacatacagacgctgctttatcaaacgcaagcaagtgaaaaagtggggggggggagtaaaagaatgttatatacatgaatgatgtcatgctgcatatcagatcaaggtacacctataaatcacatcaatttatacctttgacaggcgcttgttgagcgactcttcgaccaagtcgagagcatagtcagagtcaattatcagagtctttcattcaatggggcttgatgtttggggccaattagcctggagcaatcccttgattaaggtcatcaataaagagaatatcaggtcaggacagagtcctgcgctcaattaattcgaatgtcgattatttgaatggctgggcatatattagactaaagactaagcgtaggccattactgcgcgtcctaagccgcttgccctatatcctcatggatctcatcaggatacaaaacactgaaccattacatagtacatgtacaaaacaaagtaaacgtggcatagacacattaattgattgatttactatcaaagaaaggatgctataaaccgctatacattgaatctggtgtagcttcgtcaaatggggtaggcacgttattccatagtataaccgtttattatgcagcgaaaacaaaaagaaattgaaaaaaccaacctgtgattttgatttttgtgaataaaaattaatacagacgtgtttcctttcttcctctttctttttataaaatccttcatcagcatgaatccacgtaaagtacagcccaaagtacagctagaagtttaccaggatggacttacgccactaaaccctcctgcaagatttccacctaaggattatgtaagaagtagagccacaaaaacgtaaacagacaccaaaaacaacattatgggcgccttatatgccacattcaaggctaaactgaaggaagcaatcagacagtgcccagacagaatgaactaccctgagttgtacataactctgtttgaacgtaccaaactaccaagatatactgttcctgacgccgccagacgcctcgacattgacctcaggcttgtggaaagctttttgagacaacaagttcaaacaacaggcaaacagaccatcgcatactggaaagaatatgtagagcaacactttgacgaatgcatcaacgaggttttgtacgttgatccgcaagaaacagaagccaacagctctgatgttgacgatcaagacgacgatgatggatacgacgagaccgaggaatttcgaacctgcacgacatctttccagaccattatcaaaaaggatttagaagaagaagtacgccaccgcattgaagaaaccatcttgaactgtattcgagacactacaaactacacctctgactttagtattcaagtactaaagatggctcttgtattcaacacacacacgttcacattgagaaacaatacagtgatacttgaagaggctcaaggcgcaaatctcggccatgtgatccccattgaatacttggacgatgccatgagagtgcctagaccatttgatgccgcttgtttcaggaaccaagcttttaagaaagacttcgacttactgttccaaactggccatttcaacatcatcaactcatctttgtatggaaccaaaggacccacggacgccaatctgaacaaacacagcgttcaccggcttatttctgatgccattgggcttgctccaacggaagcttatcaccacttaccctcccatgtcacgaaaatggcgcgcttgcagtacactaccaatgtcaaaaacatgtggtccgacaagaccatcatcaacaagctgctgaaacgcctcatcaaatgcttgctgtgtattcatctacgcccaacggacgagaaacaactgcaagagagacgcctgcagccaagacaagccgcacccagaagtagcaattccaaccaaggcatgtctttctcacacaagacgcgaaatggcaggcgccgagtcatcaacaatgaaaagaagaacctcgagagatgcaaacgcctgaacaaagtcgacaaagcagcgagatgcgaggaaagacttactatgtacgcagacgtcatggaaagagaggtacagtgagcttgctttgggtctgaacaatataccaatgacatttaccattttcttatcccataatttagagacgacaaaaagcattacgccgacaagcaagcagtagtctagaagagggcgtcagtgaagacgaagaagacgccttagttgctgatgaaccagagtctgaaaagactaacgacacttcaaagcgaaggatcacacaaatgctgaatcaaataagaagtaacttgttccagaacacgcctctgtcgagatcaacagttggtagcaagattgagaacctcagcgacagcgagtttgatgccatgtctatcatcgctggatttatcaaaccctacatcccggcccaggttgattacgccaaacttcaataccagcttcctttccttctaatggccaatgagatactacgctacatgggtcgctcaagtcaatgtctgcagatactgccgttggtgaaacccacaacacttcacactttcctgattgacgcaaagacgctgtatgctttattttgtgcaagcaccctccagcaacctatgatccttttcaacttccaaaacgagcctatccaagagggcatggttgactcctacaaagatgccgtactcagtgccttctttgacattgcccacttgaagagactatgtgaacgccatggaaatcaatttgctcgcaggctgcacatttttccagcgctcacgactgtacgaatttacgatacggtaccgcgccttgtacaacatcaacaacccatcacagcaactgacggagatcccatcgacgaagaccatcatccagatttacagcaacagaatgatgccgtggtacgatttcagcatgagttgaaagatgccactgctagattggaaaccatgttgcttatgtcgcccagtgtacgccaactaaagaatgactttagaggaggacaagcatcattcaagacagttgaggacgccaaaacaacaaaaaggagactgatgcttgatgttcgtgacgcaaagaccaacctgcaaatcgccagacgagaagtccaacgcttgaagtcaatgcataagtttccacccacattgcctccaaactatcaaagatacatgatacgccagcaaccatgtctgaaaaaggccgaggagtgtttcattgacgaggactttgatttgcaaggcgccatctttgctggcacagacaacggaattgtcaagaccacagagaccgtatactttgacatcgaacgatttctgtatcacctacgtctctttctacactttcatccttcggatcaaaatggacagcctgtgggcgctcctgcaatgttcatggatctgccagctacattgaccattggatcgaaagaaatcaagcaaggcagtggcatgtttgactacatgaggtcaatgaacaagaagaagacgcctggcgaacaagtactagcaatagagagcaccctatcagccaacagcttgttcaattgcagtacaccaaatgaattggaggagacagcccatcttcaccaacgccaccaacaagccatccgatctttctattactcaaacatccagtgcaaagaaagacgtcaatttgagtggagaaaagaaagatactatgatcgactggcatcaaacgagcgcaattcttccggcgtcaaacatccaattatgtttattggggatcgtgggcatggttatggatcctgtatcaaacgtcatttgcgattcggtggacactggagagaagagcgccactcacgatacacacctaccattattaccaacgagtataacagttcccaaacatgcctgtattgcttcaacaagctgtctcaccccacttttgcacacaacaacgccatcaagaccaccaagggtacttttgtttgtttaaatgaggattgcccaaacgcctttgtctctgtgtgtagagaccaagtgtcagcgttagctataggcttggctggtctttcacaattgttatttggggcagcctttccgtgtttcgacgaggataccaatccaatgaacaagaccagattctacgaaatggccacgctttttttgagggagcacgcctaggatccttctcatacttacgaaacctttgctaatttctcaataaaaaaaaagtatatggtgaatggctattgtccaatatacagatgtaaatgtgaaacgcacttttgatactcgccgtacagacgatgcatttccttccatttacttgatacaaaaggaagatggctcgtacaagaactaggaactaagattgcaagcataaattatctttaaaacagtcctatagtagtttagcaattccagatttggcatcaatgctttttggcagtcgtcttttcagcttgtgcagatattttcttgtttgctcttctttcctacatctcactcaatttatgggtattgctcactatacatctcatctagaatgcggccactgctctctacacgccatcatcaagactctggtattgtacactgtacacatcgtcgaatgaatggtattgctcactgtacatttcatctagaatgtggccactgctctctacacgccatcatcaagactctggtattgcacattgtacacatcgtcgaattaatggtattgctcactgtacatttcatctagaatgtggctactgctctctacacgccatcatcaagactctggtattgcacattgtacacatcgtcgaatgaacggtattgctcactgtacatttcatctagaatatggtcattgctctttacaccccatcatcaagaatctagtattgctctttacaccccatcatcaagaatctagtattgctctttgaacgccttaacaagatgacgcttattgcccactgtacatctcatctagaacatggtttttcctacatgtagtttagctccttcttttctgaatactgaaacagttgtagagctcgccttcgtttgaaggcattacattaggtaagtgacagaacaagggaaagaagccctctattaacgaatgcgttacaattccatttacaccatactattatatttctttttgtaagtttctaattcaatgctgtatcgtaattcagttgactaatcaaatctttattacttcttttggatcaacagtgaacttatcattacagtaaaataaaattaagtgagcctatcattacagtaaaactctgaatgataattaccaagcaatgtagcagattttgtaaatttacaccatacttgttttcatgtctttgagtctgctacgtcggcttaaagagggcctattgaggtggattgattgccgtttctgccctgagaacagcaccacaaaaaccaccattcactgaccgttcttagctcaacagttgcaaatataactcgtactgcaagatacataataggcagtattggcaaatatcagggcaccttcttctaaatcataatgcaatgactcaaatcaagagaaactaataatgctttttttacgttcagttgactagaatacttgtatttcttaagtgtcttccaccatgcatatagtttactacactactaaatagtttacatctcgccatttttaggcaaacaaaaataaattactaccattaaaaaccttgtaacagacatctatcaaagctttcttttagatttttcgatcctatacgcgaagatggctcataataggccagtgattatagtgatatatctttccattcttcacgttttgtaacttttatattcctgaccgataagccaccttaggacactcggaaatgcaatcatcaacagtaatccaacattaaacagattctaatgagcctaactggagcttaaaatattcggtctccgatatcggagttttctggtttttaaacctcgattttgccctgattctgaatctgcaaaccatttttttgtaggtaccatggttcctgacaaaagtgagatttgagatatttttggaattttaggctgtggtactagtaaaagtcttttaatttgatagaaatgccccaagtttatatagcccaatcgaaagaggtgcatgtttttgactaggacgtacttagtctagggtcgtaatagatgatttgtatgagtaatgatcaagagaaggtgcacctgcgtgatttttgtgctttttgaaggggtctacactcgaatttcactaagtgaatgcaagtagcgtagagcttgactattgtttgccattcaattctctatcggatggtatagatgtcatataaaaattttgacctttgtcacaaacccactgcttgagggacacgaaatttcacattttgagtagatttatgaagggaatgcatatgtggtgcccaaaactgttggatcatgatagatccaatgcgcagctatcgaatcgtttttgtttcatgtcaatccgataatttttcgttgagatattgtcaaaaaggggttcatggaaaatcaccagatttggaccaaaatctgcctgtcctagcaagggaaaaaattgtgtggtattttcaaaacacgacaaaatttttgatttctcatgctagagttatgctaaagcctcgagccaaataccatccgaaaggtaattttttgctctacatgaccaatgcaatgaaaggtatagtcaatatgatagaaacttgttaatccttgaaaaaccttcaaaacaacaccatcaaaaatcacctatataatggcaaccaagacacttgatattggtaccattgaattctgtacagaaaccatatagggctaaaggggtgtttactatcaactatcatccaattttgagatttatggattttagaatcgatgatggatcaattgtaaataccaaattttcaaataccgcctagttatattacagaccttatgaattttataggtcattttggagactagagtggtggtaaaatgtcatattaacttgcagttttcaaggtatccatggatacctgacatgttaatgcaccacctgtcgagttttgagtgctgtagcttacttttttccgttccatatcgtttccccaaattaaggtacgcattttcccccgcttaaaaatgggactttccatgtcgaataggttaggaacaaggcatttccaataccatgttccaccttaaaagttggttcatttccattcctttacaacatatttaagtatcaaaacattctggaatttctacctcatcgacccatgatgtacaaaatgaatttcgaatttggagttttgggtttcatggcattctgacatcgattttccagaaatgcacgctagagctttgggactagcatgttcctaagacggttttttgccctgattctgaatctgcaaaccatttttttgtaggtaccatggttcctgacaaaagtgatatttgatatatcaccttgtagaaaagtgctgcaacgacagccgatatctgcgatattttgcaaaatctgcatcaaaatctgcatcaaaatctgcatcaaaatctgcgaggtatgcgatttaatgcattgcatgcagaaattgatgttagtcatgaagattgttttatatttttttgggaactagacggataatctgtgaaaatatataaacccccatagtttaaagcatcaatattgtagttgtgtattttttaaaatatatacgctgccaaatgtattttgtcagtcttgtttcagttgagttcttttaagtttgaaaaatgctgcccaaaaacatagtagtattaggaggctctagtttattagctatcaaacttcattgttgtctcaaaatgcagatcacaacctctttaaattatggcctctttcataatatggcgcattgaagcaaactgactatgtcagtgctcttgttacactctataaaaacgtcaaacaaaatctattctaaaccaaccaaaaatacaacagactgtcgtgtacgctagctatgggtagtatgtaggtacacaatataaaatgtaaagagaaagatgaggtttattcaatacaatgtgaaaataatatttataccctagcaactaattactgctgacgtcagttactacagtcagcttctgcttctttctgaatggtctacgcactgggattatgggcttaaatactcgtctcttattggcgttgtgtcgtaacaccgcctcaggcactaacccatcaaacatgtcaatgacattatccccccttgaaactgatgttggtccctcaacatcctttgatgatccttcagagtctccttgctcttgtactggtccaacaatgtcttcatttttgtgcaaagagtcgtcagtgccacggaatttctgccaagatagtgcctttcttgattgcttggccacaaatgcaaagggagatattttttgcttggcgttcccacttgatcccacattgccagcttgagtcttcttgtcttcttccattttgttgccaggatcaccagcttcttctactttgttaccaggactaccagtttcttccattttgtcgtcatggctaccaattgcctctgcttgatcaccatcattttgcatttcatcaccatgactactgattgcaccatggtttccatgactaccacttgcttctccttgattgttgctgtgtgttgcatcatcttctgtcacaacaataggatcagagaattgatcttgttcaatctgctcttcttccacttcttcttctgttgctggtatactgatactgcgagatgaactttgagcgctgtgcaacgagacttcaccgtcactaccaatgcccgtttctgtcaaggtgggttcttcatgctgctgtattctgttggtattgtcgctctgtctatcagcatcccgtatatcatctaattcatcatcttgtaattcatctgctgatgatatgtcatcatatccatctatcacagttcgaatggtgtcatccacagcctcaacctcttgttcctcgcttgcaatttcagacatagcgctatcaaattcttcttcatgcggcgatatgtccccataggcttccaccacatgcttcagctcattgtcatcttcatccattgtagagttgccatcaccaccaacatccgacatgccactgcattccacatcactgttgtcattgtgcggctgattcatttgcagatcctcctcaatcgcctcctcttgctgttgctgatcttgatctactggcacactctctgacatattcacaaatggggacacaccctcttgactgccatacatgttgttggatagctctggctcttcttgttcaccaacaacaacacttgcacttgtcgttgacgaggtattaggctcaacagtagtagcatcttgaccttgatccacattggcatgaacaccagtcgttgagacagcggttgtagcagcaccgctactaccccctccctttccagctaaaggtaatgatgctcggggaactctaccactgcgcgttgtcgtggcctccttgacaagtctacggctggctgtgggatcgtaccatgtttgctctggcttatcgcccttggcacgcttgagtctgtcgcgatgtactagtgaatccaacttctggccagccatagtctctaattggtaagtaccatactcatcaaatgcttgcgttataatatagggacccttgaatcgtggctccaacccaaatttgccctcatgtgtcaacaacaccaagtcgccaacctcgtagtccacgatacgcatagccttgtcccagcgctccttgtctcggtcggacacagtcttcattcttgcttgagccgctgctctgtgttgacccaatgcagcgagttctcttgctgtaatgtctgccaccgttcttggatcttgcatagactcatttgagacaaacgggatgatggcatccccaggcaaccgaggctcacgaccatataccaaaaagaatgggctgtaacccgtagtggcattcttccagacacgcgaagaccacacagcaacatccacaaactcgtcccaacgatgtagagcaccttgaacgtattttctcagcatgtccttgacagttgcattgtacctctcgaccttgccatttgtacgtgggtggaacgcacttgtgagtttgtgatggctaccaagtagtttgacatactcttgcactagctcactacagaaattggcacctctgtccgtgacaaattccacagggcaaccaaaacgagtgacgatctccttgtagataaactgtgcaacagactccttggtggcatctggtagggcacacgcaatcggccagttggtagtggcatccacagcagtaatcagccaacgatttccattctttgtttgtggcagctctccaacaaagtccaaatgccagcgttcgaaagcacccacaggtataggcagaggatgcatctcgtcttgatgtttggataccttcttgctgttgagttgacatgctggacacggcgcaatccactctgcaatatccactttcatgcgtggccaccagtatcgcttacccatgagatgcatcaagtttctgacggaggcatgcccaaaactctcgtggtatttggacaccagatcagcacgttgggagaaggggacaaaaggcacttccagcgagggcttgtcttgctctttttgcttgatgacacggaacaaacgaccattcttgatgataaagttgggcttctcccgcttcaacatggcccttagctgcttggatttcactttttcatccgtaccagcaacaaacaacaatggccaatccgactgcaactccttgggtagttcactccatgacgcatacagatacagaggttccaaagactccttggccggttgggaggcatcaccaacacgagacaacgcatctgctacaacattttttttaccaggcttgtagacaatcttgggtgcaaacatctccaaatcagcgatccatcggatcagacgaggtgtaggcttctgttgcgtgcggaagtaggtcaaggggttgtgatcacagcacaccacataacctccaggacagccatcaatatagcagcgccaggtacgtaatgcatgcacaataccaatcagttctctctcttgtgcaggtagtttttgctctgccgaggacagctttcttgactcaaacgccacaggatgccattgcttgctttcatcatcaccaggttgtaacaacacaccgcccacaccaaaatcactgctatcagtctcgattctaaaaggctttgacatgtcaggcactctcaatacaggtgctgttgtaagcagttgcttcagttgcttgaagctggcctcgcaatcatccgtccactggatagctcttttcttgggtccagatccttgagtcaaatttgtcaatggagctgcaatatgagcaaaagacttgatgaaccggcgatagtgctgcgcgagacccatgaattggcgaacttcttgtacattggagggtgttggccaatcttgcaccgcttttaccttctgagcagaaggctgaataccatgttcacagatctcaaatcccaagaagaccaactttcgttgcgcaaatcgacacttctccatgttgacaaccaaaccagcagccttgagcttgtccaacacaatcttgagatgcttcttgtggagatccaaggtggggctaaacaataacacatcatctaaatagcacaaggcgaacttgtcaatgcactcgtagccaagaaccttattcatccaagcttgaaaggtcggtgggctgttgcacaaacccattccaagtacggtccattcaaatttgccatatcgagtattcatcgctgtcttggggatgtctgtgtcttgtatacggatttggtggtagccgctcttgagatccaggcacgaaaaataagacgcacccttcaaacgatccaagcattcgtcgattcgaggcagtggaaaggtgttacgcacggtcaccttgttgagagcgcggtaatcgatacacatgcgcatggaaccatcctttttcttgacaaacaaaataggtgaaccccatggtgacgagctaggacgaatcataccagcggcaagcaaccccttcagctgtctcttgagttcatccaactccaaaggactcatcttgtatgcaggcttgttaatgggcgctgcgtctccagtgtcaatcacatgctgcacctcctgtgcagaagggataccagtcaacttgcttttaaacacatcaggatactcgagaccaagctgctttttccactcagcgtccatgctcatggtgatttgaacctccttgttgtggtcctcacagacatgcaacagatacacatcggcttgcttgtgcttcaacaatcggtcgacttgcttgggagtgatgagatacttggacaccatattctcaacagacgtatcataaaaggtaagagtgtcattgtcccagttaaactgaggcttgtgctgtttcaaccaggatctacccagtataatgtcaaattttgaatcgtatacaaaggacgatacagataccttgtaaccctgaaggttaagtgcatattcaattttgtcggtaatcttgtgcacgctgccaccagctgtctccacttctctgttaaccttagaccagataccttggagctgatgagcaacgcttggcttgatgtagcactcactcgcaccactatcaaccaacactttgacgggcacatgacgatcaccatcgcgagagtacgcgaatccaccatacaggggtaagtcagacgacgaggagcttgtagccgagttgagctgatccaggtgagggacatcaatagccagccttgctgacaaaggctccaccatcttggcagtggctgttgatgatgtgcctttactgtccttcttattaggcgctgaagaaccattcaaatagtgctcacaggtgttcaatttattgtcatcatcatgtgcaacagaaggtgagctatcactattattgtccatggcattcagatttcctcttggcttcttgtagttaaactgcttccttttgcctttgtatgcaccaccagaaccttgattgttgtagcgatgactattgtccagcttgcgaatggcctcaatgcgatccctacagttcctcttgacatgacccggcttttggcaaaagaagcaaaccacagatgaactaccaccacgactagtcattgcatcgagatccataggttcaggaccaccaccttgggaagagccaacgccgcccgaaccagaaggagagtagccttgaccttgctgttgagcccatcttgaagtcatactactacgattgctactagaggaagcaccacgcaaatgaggtcttgtagctgcatagttcaatgcatgggtaaagtatgtttggatcttcctttgggctggttggtaatcacgcagttgggcttggagttccatgtcttggatgcctttcctgaattgatggcactgttcctcctgagtcataccagggatgagcatgacaatgtccatgaatgagtcacagtactcttgcatcgaaccagtttggaacagggaatccagggcatcacgagcatcatccacacttctggcaggcctaaagttgtcaatcaactctgctttcaacgcggtccaagtacttggcacagtagttggatggaactccttgtatacacgcaaccattcggccgcacgaccagctaacagagtacttgcaaagatgaatgtcttttcgtcactccaaccgtaaaagtccttgtgcgtgtcaacagcagagcaccaattgtcaatgatacgaacatcacgttcaccagagtacgcagagggttgcttcaacttgacggattggctgctttcgcccgtgatttgcttgacggcctgaaccaccatatcacatatatcttgaggtgtggccatttcagtgttcagatttaccagtgctttgtattacagtgcttgagagaataccagtgctttgagagataaccagtgcttttagagagaataccagtgctttttttgagagaataccagtgctgtaagcttcaccagttcttgatttcagtactttaacggatgacaaatccttttatcacggttcttttgagatatagcacgttcagcaattagataattagatcta

SEQ ID NO: 28 - DNA, 22001 bp, unidentified
  misc_feature 1..22001: note = Fanzor polypeptide
  source 1..22001: mol_type = other DNA
aagcccatcgtctttatccacggtattggcgctggcctcatgtgctacatttcctttgtgcacaagctcttgaccttggatgctcccattttttgcattgaactcccttttgtctctatgcattgcgtcgaagatgtacctacgatgcaggagaccattcgcgatctgcagaatatgctgcatcgtcatgatttcgacgatgccgtgtttgtagctcattctctgggcacggctgtcacttcctgggtggtgaaatacatgccgcagagtgtcgctggcgtggtgtttctggaccccatctgtttcatgctgcattacaaggacgtgtgctccaattttgtctatagaacacccaaaactgctgctcaggtaagatactttagtgtgtatgtgtatgcgcatatcgctcatcatcagtatgacactacagggccttgtcaagtactttgcgtccactgaactgtacatttcttactacatctctcgccactttcactggttccaaactgccttgtatgtcgcccccactgtcacccatcataaccactcttatacctcctccatcaagatgcccgacaacaccaaggtattcttgtctgaaaaggacaacatcatcgattcgaatcgtgtggacacctatctgagccatcacggcgtcgatgccactgtcatgaaaggattggatcatgcttctttcttgttctatccttcttggcaaaacgaaatgttggcttccatcaacaactttatatgccaaaaggcctaatttctgtttaaaattactgtacatatctactactgttactatctatagaccttcttcattgtatcccccccccctcttttttacaagctaatttaatgttaccccattcatttcgttattaaaaataaaatgaaatcatccagaattcatgcaggcttcgttaagtcaatctaaaacggttgattcatttcgtcatggtcgaattgacaaatcgagtgtatattaaaagtacaattggagtaggaggaggtatctctatacatatcttggccctgtcgcacactatacaactgtaactccaatgcgctgtgctaatcgttggtattgttctctggcaatctttcgctgtctccacatgaacactgctactgagatgactacaactgctgcattgatgccctgttgtatacggataaagactgcattagtatgcgaattcgttaaatggtggcgattctaaactactcacctcaaatttaataaatctggctctttccacactcctcactcgaggacatgctcggaaagacggtaaggatatcgcgtcatcttcataaaaggctgtttggttcttcttgtctgctagttcgggatcgtcccattcgcagcgcactggctctttattaccaaactcgacgcagtagggttgtgttttctacagattgtcaatacggatttctctctacatggaatgcgacatgtttaccttttctaacggcgagcacacttgacactctccaatcgaatagcaagtgtaggtcgatttgtccactgtttcatgtgaatgagtatagtctcccagattgcgagaagcagcgtttgtatcttgagcaacaccaaaaggaggtgttcgtcggtattgagtttcggctagtgtgattgtaaaaatacaactatacaagatacatattaataccatggacaatgctgccgagagtcccctactacttgcctgaatatgactagagcaaggtatcgcatttgcttgatatgatggtaaatgaagaaacccacacacacattcgatgctattcagcatttaactgagttcttaatgtgacgctttcgcaaaggccatcaaccccccttctaaacggtttctggatggtttttgtttagatttcaactgtcaaaaatgcaaagaaagtccttgtggggttcctataaagcattatcaccgaaaactagaattacattgggtctcggtaaggcgccatgtctttttgaaatcaagctagcacactcacatgttggcatgatttgcaggtggaatgttgtttgctacagcaggcatgtatttggctgacctgattgaagagcaaaaaccagcatctgaactggagaagcaagagcttgaaatgatgtcccctattgtcgttgtggatcatcaacccaagaaataagtctacaccacaaaataccatcttcaaaactgaaatatcaataaatcaaggtctctttttaaacctggccatgtgtatatatacagttttcgtcagcaatgtgtgagagccatatataaacaacgagagttttatgcaataagtattgattcacccatatacacaacaaaaatgaaatttctgtccatctacaatgcaatcacgatcactgctttctggttatcggctactctcactcaagctgctgtgatcccattacctgcagcaaaccctaatcctgtactcaactcgtttactcaattcaactggtctaccgatgctcaattgctggatcagacgttcgctatcgacctggatgcgccttcaagagtgcatgttactgatttggatccccatggcgctggttttgctgtctatgataatggcaattttgttggcgagacggctactgtcattaccaaggacaatccatatggcgcagaagagtaccattatcgtcaaggcttctttaacttggataccggacatcatgtcattactgtcaagttgaagggagatgccaagactggaagcggggctatcagaatggtgcctggtgtggataacgaaatgactgtattgtatgacagtgctgaggttgtcgatcaaggcgaagcggctgctgaggaggctgtcgctgaggaggttgttgttgaggaagctgatcagattgaggacgtctttgaagcggacgaaagccatgataacgaagatgaagacgatgaagacgatgaagatgatgaagacgatgaagatgatgaagacgatgaagatgatgaagacgatgaagatgatgaagacgatgaagatgatgaagacgatgaagatgatgaagacgacgaggacaacgaggatgatgaggacgacgaggacgatgaggacgatgaagatgatgaggacgatgaagatgatgaagatgatgaagatgatgaggatgatgaggatgatgaagacgatgaggatgatgaggatgatgaggatgatgaagatcaagaggagggcggtgaagacgagtatattaccattggagactctacccaggattttgattacttgaccaatatttacggtgttcctcaagacacatcacacaccatcacactcactactacattcatagtggatgtatacgccacagaaacatctgatgaaacagagacagaaactactacgtcgacaatagtcattgagccctcctttttagaagactctccagaagaatctgctgttgcagaagctgttgaagaggacaatagtgctcaagagcagagtttgtccatttaaacaaatagaattgacattatatatatataaagtgccatgtaatttactcaataaagcgaaattaagcatcttcctgatactctgaatgttgttcctggaactttaggattttcatccgaaagagatccattgatccgattggactaactagcaataaaccctgcagaatgaccaagatgaggctattgaattcgctcatctatcaattgacgcatctagcttgcacatttgatacaaaattcaataaggcccctacacagacttgggtggggttcctctgaaatagcacgctattgacatttgaaagttgaaaaatccttgtagtacgagcgaaataaaggtctcgcatgatatttcccatgctatttgttttcaagcatgcattttattttctcttacgacaaatttgaatacaagtgtataccatttttgctttgtagagatacttattgaagtgaatgccactgaataccaatcaaataaaccctgccattataatacatgagtgagtcagcagccttatgtaatccaccctgagcatagaagatggacgctccggctttagcattgtttacacgttcgaaagcctgcaagagccatcagatgatgatgactccatggcaaccagagtcacaattgaaaagcatttacatctcctccttcatggccaaacatctctatcacatctctttttctccattactcaataccgaaactaattgagagcatacagaatgactacagaatatcgtattgaaagtgacacctttggtgatttaaaggtacccgccaacgtatattggggtgcccaaacacagaggtacattggtgttcaagtcgacatacgcgtttcattcaggtactaactgccaatatacagatctcttgagaacttcaagattggtggtcccagtgagcgtatgcctcctgccttgatcaaggcgttcggtatcctcaagaaggctgctgccaaggtcaaccttgagtataagctggatcccaagatttctgaggctatccagcaagctgccgatgaggtacgacattgaatctaagtttttgtaaacaggttgcacaagcaaagaaggttttaacaaggttttttcttcattaggtgattgcaggtaagcataacgaccagttccctctcgttgtctggcaaactggctcaggaacacagacccagtaagttgcttccgtgtgcttccatatcaatgttgcttatacttttgtattttgcataatcttctagtatgaacgtcaatgaggtaaggtttggcatgaaaattcggcttcccaaatcggcttacatcagtttgcctctccataggtcctgtccaacagagcaattgaaattttgggtggtaagctcggtagcaagactcctgtccaccccaatgaccatgtcaacatgagtcaatcatctaatgatacgtacgtatattgccatgtcatccaaaaagatccatagctaacggcatttacagcttcccaactgccatgcacattgcagctgttgttgagatcaacactgatctcatccctgcattgactcaactgcgcgatgctctgcaagccaaatcagatgaatttcaagacatcatcaaaattggacgtactcacctccaggatgccactccattgacattgggacaagagttctcgggctacgtgcagcagttgacatatggtattgaacgcattcaagccactttacctagactatctcgtttggcacaaggcggtactgctgttggcactggtttgaacacccacaaaggatttgatgtcaatattgcaaaggctgtctctgaatcaacaggctttgcctttgaaacagcacccaacaaggtaatctggattatataaagtgttgtctagagagagatattgacacggctacacagttcgaagcacttgccagcaatgatgccatggtagaatgctcaggagcactcaatacgattgctgtttcattgatgaaaattgctaatgatattcgctatttgggatccggtaataagtcgatttcaaggatgaacaatgacatggtaattgacgaaaggatcgttttacataggacctcgttgtggtttaggtgaattgagtttacctgagaatgagcctggatcttccatcatgccaggtaaagtaaatcctactcaatgtgaggccatgaccatggtctgtgctcaagtgatgggtaaccatacaactgttactgtctctggaagctatggtcaatttgaggtaatgcaataccgtagtagatgagacgtgtgtgtgagttggtatattaactcgccgtttgtatagctgaatgtgttcaagccagttattatcaagaatgtacttcaatcaatcaaactgttgagcgatgtatgccattccttcaaggataactgcgtcgttggtattgtcgctaatcgtgaacatattcagtccatcatgaacagagtaagttgtcttttgtgcgtatcagtgggttcgtgaagtctgataattttgttatgtagtctctcatgttggtcacatcgttgaatcccgtcattggttatgataaagctgccaaatgtgctaagaaggcacataaagaaggtagtaccttgaaggaggctgtgctctctcttaattatctctcttcggaagagtatgatcattgggtcaagcctgagctcatgattaatcctcagtaaaataaaaatcagaaacccaaaatatatttccgccaatcaaaggctttaaacattgcgaaatattaccaaaaatggaaggctttgagtgtactttactgaggccgagttgactttattcatgtcttgtagcgaggggactttaagataaagctactcgggaatagcttaagctatggcaaaaacaccacatgaaaatatacgatatctaacggatatgaaactgacgaaatcgtagcaaatcatagctaaatcatacgtgtaagctgactccagagcatactggcatccactactatgtgatccggagttgtacttgactaattacacatctcatattgattgcctagacaattaagaaagcctgttagataagatgttgcgtggtgggcttgcctgctgacttttttcttgttcttgtcttgctgcttcatgcaaattcaattgcctgtcaataaatagatgccgccagttagtgtcagtacagaataaatttgtaggaaatagcaccctataaccagacaacaatagcatgtgggcaccatattcatctcatcaacgtgcacttacttgagccaccaccaacagtatttcatgtatctcgcatctctaatgagaattagggcacaatgtgagtagaatactcgtccatcagccccacaccctcaccttatccgtcaccaagagcatctcttgcgtgctgtagtgaccatgagcataatgtatcatctacatatcctcaagcaacgatgcactgtaagcgctacaaccatccatcaccaacaaaaacttaccaaactcacagacaaccaaaaaccttgtaccttgtgcgcctcatctacgctgtatgcatctgtgcctggaagcagcaacgcacaatgagtggtgtatccatccattactcatagaaacttactaagtctacaggcaatcacaaacactgtaacaagtgcgccttacctgcgatgtatccatttgagcctggaaacagtaacccacagtgagtgatgtatccaagcatcagctccatccacctaccaaatgcagcatcagctacacctcacgtaacaagcgtacatcatgagccatgcataactgagcctctcaccaaagcaaaatagaccaaccattgcgagaggtttaaccaacagccagctgcaccatgtcattcactgcaaagcactaaaacaagcacgttagtagacatctatcattaatgttgatgctacctgcttgtaattctgtgcgtggcaaaaggactttgtagacagttgatagtaaccacaaaagcactcgtttcattccaaacaacggcgagttcatcgtctagacatgttttagaaagcggcaatctgctgaataagataaaagcgaaagggggaagctgaaattgacaagtgaggacagcaaagcagcacgagactggtatcgatagctaaattgaagaaagctgctgcttctgatgcgtagaacagacgttctgtacacgcagagcacatacacatgctacattaccaaagactaccaggtggaagagtggaggaagtaaacgaaacaagggaaaaaaagggaaatatgggggaacgcttcgtttgacaggtacgcgcgttgttacaaagcatcaaaatactggctctgatacgcagaatgtgccctgcgtacacccggagcacatacagacgctgctttatcaaacgcaagcaagtgaaaaagtggggggggggagtaaaagaatgttatatacatgaatgatgtcatgctgcatatcagatcaaggtacacctataaatcacatcaatttatacctttgacaggcgcttgttgagcgactcttcgaccaagtcgagagcatagtcagagtcaattatcagagtctttcattcaatggggcttgatgtttggggccaattagcctggagcaatcccttgattaaggtcatcaataaagagaatatcaggtcaggacagagtcctgcgctcaattaattcgaatgtcgattatttgaatggctgggcatatattagactaaagactaagcgtaggccattactgcgcgtcctaagccgcttgccctatatcctcatggatctcatcaggatacaaaacactgaaccattacatagtacatgtacaaaacaaagtaaacgtggcatagacacattaattgattgatttactatcaaagaaaggatgctataaaccgctatacattgaatctggtgtagcttcgtcaaatggggtaggcacgttattccatagtataaccgtttattatgcagcgaaaacaaaaagaaattgaaaaaaccaacctgtgattttgatttttgtgaataaaaattaatacagacgtgtttcctttcttcctctttctttttataaaatccttcatcagcatgaatccacgtaaagtacagcccaaagtacagctagaagtttaccaggatggacttacgccactaaaccctcctgcaagatttccacctaaggattatgtaagaagtagagccacaaaaacgtaaacagacaccaaaaacaacattatgggcgccttatatgccacattcaaggctaaactgaaggaagcaatcagacagtgcccagacagaatgaactaccctgagttgtacataactctgtttgaacgtaccaaactaccaagatatactgttcctgacgccgccagacgcctcgacattgacctcaggcttgtggaaagctttttgagacaacaagttcaaacaacaggcaaacagaccatcgcatactggaaagaatatgtagagcaacactttgacgaatgcatcaacgaggttttgtacgttgatccgcaagaaacagaagccaacagctctgatgttgacgatcaagacgacgatgatggatacgacgagaccgaggaatttcgaacctgcacgacatctttccagaccattatcaaaaaggatttagaagaagaagtacgccaccgcattgaagaaaccatcttgaactgtattcgagacactacaaactacacctctgactttagtattcaagtactaaagatggctcttgtattcaacacacacacgttcacattgagaaacaatacagtgatacttgaagaggctcaaggcgcaaatctcggccatgtgatccccattgaatacttggacgatgccatgagagtgcctagaccatttgatgccgcttgtttcaggaaccaagcttttaagaaagacttcgacttactgttccaaactggccatttcaacatcatcaactcatctttgtatggaaccaaaggacccacggacgccaatctgaacaaacacagcgttcaccggcttatttctgatgccattgggcttgctccaacggaagcttatcaccacttaccctcccatgtcacgaaaatggcgcgcttgcagtacactaccaatgtcaaaaacatgtggtccgacaagaccatcatcaacaagctgctgaaacgcctcatcaaatgcttgctgtgtattcatctacgcccaacggacgagaaacaactgcaagagagacgcctgcagccaagacaagccgcacccagaagtagcaattccaaccaaggcatgtctttctcacacaagacgcgaaatggcaggcgccgagtcatcaacaatgaaaagaagaacctcgagagatgcaaacgcctgaacaaagtcgacaaagcagcgagatgcgaggaaagacttactatgtacgcagacgtcatggaaagagaggtacagtgagcttgctttgggtctgaacaatataccaatgacatttaccattttcttatcccataatttagagacgacaaaaagcattacgccgacaagcaagcagtagtctagaagagggcgtcagtgaagacgaagaagacgccttagttgctgatgaaccagagtctgaaaagactaacgacacttcaaagcgaaggatcacacaaatgctgaatcaaataagaagtaacttgttccagaacacgcctctgtcgagatcaacagttggtagcaagattgagaacctcagcgacagcgagtttgatgccatgtctatcatcgctggatttatcaaaccctacatcccggcccaggttgattacgccaaacttcaataccagcttcctttccttctaatggccaatgagatactacgctacatgggtcgctcaagtcaatgtctgcagatactgccgttggtgaaacccacaacacttcacactttcctgattgacgcaaagacgctgtatgctttattttgtgcaagcaccctccagcaacctatgatccttttcaacttccaaaacgagcctatccaagagggcatggttgactcctacaaagatgccgtactcagtgccttctttgacattgcccacttgaagagactatgtgaacgccatggaaatcaatttgctcgcaggctgcacatttttccagcgctcacgactgtacgaatttacgatacggtaccgcgccttgtacaacatcaacaacccatcacagcaactgacggagatcccatcgacgaagaccatcatccagatttacagcaacagaatgatgccgtggtacgatttcagcatgagttgaaagatgccactgctagattggaaaccatgttgcttatgtcgcccagtgtacgccaactaaagaatgactttagaggaggacaagcatcattcaagacagttgaggacgccaaaacaacaaaaaggagactgatgcttgatgttcgtgacgcaaagaccaacctgcaaatcgccagacgagaagtccaacgcttgaagtcaatgcataagtttccacccacattgcctccaaactatcaaagatacatgatacgccagcaaccatgtctgaaaaaggccgaggagtgtttcattgacgaggactttgatttgcaaggcgccatctttgctggcacagacaacggaattgtcaagaccacagagaccgtatactttgacatcgaacgatttctgtatcacctacgtctctttctacactttcatccttcggatcaaaatggacagcctgtgggcgctcctgcaatgttcatggatctgccagctacattgaccattggatcgaaagaaatcaagcaaggcagtggcatgtttgactacatgaggtcaatgaacaagaagaagacgcctggcgaacaagtactagcaatagagagcaccctatcagccaacagcttgttcaattgcagtacaccaaatgaattggaggagacagcccatcttcaccaacgccaccaacaagccatccgatctttctattactcaaacatccagtgcaaagaaagacgtcaatttgagtggagaaaagaaagatactatgatcgactggcatcaaacgagcgcaattcttccggcgtcaaacatccaattatgtttattggggatcgtgggcatggttatggatcctgtatcaaacgtcatttgcgattcggtggacactggagagaagagcgccactcacgatacacacctaccattattaccaacgagtataacagttcccaaacatgcctgtattgcttcaacaagctgtctcaccccacttttgcacacaacaacgccatcaagaccaccaagggtacttttgtttgtttaaatgaggattgcccaaacgcctttgtctctgtgtgtagagaccaagtgtcagcgttagctataggcttggctggtctttcacaattgttatttggggcagcctttccgtgtttcgacgaggataccaatccaatgaacaagaccagattctacgaaatggccacgctttttttgagggagcacgcctaggatccttctcatacttacgaaacctttgctaatttctcaataaaaaaaaagtatatggtgaatggctattgtccaatatacagatgtaaatgtgaaacgcacttttgatactcgccgtacagacgatgcatttccttccatttacttgatacaaaaggaagatggctcgtacaagaactaggaactaagattgcaagcataaattatctttaaaacagtcctatagtagtttagcaattccagatttggcatcaatgctttttggcagtcgtcttttcagcttgtgcagatattttcttgtttgctcttctttcctacatctcactcaatttatgggtattgctcactatacatctcatctagaatgcggccactgctctctacacgccatcatcaagactctggtattgtacactgtacacatcgtcgaatgaatggtattgctcactgtacatttcatctagaatgtggccactgctctctacacgccatcatcaagactctggtattgcacattgtacacatcgtcgaattaatggtattgctcactgtacatttcatctagaatgtggctactgctctctacacgccatcatcaagactctggtattgcacattgtacacatcgtcgaatgaacggtattgctcactgtacatttcatctagaatatggtcattgctctttacaccccatcatcaagaatctagtattgctctttacaccccatcatcaagaatctagtattgctctttgaacgccttaacaagatgacgcttattgcccactgtacatctcatctagaacatggtttttcctacatgtagtttagctccttcttttctgaatactgaaacagttgtagagctcgccttcgtttgaaggcattacattaggtaagtgacagaacaagggaaagaagccctctattaacgaatgcgttacaattccatttacaccatactattatatttctttttgtaagtttctaattcaatgctgtatcgtaattcagttgactaatcaaatctttattacttcttttggatcaacagtgaacttatcattacagtaaaataaaattaagtgagcctatcattacagtaaaactctgaatgataattaccaagcaatgtagcagattttgtaaatttacaccatacttgttttcatgtctttgagtctgctacgtcggcttaaagagggcctattgaggtggattgattgccgtttctgccctgagaacagcaccacaaaaaccaccattcactgaccgttcttagctcaacagttgcaaatataactcgtactgcaagatacataataggcagtattggcaaatatcagggcaccttcttctaaatcataatgcaatgactcaaatcaagagaaactaataatgctttttttacgttcagttgactagaatacttgtatttcttaagtgtcttccaccatgcatatagtttactacactactaaatagtttacatctcgccatttttaggcaaacaaaaataaattactaccattaaaaaccttgtaacagacatctatcaaagctttcttttagatttttcgatcctatacgcgaagatggctcataataggccagtgattatagtgatatatctttccattcttcacgttttgtaacttttatattcctgaccgataagccaccttaggacactcggaaatgcaatcatcaacagtaatccaacattaaacagattctaatgagcctaactggagcttaaaatattcggtctccgatatcggagttttctggtttttaaacctcgattttgccctgattctgaatctgcaaaccatttttttgtaggtaccatggttcctgacaaaagtgagatttgagatatttttggaattttaggctgtggtactagtaaaagtcttttaatttgatagaaatgccccaagtttatatagcccaatcgaaagaggtgcatgtttttgactaggacgtacttagtctagggtcgtaatagatgatttgtatgagtaatgatcaagagaaggtgcacctgcgtgatttttgtgctttttgaaggggtctacactcgaatttcactaagtgaatgcaagtagcgtagagcttgactattgtttgccattcaattctctatcggatggtatagatgtcatataaaaattttgacctttgtcacaaacccactgcttgagggacacgaaatttcacattttgagtagatttatgaagggaatgcatatgtggtgcccaaaactgttggatcatgatagatccaatgcgcagctatcgaatcgtttttgtttcatgtcaatccgataatttttcgttgagatattgtcaaaaaggggttcatggaaaatcaccagatttggaccaaaatctgcctgtcctagcaagggaaaaaattgtgtggtattttcaaaacacgacaaaatttttgatttctcatgctagagttatgctaaagcctcgagccaaataccatccgaaaggtaattttttgctctacatgaccaatgcaatgaaaggtatagtcaatatgatagaaacttgttaatccttgaaaaaccttcaaaacaacaccatcaaaaatcacctatataatggcaaccaagacacttgatattggtaccattgaattctgtacagaaaccatatagggctaaaggggtgtttactatcaactatcatccaattttgagatttatggattttagaatcgatgatggatcaattgtaaataccaaattttcaaataccgcctagttatattacagaccttatgaattttataggtcattttggagactagagtggtggtaaaatgtcatattaacttgcagttttcaaggtatccatggatacctgacatgttaatgcaccacctgtcgagttttgagtgctgtagcttacttttttccgttccatatcgtttccccaaattaaggtacgcattttcccccgcttaaaaatgggactttccatgtcgaataggttaggaacaaggcatttccaataccatgttccaccttaaaagttggttcatttccattcctttacaacatatttaagtatcaaaacattctggaatttctacctcatcgacccatgatgtacaaaatgaatttcgaatttggagttttgggtttcatggcattctgacatcgattttccagaaatgcacgctagagctttgggactagcatgttcctaagacggttttttgccctgattctgaatctgcaaaccatttttttgtaggtaccatggttcctgacaaaagtgatatttgatatatcaccttgtagaaaagtgctgcaacgacagccgatatctgcgatattttgcaaaatctgcatcaaaatctgcatcaaaatctgcatcaaaatctgcgaggtatgcgatttaatgcattgcatgcagaaattgatgttagtcatgaagattgttttatatttttttgggaactagacggataatctgtgaaaatatataaacccccatagtttaaagcatcaatattgtagttgtgtattttttaaaatatatacgctgccaaatgtattttgtcagtcttgtttcagttgagttcttttaagtttgaaaaatgctgcccaaaaacatagtagtattaggaggctctagtttattagctatcaaacttcattgttgtctcaaaatgcagatcacaacctctttaaattatggcctctttcataatatggcgcattgaagcaaactgactatgtcagtgctcttgttacactctataaaaacgtcaaacaaaatctattctaaaccaaccaaaaatacaacagactgtcgtgtacgctagctatgggtagtatgtaggtacacaatataaaatgtaaagagaaagatgaggtttattcaatacaatgtgaaaataatatttataccctagcaactaattactgctgacgtcagttactacagtcagcttctgcttctttctgaatggtctacgcactgggattatgggcttaaatactcgtctcttattggcgttgtgtcgtaacaccgcctcaggcactaacccatcaaacatgtcaatgacattatccccccttgaaactgatgttggtccctcaacatcctttgatgatccttcagagtctccttgctcttgtactggtccaacaatgtcttcatttttgtgcaaagagtcgtcagtgccacggaatttctgccaagatagtgcctttcttgattgcttggccacaaatgcaaagggagatattttttgcttggcgttcccacttgatcccacattgccagcttgagtcttcttgtcttcttccattttgttgccaggatcaccagcttcttctactttgttaccaggactaccagtttcttccattttgtcgtcatggctaccaattgcctctgcttgatcaccatcattttgcatttcatcaccatgactactgattgcaccatggtttccatgactaccacttgcttctccttgattgttgctgtgtgttgcatcatcttctgtcacaacaataggatcagagaattgatcttgttcaatctgctcttcttccacttcttcttctgttgctggtatactgatactgcgagatgaactttgagcgctgtgcaacgagacttcaccgtcactaccaatgcccgtttctgtcaaggtgggttcttcatgctgctgtattctgttggtattgtcgctctgtctatcagcatcccgtatatcatctaattcatcatcttgtaattcatctgctgatgatatgtcatcatatccatctatcacagttcgaatggtgtcatccacagcctcaacctcttgttcctcgcttgcaatttcagacatagcgctatcaaattcttcttcatgcggcgatatgtccccataggcttccaccacatgcttcagctcattgtcatcttcatccattgtagagttgccatcaccaccaacatccgacatgccactgcattccacatcactgttgtcattgtgcggctgattcatttgcagatcctcctcaatcgcctcctcttgctgttgctgatcttgatctactggcacactctctgacatattcacaaatggggacacaccctcttgactgccatacatgttgttggatagctctggctcttcttgttcaccaacaacaacacttgcacttgtcgttgacgaggtattaggctcaacagtagtagcatcttgaccttgatccacattggcatgaacaccagtcgttgagacagcggttgtagcagcaccgctactaccccctccctttccagctaaaggtaatgatgctcggggaactctaccactgcgcgttgtcgtggcctccttgacaagtctacggctggctgtgggatcgtaccatgtttgctctggcttatcgcccttggcacgcttgagtctgtcgcgatgtactagtgaatccaacttctggccagccatagtctctaattggtaagtaccatactcatcaaatgcttgcgttataatatagggacccttgaatcgtggctccaacccaaatttgccctcatgtgtcaacaacaccaagtcgccaacctcgtagtccacgatacgcatagccttgtcccagcgctccttgtctcggtcggacacagtcttcattcttgcttgagccgctgctctgtgttgacccaatgcagcgagttctcttgctgtaatgtctgccaccgttcttggatcttgcatagactcatttgagacaaacgggatgatggcatccccaggcaaccgaggctcacgaccatataccaaaaagaatgggctgtaacccgtagtggcattcttccagacacgcgaagaccacacagcaacatccacaaactcgtcccaacgatgtagagcaccttgaacgtattttctcagcatgtccttgacagttgcattgtacctctcgaccttgccatttgtacgtgggtggaacgcacttgtgagtttgtgatggctaccaagtagtttgacatactcttgcactagctcactacagaaattggcacctctgtccgtgacaaattccacagggcaaccaaaacgagtgacgatctccttgtagataaactgtgcaacagactccttggtggcatctggtagggcacacgcaatcggccagttggtagtggcatccacagcagtaatcagccaacgatttccattctttgtttgtggcagctctccaacaaagtccaaatgccagcgttcgaaagcacccacaggtataggcagaggatgcatctcgtcttgatgtttggataccttcttgctgttgagttgacatgctggacacggcgcaatccactctgcaatatccactttcatgcgtggccaccagtatcgcttacccatgagatgcatcaagtttctgacggaggcatgcccaaaactctcgtggtatttggacaccagatcagcacgttgggagaaggggacaaaaggcacttccagcgagggcttgtcttgctctttttgcttgatgacacggaacaaacgaccattcttgatgataaagttgggcttctcccgcttcaacatggcccttagctgcttggatttcactttttcatccgtaccagcaacaaacaacaatggccaatccgactgcaactccttgggtagttcactccatgacgcatacagatacagaggttccaaagactccttggccggttgggaggcatcaccaacacgagacaacgcatctgctacaacattttttttaccaggcttgtagacaatcttgggtgcaaacatctccaaatcagcgatccatcggatcagacgaggtgtaggcttctgttgcgtgcggaagtaggtcaaggggttgtgatcacagcacaccacataacctccaggacagccatcaatatagcagcgccaggtacgtaatgcatgcacaataccaatcagttctctctcttgtgcaggtagtttttgctctgccgaggacagctttcttgactcaaacgccacaggatgccattgcttgctttcatcatcaccaggttgtaacaacacaccgcccacaccaaaatcactgctatcagtctcgattctaaaaggctttgacatgtcaggcactctcaatacaggtgctgttgtaagcagttgcttcagttgcttgaagctggcctcgcaatcatccgtccactggatagctcttttcttgggtccagatccttgagtcaaatttgtcaatggagctgcaatatgagcaaaagacttgatgaaccggcgatagtgctgcgcgagacccatgaattggcgaacttcttgtacattggagggtgttggccaatcttgcaccgcttttaccttctgagcagaaggctgaataccatgttcacagatctcaaatcccaagaagaccaactttcgttgcgcaaatcgacacttctccatgttgacaaccaaaccagcagccttgagcttgtccaacacaatcttgagatgcttcttgtggagatccaaggtggggctaaacaataacacatcatctaaatagcacaaggcgaacttgtcaatgcactcgtagccaagaaccttattcatccaagcttgaaaggtcggtgggctgttgcacaaacccattccaagtacggtccattcaaatttgccatatcgagtattcatcgctgtcttggggatgtctgtgtcttgtatacggatttggtggtagccgctcttgagatccaggcacgaaaaataagacgcacccttcaaacgatccaagcattcgtcgattcgaggcagtggaaaggtgttacgcacggtcaccttgttgagagcgcggtaatcgatacacatgcgcatggaaccatcctttttcttgacaaacaaaataggtgaaccccatggtgacgagctaggacgaatcataccagcggcaagcaaccccttcagctgtctcttgagttcatccaactccaaaggactcatcttgtatgcaggcttgttaatgggcgctgcgtctccagtgtcaatcacatgctgcacctcctgtgcagaagggataccagtcaacttgcttttaaacacatcaggatactcgagaccaagctgctttttccactcagcgtccatgctcatggtgatttgaacctccttgttgtggtcctcacagacatgcaacagatacacatcggcttgcttgtgcttcaacaatcggtcgacttgcttgggagtgatgagatacttggacaccatattctcaacagacgtatcataaaaggtaagagtgtcattgtcccagttaaactgaggcttgtgctgtttcaaccaggatctacccagtataatgtcaaattttgaatcgtatacaaaggacgatacagataccttgtaaccctgaaggttaagtgcatattcaattttgtcggtaatcttgtgcacgctgccaccagctgtctccacttctctgttaaccttagaccagataccttggagctgatgagcaacgcttggcttgatgtagcactcactcgcaccactatcaaccaacactttgacgggcacatgacgatcaccatcgcgagagtacgcgaatccaccatacaggggtaagtcagacgacgaggagcttgtagccgagttgagctgatccaggtgagggacatcaatagccagccttgctgacaaaggctccaccatcttggcagtggctgttgatgatgtgcctttactgtccttcttattaggcgctgaagaaccattcaaatagtgctcacaggtgttcaatttattgtcatcatcatgtgcaacagaaggtgagctatcactattattgtccatggcattcagatttcctcttggcttcttgtagttaaactgcttccttttgcctttgtatgcaccaccagaaccttgattgttgtagcgatgactattgtccagcttgcgaatggcctcaatgcgatccctacagttcctcttgacatgacccggcttttggcaaaagaagcaaaccacagatgaactaccaccacgactagtcattgcatcgagatccataggttcaggaccaccaccttgggaagagccaacgccgcccgaaccagaaggagagtagccttgaccttgctgttgagcccatcttgaagtcatactactacgattgctactagaggaagcaccacgcaaatgaggtcttgtagctgcatagttcaatgcatgggtaaagtatgtttggatcttcctttgggctggttggtaatcacgcagttgggcttggagttccatgtcttggatgcctttcctgaattgatggcactgttcctcctgagtcataccagggatgagcatgacaatgtccatgaatgagtcacagtactcttgcatcgaaccagtttggaacagggaatccagggcatcacgagcatcatccacacttctggcaggcctaaagttgtcaatcaactctgctttcaacgcggtccaagtacttggcacagtagttggatggaactccttgtatacacgcaaccattcggccgcacgaccagctaacagagtacttgcaaagatgaatgtcttttcgtcactccaaccgtaaaagtccttgtgcgtgtcaacagcagagcaccaattgtcaatgatacgaacatcacgttcaccagagtacgcagagggttgcttcaacttgacggattggctgctttcgcccgtgatttgcttgacggcctgaaccaccatatcacatatatcttgaggtgtggccatttcagtgttcagatttaccagtgctttgtattacagtgcttgagagaataccagtgctttgagagataaccagtgcttttagagagaataccagtgctttttttgagagaataccagtgctgtaagcttcaccagttcttgatttcagtactttaacggatgacaaatccttttatcacggttcttttgagatatagcacgttcagcaattagataattagatctattg

SEQ ID NO: 29 - DNA, 4415 bp, Psitteuteles sp.
  source 1..4415: mol_type = other DNA
ttaaccctcggcctaatccggacgaaataagcgtctttgggccggtagtgagggagtctaactttctgtggaaaggtctcctctttgagggcctggctcaaacggtagaagctccgaaaagtgcgatcgactactttaagagtttgttgggctatatcggtgttcaaccgtttatagttcgagtttcccttacagtagtgatagttggactcgtagcaaagatgtttcccatcttggaagtaatactgccattgagtgtaaattcctacattgtagagatttttactcagtcggcagagttcccccaaggctttcaactctcgcactggaagtcctcgtatctggttcttttgagtcaggtacatagcttctcactagaactatgtgtattttagtgagaagtgtctccaatgtaaagccgtgctggaagcacgcagcaattctcattttggaaattcaactgctatcgggtgggatgtctaactcgagaccctcaagcataaaggtcagaaggtggtcccaactgtcgaagtacagtctgggtaagcgcgcgcaaatcattaaagaaggtttggcgcttcggtaagtgcgctcgtagcaactggtacttgttatcgagcaactcctgcagggtgtggaagagcagcgagaggatgttgatggtccggagcaaggaagaaagatgctgcttgtcatggccaaaattgtgttcgagatggtagcccttggtcttgagagtgttgttgttctcattctcaactttccaacgagtccgcccggcccgaaccacctcggctacattctcatcgctgagaggataattcgtggccaaggagttgtgataggttacctggccatcagcggtggtgacagtaagttcgcaccagttaaccaacagcgcctcatcgctatctttgagggggactccgttgagatagcggtaggtataggttttctcgactttaccagtccacttcttggtcgtgagggtcgggagttcgatgccctctaggtgttcatagagggtagtatgagactcggggcgacagacgacgatgaagttaagttgctgctctaaaaactgctgacacaacggttggtggcaatagaggtcatcccctcaaaccgtgacattcaaagccctcaagcattgttcttgcctcgatagccagcgtttggcggcggcattctcacagtcttgcttatcatgaccatcttggggcacgataaattcggggactaagggaatcacatgattctgtcccggacagacgatgactggagtgacaacactatggaagtaatgggtttttcctgacttctgggtgcgcgttgaacagtggggacagtgaatttggtcggaactgaagtattcggtgccatccaacgcgactaatagactgtcccctaggcaacggaagtcttctaactgcccctgggcttccaagacttgtaggatatcctcaaacactggaaacaggtgctctggggacacggcatctaataagtcccgaatctggttatcacagggaattcgatgaactccaaacagactttgggcattgctcttgcctttactcccctccatcagacgttgataagccagaaacgacggagtttgagtaaaaaacacactaaacgcacttaaagcggcatcctccattccatagcggcgatttttaccccggcgcttgtccggtagcgatgacaagcactggcggaaagaaccgactagagtctcaaagccacctggctttttcaacggctctggcgctcctgggtttcttggatgtcattacgatacagggatgctggggacttgaacaggttttcgccaaaatgagaattgctgcccaattttgggaatcataaccccaggattgaagcggggaacggaaggcgtgaagtagaacctactaccatatgcgaccactgccaaccatccatgactaaggaaatctgaatgttccgacttgaaccaccgtcataagaaggtagcgaaacaggttgacacgctgcgctcaaaagagcaaggggaaaagtaggggtttctctttactacctacacagacctttaaaattaccccggtggacaggacaagtctaaagatggaatgcccgtataaacggaacgtttaaacccctcataggttctcagcaggatgtaactgcacagtagtgaaaagtgtaagcgtatgcctttaaggggaaaggatgtgactgaaagctaatgcctaactgtaatggttaggatatgcccactagtcacggtgtggatatagagactgcgacaaataagagtgtttatgacgagagcgagtttaaagactacgatgttgtatttagctccaaaagttgaagtcacaaagcagggagttgttgccctgttcccgatgtcaaaaggggtatctacatcaggagccgtatgaggtgaaagtctcaagtacggtttggaattggagttggggaaggtgacttccctttcgaccataacgttgaggataaacctattgccagatatgtcaaacccaaggaagcggcctaaatccttggagtccatgaaagaacactccgcagatgggacgaaaatggctcaatcgagaccatcagaacccccgctgggcaacgacgatacaacgttgagtcatattctgatgccatcacgcagtgacaaacgcaaagtcgttatctatgccagagttagtagccgcgcccagcagtccgacctcaaccgacaggtggccgcactgtccaacctctaccccgaagcagaagtcgtctcagaaatcggaggcgggctcaacttcaagggaaagaaaatgctggccttactgggacatcatttgtcaggagatgtcggcatggttgtcgttgcccacccagaccgattggcaatatggggatttgacttgtttcgatggctctgtgagcaaaacagttgctcactcatggttctcaaccagacaagtctcagtccagaaccagaaatggttgaggacatcctcgccatcctccactgcttcagttcccgattatacggacggagtaaatacaaaactcaggtcaaagaagatccggatttaccccagcccggagctaaatcaagtctggcgtaaatggctggctgcttgtcggtattgctacaaccaagcaattgcattatctaggagtggtaaacgactaagcaaactgaaattacgcaacgaagtgatgcagagcgacttgcctgcatgggtcaaagaaacacccggccatattcggcagaatgctatctttgatgcctatctcgccttttcagccagtcctggcgcaaggtttaggagctgtcgggatagttctcaagccatcaagtttaacgatgctaatttctcttcagggagttggtatccaagactcacgaaaggattaactttcatggtttcctaagctatccctaaaacttgcgggcaagggactcagttggtgtttaccaaaggtcgatggttggcgattttccctgaaccagttgccgttaccccaactgacgctactggcgtgattgcattagacccgggcgtccgaactttcataactgggtttgatggttcacgatttctggaattgggctccggagatataggacgcatcactcggttatgtcaacatttggatgatttgatgagccgaatcgccaaggaaccctgtcgttcaagaaggcgacggatgaggcaagcggctcaacgaatgagaaccaaaatccgcaatctagttgatgaagcccacaaacaaattgctcactacttgactcacaactacagcataatttttctgccgaccttcgagacttccaacatggttgccaaagccaagcggaaaatcaaatccaagactgcccgcgccatgctgacatgggcgcattatcgattcaaactaaccctgagacatcaagccgagataactggaaccacagttgtagatgtgacggaagaatacaccagcaaaacctgtactcactgtggtcatgtgcattcccagctaggtggctcaaaagtgttccgatgtcctgagtgtgggttcactctacccagggactggaacggtgcttttggaatctttctaaaagctttgcgggataccgcctctgttaccttaacgggtaatagtgctatcgtcgcattgtcaggcaatagccggataaatgtcgcgtaaatgtatcagttccctgtccccttctctcctcatgaacctatgacttctcctacttatcgccgacgccataaatttaaattttccccacaacggtggcttaaagccgttcttaacaaggggaaaaagctgattccatctgcggttgctattctgattttcctggttgtttgggaggtgttcacggctgtttccgattcgacgttgcccggtcctatccgcacagtgtc

SEQ ID NO: 30 - DNA, 20546 bp, Digenea sp.
  source 1..20546: mol_type = other DNA
agaaattttggatgcagttgcagaagttcagccagactcagttaagatttggtttactttgggtaatttacgtcaagctcagggaaagttaccagaagcagaagacgcttacaaacaagcgctctctctacgaccagatgctgtttcaatttataacaatctgggctacactttgcaacaacaaggcaaatgggaagatgctataagctgctataaaaagctttggaattacagcccaactgcgttgaggtagatgtgaatttagggaatgcactccatgctcaaggtaaactctccccagaaaaacaagatcattatgcaaaattaaatcacaatttgggtcttggtaggaaaaaagtaggggatctagaaactgccgagatttactttcaaaaagccttagaactgaatcccaactatggggaagcttacctcgacttaggcaaaatttatcaagagcagaacaacctcaaaagaggcaatttctgcttatcggcagggtttagagctaattaatccccactatgccacacagtagaagcttaccagggttgtgagactacccaagaagtgccaaacgacaccaccaattcctcaaggaaaagtaattgttgcggaacatcctttccctgggattcccccagtcgcagatgatacaggaaaacgaccttttggagtgtagttatccctgtatataatcgcaccgattatctgcttgaatgtcttaccagtgtcttggcgcaatggcaaggggtagagcatatggaaattattgttatagacgatgccagtacaacaccagtgtttcaattggtgaatagtattggtaaaggagtaataagctactaccgtaatccacaaaatctcggtcttccaggaaattggaatgttggaatcgccctgactcgcggtcagtggattcacttactgcatgatgatgattatattcttccaggcttttatacccggctgcaacaaagtttagagggatgtactgattccattggtgcagcttttacaggttatcaaaacattaatgacaaagggaagtaattttcagccaacaagtctatggaaataagcggggaattgctgaaaattggctacaaaggattggagttggtaactcattaaatatgcctgcggtagtgattcgtcgagatgctcacgaacaactaggggtatatcatcctgagttgatatataccagtgactgggaactctacaaacgcattgccgctgtttatgattggtggtacgaaccagaaattttggctcgttaccgcgaacatacaaacaacgttaccagcgaacttctgttatctggtaagcagatgacatcgattcgccatgccattgaaatatcagaaagttatctgccgtcagacctgtgcggaaattacgagcaaatccggagccatcattttaattattgtttggcatccacagcaattccctctcaaggctaagaattttcctggagcatgggggatgctagaagaagctttaaaaatagatcgaagttctgaagcggtagccaagctatttacttggttaattcaggaagaagcaactcctgtgcgggatgagattgcctccaggttgatttcattcccacttccacttaatgaagataagaaatttttgaaaccaaaacaggtacagccagaaccagtcaaacactgggaatcagtcaagcactggtttactctcggtaacttacatcaagcccaaggagaatttgccgaagctgtggatagctatcatcaggcactagaaatttccccagacatagcacctatttataataaccttggttatgccctgcaacagttgggtaagtgggaagaagcgatcgcctcctatgaaaaagccttggaactcaagcccaactccaccgaagccggttcaaatttgggcaacgcactctatgctcaaggcaaactttcccaagaacaacaggcatactatgcaggtttaaactatcagttaggtatgagtctgcaacaacaagggtatttagaagaagcgataacctcctataaaaaagccttagaactcaatccccacacctgggaaatatacaatcgcttgagtcagatttatcaggcacagaacaatctcacagaagcatctgctatttatcgccaggtcttgaccttactcaaccaacagtacgatcgagcagtaacagctaacccaagttccacccctccagtgtcagaaacagtggcgaagttagtagaaatatacaataaccttggttacaccctgcaacaacaaggcaaatgggaagaagcgatcgcctgttatgaaaaggctttagacctaaaacctgaatttactgaagccgatatcaattggggtaatgccctccatgcacaaggcaaactctcagaagaaaaacaggctcactatgcacaattaaattataagttggggttgttcggcaacaagccggggatttaaagaatgccgtaccttattatcggcaggcaattaccctaaaaccagattttgtggaagctcataatcacttggggatggcactgcaatcacaagagaatttagaagaggcgatcgcctcctataaaaaagccttagaactcaaccccacaactgggaaatatacaatcgcctgggtcagatttaccaagcacaaaacaagatcgcggaagcagtagctatctaccgtaagggtttgactttactcaatccacactacgcccaagcggtagcagctaacccaaattccattatgcagacaactccacccattccccaaggtgaagtaacagtaggagaatatcagtttcctgcaattccaccagtgaaagacccagaggaaccccgtcccttctggactgtagtaattccagtatataatcgcagcgactatttcctcgaatgtctggcaagcgtgttggtgcaatggtctggtgcagaaaacatggaaattctagtgatggataatgccagtacagtgcccttgttcgagttagtgaacagtattggaggaggagtaattcgctactaccgccatccgcaaaatctcggtgcagccggaaattacaattctgggattgccttgagtcgtggtcgatgggtgcatgtcctccacgatgatgattgtgttttccctggtttttataccagtctccagaaaagtctggaaaaatgcccagattccgttggggttgcttgtacaggatttgaatatttcaacgaaaaagggaaacaattaacactggggaagtcgtttccttgtacggagaacataggggtatcatgcagcattggttgtcccgcatcggcgtatgcggtttagttactatcccctgcaatggttgtacgtcgaactactcatgaacggctggggggatattaccctaatatttctggaattgatgactgggaactgtttaaacgttattcctcttttttatgattggtggtatgaaccaggaattttagcccgttaccggagcatacccaaaaaatgacacctgaaaattggctttctgaaagctagctaaattaatccgtcgtgcgattgagatttgatacctatcttccgattgagcagcgagcagagattacagccaaagcccgcattcagaactttaactattgtctgacaagggcagcaattcccctaaaggctggtaatctagcaggtgctttttgtgtactcaagaatctctcaaaattgattcctctccccaatccatagcaaagttattcgcatggttaactcaagaggaagcagaacccttacggcaggatatcgcctcaaggcttattttacaaaacatcgactgaactaacgtaacgttaagcagtagtgttaatgttaagctataaactacaaactacaatcaatgcttaggatttgaggacatgaaagtacttgtaactggaactgaaggatacatcggctcattactcgcccctctgttaatgcaagagggtcacgaagtaattggcgtagacactgggttttataaggtaggttggttgtacaatggtactaaattaacagccaaaaccctcaacaaagatattcgcaagattacagcagaagacctccaaggggtagaagcagtcgttcacatggcggaactttccaacgaccccttggccagttagcgcctaatattacatatgatattaaccataaaggctcaatccgtttggcggagctagctaaggctgctggagtgcgtcgctttatctacacctcttcctgtagcgtgtatggttttgccagtcaagactacgttaacgaagagtctgccatcaatcctcaaactgcttatgccaaatgtaaaggacttgtggaacaagatgttaaactgctagctgatgatggcttttctcccacttttttgcggaatgccaccgcctatggagcttctcccagaatgcgctttgatattgtcttaaataacttagcagcttgggcttggacaattaaagaaatcaagatgactagcgatggtacaccttggcgtcctttagtccacctgttggatatctgcaaagctattctctgtaccttggaagcaccaagggacatagttcataaccaaatctttaacgttggcgacactcatagtaactatcaagtcaaagaaattgcccaaatcgtagcagatgtgtttacgggttgtcaactaagctttggtaagcatgacccagataaccgcagctatcgggtttctttttgagaagattaaccagaacttaccaggatttaaatgtgattgaatgctgaaagtggtgctaggcaattcttgaatatattcaagcaaattgacatgaccaaagaaacatttgaatttagaggatttactcgtctcaaacaactagagtatctccttcgtacccagcaaattgaccaagattttttctggtatcaataatatcaatttcattaaatattgctacactggctttgtgcctaggagtcaggagtcaggagtcaggagttaggagtcaggagtcaggagtcaggagggaagaatttataatatttatttttgatgagagtaaaactgttccatgattaactaaaatgccattaaatgggtatttcgggatagtaaatcttaaaaatacccttttctctccccacccctccccatctccctatcaaaaaaggtttgaggagttcctgataagggatagcttgaaaaagggtgattatatcatgtccggataataacagatcaaaagttttgtttgtaggttttagccaaaatcatagatagggctaaagccctactacatgcttttaattataactataatataatttttcatatttaacaatgcaagaacatcaaaataacaaaatttacatcaaggcaactgtctattttgtggcacagaattacgtcacacattcgtagatttgggaatgtctccccctgcgaaagctatcgcaaaccggaacagcataatgagatggaggcattttatcctttacatgcttatgtttgtgaggaatgctttttagttcagttgcaagagtatattactcctgaaaatatctttagcgactatgcctatttttcctcctactcctgatagctggttgcaacacgccaaaaaactatgttaatctggtaacagaacgtttccaattaaatgaccaaagtcaggtagtggaaattgctagtaacgatggttatctattgcaatattttgttgccaaaggtatccctacattgggaatagaacccgcgcagcaaacattgccaaggtagcagttgaaaaaggtattcctacagttgtcaagttctttggggaggacacagctagagaacaagttgagaagggaataagcgctgatttattgttaggtaacaacgtccttgctcatactccctatcttaatgattttgtcaaaggatgaaaatcatcctcaaaccgcagggggtaattacaatggaatttccccatttgatgcggttaatggcagaaaatcagtttgacactatctaccacgaacacttctcttatttctctttcattaccgtagaaaaagtttttgccactcacggtttaactatttttgatgtggaagaattacccactcatggcggttctttagaatttatgctcgtcatacagaaaatacttctcaagcagtgagtgaaaagtattagaactgagagcgagaagaagcggctggttttacaaacttagaaacatatttttcctttggggaacaagtcaaaagaaaccaaacgtaaattgcttgatttcttaagtaaagctaaacgcgaaggaaaatcaatagttggttatggtgctcctggaaaaggaaatactctcttaaattactgtggtatccgcactgattttcttgactatacagtgaatcgtagtccttacaaacaaggtctatttttaccaggaactcatattccaatttttcatcctgacaaaatccaagaaactaaaccagactatgtgttaattttaccctggaatttgcaggaagaaatcatgaaacaaatggcttatattcgggattggggtggtcaatttgttgtcccaattccggaagtaaaagtttacccttaattcagaaataccctgaatttgagtagaggtaatcctcttccaaaagagaaaaggttgtttccttaattgaatatataaaagtggaatagcctaatcaaaatttgcttaattaatagtttaaaaaaggaaaataaaaaatgaaagtagttctattttgtggcggttttggaaccagaatgagagaatattcagacagcattcccaagccgatggtgaatattggttatcgacctatattatggcatgtaatgaaatactatgcacactatggtcataaagattttatcttatgcttgggttacaaagctgacatgattaagagctattttttaaattataatgagtggctctctaataattttactctctcaaatggcggtcaaatgcaactctttaatcgagatatccaagattggaaaataacctttgtagatacaggtttaactgccaatattggtcaaagattcaaggcaattgaaccatatctagaaggagaagaagtattcctagctaactatagtgatggcttgacagacttacatctgccaatacacatattgataattttataagcgtgataaaattgccagtttttatgtgttaaaccaagtcaaagctttcacttagtttgacatggatgaacaaggtttggtgaaagatttcaaggatgtcacccagcgcgatatttggattaatggcggatatttcatctttaagaaagagatatttaaatatattaatcaagggaagaacttgtccttaagccttttgaaagattgattgctaaagagcaactttttgcttacaagtatacaggcttttcggagttatggatacttttaaagagaagcaacaattggatgatatgtatgctcgtggtgaaagaccttgggaagtatggagagataaagaattagaggtctcccatgtatgatggaaattaaatttaacaaaacagaagaatctgagtacaaaattctctgttttggtgcccattgcgatgatattgaaatcggctgtggaggtacagttttaaaactaattgaaaaatacaataacatcaccgtatattgggtagttttagctctaatgagcaaagagcgcagggaagccactgaaagtgccaatatcttcttaaaagaagtatcggcaaagaaaattatcattaaaaatttccgagatggctttctgcctttccatggtatagagttgaaagaatgctttgaacaattaaagcaagaattttcaccagatttgattttcactcattaccgtgacgaccgtcaccaagaccatcgcttaatttctgatttaacctggaatacttttagaaatcatttaattttggaatacgaaattctaaatatgatggcgatttaggaattcccaatttttttgtgcatctggatgatatactctgtcgccgaaaaatccagtacattctcgatgcctttcaaagccagaataataagcaatggtttaccgaagaaacttttcgttcaattctcagaattaggggtattgagtctaattcaccaagtaaatatgctgaagcattttatggtataaaatagtttttaatcaattcagatgatattcgcagaaactaagctacgaggcgcatttattattgacttagataaaaaagaggatagtcgaggttttttttttgctcgtactttttgcgtcaatgaatttgaagctcatggattgaaacctacagttgttcaatgtaacctttcttttaacaagaaaaaggaactatgcgaggtatgcactatcaaaaacatccctccacagaaacaaagttagttcgctgtatccgaggggctatctatgatgtaattattgacttacgtccagaatctcctacatacttatcccatataggagtcgaattaacatctgaaaatcaccgtgctctctatgtaccggataactttgcccacggtttccaaaccctagctgatgagactgaagtactataccaaatgggtgatttctatgccccagaatatgcctccggttatcgttatgacgactcagcttttagtattaaattgcctctacctgtgagtgaaatttctgataaagatttagcttggtcatcatttacaaattctaataactctcaatagaatataacagtaactacataattattaagagcaacaatagttaactaaaaaaccttttcaaacctttttaaagctgctaatatatagttagtaaattttgataaggtatgaagaagtatgtcacgccgaaagaggcagcagcatattacggtgtcaacatcagcactctcagacgatgggataatgaaggaaagcttgacagcatcagaactccaggaaaccagcgacgattctgcattgatgaagaacatccccaaaagtaagccagttatcgcttatgcaagagtctctagtcatagccaacgagatgaccttgagcgacaaattgaattttacgcgcaaagtaccccaacgctgaacttgtttcagaaattggaagtggactcaattttaaacggcgtaaattcctcaaaatattggaacgcatatgtaaaagtgatatctcaacacttgtcgtcgcttatgccgatagagcagtccgatttggattcccacttattgaatggttgtgtcagcaaaatggggtcaagctcttggttctcaaccagagaaacttatctccagaagcagaactcgttgaagatatcttgtccattctccattgcttcagtgcaaggctttacggattgcggaaataccacgaatcagtcagcaaagcgattcaagacaaagcctcggaaccagactcgaagttgacacccaacagtgtcaggaaactcagggtgtttccatctgatgcactgcacaaagtctggaaacgttggctgagtgcctaccgttggatatataactggacgattgcccaactcagagacggtagcaaagcaagtgcttacgatttgcaaaagttagctcgcgatgccgaacgtccagactgggttaaagagttgcctgggcatcaattacaagaagcagtcgctgatgcagtagatggtcacaaacaagctatagctaataatggtatagcaaagtttaaatcttgccgtcaaccgtctcaagtaatcaagttcaaagttgataactacaagaaaaaccactggtatcctaccaaggtgaaggggttgacctatcattcaccagaaggttttcctgctgaatgtagttatggtactcaattggtttttgagcgtggaaaatggtatgggatttttccagaatataagcaaccctatcccacaaagcaatcaaaagttattgctcttgaccctggagtgcgtacttttatcactggatatgatggggaaaaaaattgtggaatttggcaatagagatatgggaaaattcaaaggttgtgttcccatttagataatttaatgagtcgcattgacttaagcgtggctaaacgtcaacgacgagcaatgcgtaaagcaagttatcgcattaggaaaaaaattcaaagtctagttaaggatttgcacaataaagttgcacagtttttagtaaaagaatacaaagttatctttttgcctactttttctacatctgaaatggtagtcaagtctggtcgcaaactaaataaacggacggctcgaaatatgctctcatggagccattacaagtttcagcagcatttaatccagatggctaatagacataatgttttattagtattgtgtaatgaatcctatacttcaaaaacttgtcctgaatgcggtcatgttcacaagcaattaggtggaaataaaaagtttcaatgtccgcagtgcggatatactgcacaccgggattggaacggcgctcgtaatattatgctacgagctttgccggcaacagccatcactttaactggtgatgctatacagattcaaggtgaatagctttgagtaggttaaatgttgcacttcaaagaaagaattttgaaagtcgctgaggaatggctaaaatgagtacaatttttcgattctactattagtgatgatgtcagaagagagcatctctacaacggacatctattcgtctttttctccttgtcctagcgcgatagctctctgcgatcttgcccgtgaaatggcagaggaagcctttgctcctttagatcccagagaagctcaacacagtttacctgtggaagattttgttgcgattttagcgaagctcaagccagcatttatccaccatcccaaatcaaaaaaactcattcaggggatcttgcaagagagtggatgtgacttaaataaaacctactttgacgtaccaagactgagaacggcaacaagtgatggctatcttagcagtggtattgcttatgctttccatccccaccgtgatacttggtaatttgctcctcagtgccaaattaattggtggcttccagtttacgagattacatcagagaatggtatggcattccatccccgatattgagtcagctgtgaaaaaaatgggtcaagggactacaattatgtccagtggaataaagaaagtcgcaaaaatgctgcgaagcacattaaaacggatacacgcaagcaaccccatccagaagaacctctagagttagatccacaactacgattagtaacaaaagttggtgggatgattctattttcaggggcacagatgcattctactgtccccaacacttcggggtatactcgcttcagtatcgactttagaacggtacactttgatgacgcgatggctcaacggggcgctcctaatattgattctgcttgcacgggaacttccttgggcgacttcttgcggggcagtgacttctgctcaattccagagtctctggtgacattctatgacaacaaatcatttacagatgtaccaacttctcaaaaaattgcgatccctcattaaaactaaatctcaatcaaaagacaattcaatgactttagctaactttaacagtttaaataaacagtcttttgaacaatcgaagattttacaacaaaaagccattctctaattcctggtggctgccatacttacgctaaaggtgatgaccaactcccagaaaactcacctggctttattgtcaaaggtaaaggttgtcatgcatgggatgtggatggcaatgaatttatcgaatacggaatggggctacgtgctataactttgggacatgcttatccaactgtcgtagaagcagcttatcggcaaatgctgcttggcaataattttactagaccagcaaccattgaagtggaatgtgctgaggaactacttagttgggttcccgatgcagaaatggtgaaatttgccaaggatggctcaacagtgactaccgcagcaattacactggcaagagcttatacgggacgagatatggttgctatttgtggcgatcatcctttcttctcttacaatgactggtttattggcagtacgcctatgtctgctggtattccacaagtgattcaagatttgacggttaaattccattttaatgatattgaaagtgtgaaaactgtttttgctaaacatcctgggaagattgcttgtgtcattctagaaccagctaaatatgaagacccgtctaacgattttctccatgaggtacaaaaactctgtcaagaaaatggggcgattttcatcttggatgagatgattactggatttcgttggtctggtggaaacgcccaagtttactacggtgttgttcctgacttatcaacatttggcaaaggtatgggaaatggttttgctgtttctgcactggttggtaaacgagaactaatggagttaggcggaatttaccacgacaaagagcgcgtatttctactttctactacccatggagcagaaaaccatgccttagctgcatgatcgctactatgaaagttttccgacaagaaggtgtaatagaacatctttaccaaaaggagaaagattgcgcaaaaggattaatcaggcgatcgcacttcatgaacttcaagattacttccaggttattggcaaaccttgtaatttagtttatgcaacccgcgaccaaaataaacaagcatcccaggcatttagaactttatttctacaagaaactatcaaacgaggcttaataatgccttctcttgtggtgagtttttcccacagtaatcaagatattgacagtaccattgaagcagttgatgaatctttggaggtttatcgaaaagccttagaaaatggaatagaacagtatttaattggtcgtccagtcaaacctgtctttagaaaatattgttaaatagtgtagaaaatttggtcatatacaattataaatatgctgcaacagactcatccaccctatttgcaaaactctagccattcagagagaattggtcaagacctttatcaattaatctctgaactatatcctatctgtcgcagtattacaggaaatgggtttagagaaactctgaaaattatccaaaaacatattccattagaaatccatgaaataccaacaggaactcaagtatttgactggactgttccgaaagaatggaatattaaagatgcttacattaaaaactctcaaggggagaaaattgtagattttgctaattcaaatctacatattatgaactacagtattccagttcataaaaaagtatcttttgcagaacttaaagaacatttatttacaattccagaacatcccgattggattccctaccggacttctttctacaaagaaaggtggggattttgcttaactcacaaccaatatttagaattagagaatgaggaatatgaagtttacattgattcctccctcgaaccaggtcatctcacctatggtgaatattttataccaggaaaaactacagacgaggtgttaatttcttgcccatggttgtcatccctccctttgtaatgataatctttcgggaatatcaattgctgtcttttagcaaaacattttagtcaaattacaccatactactcttatcggtttgtttttattcccggaaccattggttcaattacctggctatctgtaaatgaaaaaaaatgtttctaaaattcaacatggtttggtattaacttgtttgggagataatggtaatttgacttacaaaaaaagccgtcgtggtgacactgaaattgataatattgtctcttatgttcttaataatacggctgaagattataaaattatcgacttttttccccatggttatgatgagcgtcaatattgttcaccaggatttaatttagctgtagggtgttttatgcgatcacgtcatggcacttttcctgaatatcacacatcagcagataatttagactttgtacaaccccaatatctagctgattctttctctaaatgtatgtcgatattacagattctcgataataataaaatctacataaaccaaaacccaaaatgtgaaccgcaattgggaaaagaggtttatacaggacaattggtggtcaaaagatagtggattaaaagaaatgccaatcctgtgggtttgaatttatccgatggagaacatacattgttagatattgctaaaaggtcgggaatggcatttgatgagattaaaaagctgctgatgcattattggaaaaatggtttgctattagaaagtaatatcaagtaatatcatgtccggataagagcgtgataaaaaatttttgtttgtagtagggctttagcccgataatggatagatagggctaaaagcactactacgagctttaattataactattcaaccggacatgatcgggacttaagcaaaatatcaaattatacaccacttgtaggggcgattcgcgattaggggcgattcgcgaatcgcccctactagatatggtggttctgcgtaagtcctgatgatataacattaattaaccggaatgtagggacgtttcgctgcgcgacatgaaacgcatttttgttatgcaaaggtccctacgaggttggggaaagattctttattacagttattcaatgagacatgatataatatcaaattcgcttaattcggtatcaaaaaatgggtattgctgaatggtaatgatttttagattaagtatcaacgcaaaacataagtttttcaattttaccgaaaaataaaggtataaagcctctccttttaaggagaaaaaagaaataatatttcctgatattcaatcctctcggttttaaccagaggtaattatcaattatccattatcaattatccattaatgaacttcagctacttactattacatttcagcaatgccaaaaaatgttctatcttcaatcattgccaaatcttttctcaattctctcccctccttttggggtaaatggctatttgccctacaacatctaattaaaccaatgctatcggacttaatatcacatccataatgtctactttaaatgggatttcttcatcgaaatcataatcattttcccctggttgagattgacctaaatgttcctccgcagcttgaattttagcaaaaatagatgttccagaatcaggtcgttttttcatcagtatatcaattttgtatttagctttaattgcctctcgatattctttagaaatcggtttttccggccaattaaaatcagtagctttgacaattggtagtcgagaacctaatttttctattggcatttctggtaatcgcaggagaaaatattctcgcctacgtctaattttttctgctcgattttcaatttctgctaatacacctgctaactgactaggatgatgttccgaaatagccactataacttcaatatcatctaagggaatacctaaactttctgctttggctaaaaattcatcgggaatatgatttgtgactggaggatttaccgcagcagacatttctgccatagctttttttgatagtttctttagcagtttcaactgtttgattattaactttatttgtcggagcttcactgacaatatcttctaaatattgagtagcattggttaataatttaattgctttttaaatgttcataatccattttgaataatttttattcagtaaaaagttgatacaatttctagaggcatggctataaaatttagaggttaaagatagtattctgtcattgcgactggaacggagtagcaggaattcattaattgataattgataatggataattgataattacctctggttaaaaccgctacggaattgaagattgggaaatatcatttcttctcttggtctattggatatggcggacttcggagcggctctgttaagagcgggaaacccgctcctacggacccgctgcctcttacagaggagctgcgctaacgctaacgccatcccatcctaaggtcatgctgcgcaaacgaccgctctcttggtcgattggatatggcgaggtttcctcgccatcccatcctaacggactgctccgcaaacgaccgcttttttcctcttaaaagggaggctttgaaacccgaattatttaattattaataattaattaataattcggcaatctcatcaacttctaggaacattttatatgaataaagccgaaaactcatactatacgaatcctatttcagttgtaatattttggtggtagttaggagtcaggagtcataattttaaaagttttccgttaatattaagtattctaaaaaattttcacaaattatttaggattgctatataagtcatagtataattaggtattcaagttaggagattggtataaggcgaaaacctgttctacttatcctatcatttcaacttaaacaaaatggaaagaagcaatcttcttaatctcctttaggatctatttttattaggagtggaaatgtcattgcgacttaaacagagtgaaaggaaacaatctcatcaactggtatccattttattattcaagaggttctaactcttgcgttgattgccatcctggttgccaaagagagcggtcttttagttgtttagcatttagccaaaatctcacacttgagtcacaggatgctaccatttccagcaaatacccattgaccttgatttttacgatttactacttgaaaatgtcgccatccccaagtttttgagttgccgtccatttagaaccaagaagataaggaaacttttgttttttttggcattttgtaatgaggaacaaggaaatataattctaagataagtctaaccccatttcattattttcatcaaaaccaagatgagaatatagaggtttgccttgaggggaagcatgaagaataactttagtacaactaatagacttgaggtaagtaatagcttcttccatcaattttttagcaattccttgacggcgataatctgcttcaacataaactccccaaatataaccctgttttcgatattccggcttgataatatttggatataaaccagcgaatatttgacagctaactgaaccaactattgtattatttctatcggcaataaaggcttgataaaatagttgctgccgagcgttatcaatatattcttttgtaatttctaaccagttagattgaatcgattcatcaggaacaccaatatcttgccacattagataaagatgtttggcaattagataattttcttgtaggtttgctactctaatattaatattttctagcattgaaactttggataattttagttcccaaacttattattatagaaatttaactttgggcttatatcctactacatttttggttaaaagtacctacttggatactagcctcacaattaactgttagaataacttagttttgttaaccttaacaatatacattaaagatgacagatatgactcagcaatatcagattggtttagttatctatccagatatgactcaacttgatataactggaccttttcaagtgttctcatttattcccaatgctcaggtactaatactttggaaaaacttagaacctgtccgcagtcataatggtttgacaattttgcctactctcactttcgagcaatgtccaaatttagatgttctttgtattcctggaggtccaggtcaaattgaaatgatgcaggatgaggaggttttacaattttacgagagcagggaaaaacagccaagtttgttacatcagtttgtacaggttctctcatattagctgctgctgaattactacagggttaccgagctgcttgccattgggcgtttcgcgaccagttagcaatgctaggagttgaagtaggaacagaacgagttgttattgaccgaaaccggattactggggtggagtaactgctggtattgattttggactagcggttgcaagtcagctttgtggggaagaaatggcgaaaacaattcaattgttgttggagtacaaccctgcaccaccttttgatgctggttctccagaagtagcaggagcagctttagttgaacaagtgaaagatttaggaaaaccaatgttagaggcatctttggcagcaactagaaaaactgctttagcaatgggatttgatgtatgaattttaattagggtttgctgattaaatctcaaaacttatacagtaaagatttaaggcatttttttatcagagaaagtaccagtttttgctctcgtgatctgcaaaaagtgaggattttaaacagacaacagcggaaaaattaagggataattgttccaactacattgcctaagttcaccatttctactgactactacaaagagtaaaaatactttaaatagtaaaaatactttttcagcaaaccctaattagtgtgactattaggtagttggttttagagcaattccaattaatcaatcatacttaaactgtctcccttctagccaatcctctttgaagagtagcaaattggggaggtctaaattgtgtacattacttaagttgacactagacctgctgcttgcaatgcttcccacactctgtttgaacacttttccggtgtcagagtagcgatcacaaccactgaattcctaaaggtccgacttctggatcgtcactactgagattgctgggtttcggttccctctacactgataaataatatttaaagcatgaagtagcttcccttctccttcaggaaaaaattttctctgctattgtcagcagtcgttctacttgaaaatctgtaattcctgtttcttcttttatctctcgtgctagtccttccattagggtctcttgtggttgtaaacctcctcctggtaagtcccaacaattaggctctgggtttgtcatttgatgtagcaacaacacttgatcgtctgcaacaaataatcctaatactgctactcttaatcttacttctgattgcatttttttctgaattaatctcaactcaatgtatttcccatactaaagattagggagaatactcaaatctgaattaggatttacctaaaaaacccagtttctacgataaatccttgatttgaaccatagacatctataaaacataaccgagtttgcttacttcgcgtcggtaagtcttgtgaatattaatgtccaattatcagcttatactcctccaaaaataaatataatacttttttatagttaatatcagtttgtcttttatattattattttaatgtagataattatttatagacaaattctatcatcaaaaaataaatgaaaaatgatttgtgataatataactcgtgataatagtcactaattaatattggttatttaggttatgtttaattttagaggatacagatacagatgggcaattgcatccaattaacctaactgagtaatccggtttttaccctattgatataccaaattaggggatgccactatctcaaattcaagcaataataaaagtgtagggagtgaaaataaaattacagctagggggtgtccataatggttaactttgattgcttctacattttactgacagctataatttacctgggactaatttatatggttttaagctggattccaaataaaattaagaaaattggctagaattgtgggattaatagggtatgggatcgaggtaaagacttttttttctgataaatgtgagaaaatagcgttggcggagcaagtgcggcagctatatcgcctcttaacccaaccctcttctgaagaggtggtttttctgagtcttttttgagaatactaagcaaagtatctaagttaaaatactgattattagattacttaatcgagtttggttcagcaattaacaattaacaattaccttttctgtttaagaagaagattgactaaaaggaaaattttttcttttctcttggtcgaggatggcgaggaaagccactcttgcaaagctgctccgcaattcaagtcgtcgagtcgccttcccatatcttttccgttcgcctagcgtttctgaaggaaaaggaaacggagacctcaaattacacacttgatgcatgacttccgtgtagcagcactaggatagcaactcccaggttttgaagattgcttccctggtcccaatgacaactgtttaagatttcttatgtgatatattatttaagttgtttgagaataaatacttaagctaaaaagatcaggaattcgcagatccgagtctattcaatagattaagcaagtagagaattatttttctgatttgatattactcttctaaaaccttagaagagtcttttaaatcaaggtgttctagattaatagtaaatttttcttatgagcaaaatattaataactgtaacaagggttgcttttttttggataaagggtattatgatacaagtatgaataaatgaaaaagcagttaacttgttttgaacaaagaatttgcaaggctaataactatttataaatccagataaatagctatctgacatcaggggaggaaagagaggaaaatggccaatgcaactacagcacaaacaaatatc

SEQ ID NO: 31 - DNA, 13563 bp, unidentified
  misc_feature 1..13563: note = Fanzor polypeptide
  source 1..13563: mol_type = other DNA
tatcttttattctgggaattcctcactgatttgaataacgttattttacgcgttatttcaattatgtgaaagattagaaatattcctgacattggattggatttggttattttagttgatacttcttcttatcaaagaactctcatgaatacgatacatattctaaaagaacatgtttaattggaattgattgtatgatcttatttaaataaacttatattttattttattttaattatgatcttgtattaagacttatatttattaatgtcaactacaatcagttactgttctacaacagttatttctctgtatcttaggtgcatgaaaagaaatggttttagtgtggcccatttgccctagtggtgtacttcaggagcggcaccctggtaacctcactaatgccatccccctcaaagtatttcgtgttaactattacatcaaccaaatatatattcactaattgtatttctctttcctcatcttatttttctcgttttatagccaactactacgttctcgtgttaccaaatattcgtaccactcccacagtcttcctgttcgctcgctatgacagcttgagggctataaataaaactctgttcatttattttttaaatgcctatcaaagcctttgtttgataacagttatagtcaagtaaaatttgagattttcgagagtttataactgctgttaaaaaaaactataagatgtattaatagccagttgaacagtagaatgattatgtctcaaaaaaaccttctcgaaataaaaagtaattttgccataggaaaacctaatgttgctataatcctgtatgtatatcagaaacgatattttcacatcctgtggagacactattgatgaatgtccttaaacaaatacaccagaatgcgttttttgatgaaaggatgggttctccacatacttgtacatattataaaaaaccttccttggatccctgtttgattcacacttcattaaaaaaaagctatctttttatgagttagctttattggtcaattgtcaaatatatgttatgggagtattacaataaaaataatagtacctactatgtatacaatttcctactaagcttaacagtcacctacttaaaaccataaaatctattattttaacaacaattttgtaatatcttcatttctttccatataatatgtcccttacgcgtatcccaatttacccaaatgctgaagccttcataaagctaaaaaagcaatatatatacgaaaagcaacaacagcaagaagaagaagaagcggcagcagcacgcagtaattttagaggtcaagttaaagaaaaaaaggtaatgtgaactatgtgccaataatgaaacagaagaactcaagttttagaaggcgtaaaatggaaggatacagcggaagaaaagattaacaaaagatcagccaaactggcgcgtaattcccgtgttgtaacaacagacgtattgtgtaaatcttgtggtgaaagcgggcattcatctgcgagaagcaagcaatgcaaaaaccataattacacaatacaagaagtaattgaaaaaaagatcggcctcaattatcaaagatacactatatccgtaccacttcgatcttttctccctataccagatgatgcgtttaataataccctgaaaaaaatcaagagtttgtcgatgttccttagaaatgtgatgtatagggcacagctctttatcaaccactatatccttaaatacccagatggcttgccgaatgaattttttcaacaaaacttttggtattctttatgtcgattaataaatgaaaatatttcaattgatgtcttcaagcaaaagtattcttcccatattccttatcttgaagaagtatggaatgaactcagcggccttgaaggtgtcagtatggtagtaaataaagaaggtcttaccaactatggccaagatttatcgaccgcatgcgaaagtgttgcaacatgttacaacaatttttacatagaaaactttggaaatgttgttaatagctactgcatatacatgattcgtaaagaatttccggtaaatgaaaatttgaaatagacctttttttttctacaacgattgatactatcaattcataggacttgaagatgcctttgatcaaatacattgtatacaatcatgtattagagatcttgtttagcaccccatcatcaactttacctgaaaacattggaagttctgtagataaacagacccaagacaaaattcgaaactttctaaacccgttgattttagaaatcaaagaccgcttaccaccagctcctatcacaaaagagacattaaataacgcccctttcaacataatgcctgtttttagacatatattatcaaaatacgaatcaataattgacgcgaaccaacaaataacacccgtagttcaactaacagtggcttcacaacaacagcctaacttattacagcaagcagagggttcaaaccagccacgacagaggcccaaaaaaaagaaaaaagtattaaaaaatgaaaacccaagggagcgtaataataaagatagacagttccaaccaccgagactgttcagtttatttccgaatccaagcttaaaatggcggttcatcaaaattgatagtcaaaacctacaaggtatttttggaagaagaacccatcaacaacaggaagagactccttttgatttaacccaaaggtctttctttgaatgttttgacttcaaaaagttgaaaattaaaaggtaagctatgtaaaacgttctatgaatagtatgcatacttattttcaacatgaatagtctggtagaactacaatcaatgcatgaaaaaggcaggatgttcttaaacagcttctataccgatggttatacctgtagagtctccttttgtagaaaaagatatatcaactcacatttggataaagtcacactcacgctaaatgacttcaatagcgagagggttgagcagctatttcgaacttgcacagtagatcctaaccggaaggacgttttcacatcttaccatggagcaaatgatataaggcgtctctctagctctgaataccataatatgaacggagttgtcaatcgtcaaaaactagagcaagaacgaaagaagagagacaatattgaacatattgaaacaagaatcccttcacccaaaacaactaatgctgaaaactataaaaaacacataatgtatatgctccagcactttggaactttagtaaacttttacgattttcaaactgctagaatacggtggtcaaactatatagggaatcgaaaagctacagatcatgccatcaatattctgctaaacggttctacaaaatacaacaaaagcaggagaaaaaaaaccagacgaaacaaacgtaaaagaagaaaaacgaatagcaaatacgaacgagacctatcaaatactaagcactcaaaaaaagggaaacaagtgatgaggtacaacttacatttttatttttattttttatctagaagcattgatctttttattttttataggactcacaaagaaaggtttgaagaaggagacagaaaaaagatgccaatgattgtatttggaaatggattgcaaaacaaatctcatgtcaaatacaaaggattgaggcgcgggatgactgataagttgtacaaacagctgaaattgcgtgaaaaatcgggtgaattgctactgcttgacatcgacgagtttaatacgtcaaaggtgaaataaatatatgctcattttgcacaagtattaataacgcatcacttcttttgtagatatgcaatgaatgtttcacgaaaaacttggagaatttgaagtgtgatggtcgtaaaatccatcaggtattcaactgcaaaaattgcaatatcttttggaaccgagacgtcctggcatcaaaaaatatgttcaccattgctacctctatttggagcggcaatggatgtcccaatgtctttcaaagacaaagcgccacctccaatgtggttgcctcgactcactccggtgagtcgacggcttaaagatgactgcaggtaagaagtcttcataaagaaaaaaaaaaaagacaattctgatttccatataaaataggtaaacaaacttttaagctacagttgtgattcgtccaaaaaaaaactaacattttctaaacccataatattttttgtctcaactctatttttatttcatccaaaaagggtaagcaaagcgtctaacttaagtttttgatccgtctgaaaaaaaactgacatcatctgattttagactaaaatcctgtatgcatagatgtgatttatcataagacaatgaaggccatccaattgaatcaagtatcaattttgacccattcattcagcaactgagctatgaagacatccctatcactgcaatgaagaatcgacaattaaagatcatgttcagctttagcacaaattcacaaatcacaaatataaacaatagcaactggaaagcttttattaggagtcccatgcatcatatttccagaaatgtatggtacagacttcttcatagcaaattatccacccgatccaacttgcatagtcttatcccaacacttgtagaagatgaatcttgtcaactgtgtaaacttccagaaacagaacagcatatgctctttacttgcatacagaaacaagacatatggcaagcagttttcaagaaatacttatctaaccctaaagatcctcactgcagctcaatattccaggatttatctacacttaggctttccaagtattacatcctgcactaccatgacaagtttacaatatatgatttttttgccacagttattcgattcatttggaaagctcactggcaacaattctttgaacagacgcctattttggaagagattgtcatcaatcaaacccaaaaagaactattgaaactatctgcttacaattccttatgctaatatcttctgtattttcgtgacaagtcactgttttatacacttgcttcacatttaatcatctactctgatgagttttaataaacattaaaattttcatccataaaaaaaaaaaaatgtgatttatcataaaaaaagaaaaaaaagaaaatacatgtgatttattactatcttttgtattttcgcgacaagtcactgtttaatacacttgtatcgctcttaatctttatcttctgatgagttttaataaatattgaaattctcatccataaaaaaaaaaatacatgattttattggactatgtacagaataaggtatttaatgcggataataactggaaggtggatgggaaaatctcttgttgacttcatcttcagtaagttttcttgttacaaatgaaatgtcactcattgttctctgagagtattgatttggatattgtcttcccattgttttaaatttgcgaacatgaatacacattacgagtaataagatcagtggcaaatagacgaataaactttcaagtagaatccatatagatatatgataatcatctcctgctccatagcgtatccagcccaataaacacatacccatcattgacattgagaacagtaaaggcacaatacgtaaaaagaatagatcatccctattttgacgaacgttaccaaaccttgagctcttccatattacaaagcaattaataatcgtaagaatccataaaattgtaatacagataggcattgccacgctttgtacggttgaagtagatatttgaataacaatacagcatacaataattatagcatagaccaacaaaacgattacgcttgtccaatagttccagggacgaagggaatgcctttcttgtgctcttgggaatccctccgacttttcagaatctcttaaatagatactacgccaacgttctcggttataaagcgcagcagctacgtgtcgaatgaataatatctgagcttccataattccaaggagcaccaagatggatatcacaggtaatacattcaacacaagacttttactggaccaatctgatgttaatgtgaatccataatgtgcgctaagcataacgattaatgctatacttgtcaagaggccaaaaaggacaaaaggaagtaataaaagattatgacaacagcgtgctgccaatatgatagaaagtacagcaaaaaatacagtataaattatccaagctacttcttgtgctgacaacatggataagaacagaaagaaaagaagaaactaaggaaaggatcatttgtttatgtaaaaaaaaaaaaaaagcaatgctaaaaaacagctttctaaaaacaatagttttggccaagcctatcttttttccttttctagtaaagttttttgctcttccgtttctaataataagctataactctatttttatttttgacatctgatttttaattggttaaaataaaaataattaaaattcgggccaagactaagaaaagttgatgtcatgtccatttaacgaactctggtttatactctaattcatcaacaaattaaatttgaccatcttaaatctttaagcagagaggaagaagtcgatgattttaaaagctttatacaccattttcagaaagtaaattcgcatttttacaaactttataatgcaatatatacaaaaagcgttaagtaaacgcaatatttattcctgaaaatagtgtatgttttaagaaaaataaatagatgaaatggctatttcggacagtgattgattgagattattttctgtggttttatttattataatgcacacatcaaagagtagaaatcttctaccaaacttattgtcaccttctacaatgagttacacggaaacaaatagaaaaataaaaggtataatttacttatgttgtaggtgaatatagttagatttcaggtcgattatactaaacctgctaaagttttttatttttaaaaaaaaaattaaggtaaatcaatttgaaatgccccaggagaatattatctagtaaaaaaaaataatgtctaaaatggacatattctagttactcgcgttttgtttttgcagtacatttagataaacttgtacaagttaagcagctgtaattctataaaagaagcatgtacactatttattgagataaaaaataaatgcgctaaggcaattttttttctttaaatttttcttatgaaataaacaggctttaacattgggaaatcaaagaatttgaaggttttggagcaatattcttttaatttcaagtctagaaagaactattctatagaccataatcaataacaataacaaaagcaatggtttgtgctacttttcacaaaggctttgaattgtttcagccacactgaatttgcatgactacagtatgctgaaagtgaaatcagcaacatgttcaactcttgatatcaaattattctaattatttgaacataatgtttagtaaataagcaacaaggtattataggtatagccgcttctaatttgtttgtagtattaaactcgaataaaattcacaaactataaaaaaaaatgactgcattattgtaaataaagctgttaatgttaatccattgacaatggagagaaaggcatatatagcaaatataaatgcttatttctagtgacatcagctttcttttggcagctaaatgtttttaataatagtaattgaaaagtgtataaaatacaaataaaaaaagctgtaacttgttagctataaagttttaataataatttactaatgcaaggatgataatttactgaagggaaagtcaaagcttcatacaatatatagatttgtacaaattggccataaattaatgcagggttttgaattatacaaaatgctctaagcgtcagggcatgcaacacaatcacaatcgtcttcttctaccatttgattttttaattctctttccataatttctacataatcgccaactttgccttgatatggttgtaatctaagttcgtcatgaacaatggccaagcatgtagacaaatatttgtgaatacggggaatatattctgtgatctctggtggcatcattatttgcactttagaaatattcaataacaactgccaagcgttaatcaaaactcgcatgtcaaaataacagtcagtcgaccttgaccgaagatatttaattaagcgaacagtattgaaggcggcatgaactcctgttataacaatatgcttctgaatgtgggattcatgtggtcctagaaatgattctaccattgcaaagtattcttcatcagtaccttcaaaatcaatcttagcacgaagttctaatatcttttgtattcttctcctccattttctgctgatatttgcattttttggaatatttccgccattccaatgcatttttaataatttccattcattttcaggttgcggaattgctttagggaggtaagactgtgccatgataagccattcttcataaataactagtgtagtcaaaacaggtataacgctgtgggagcattctctttctaatgtactataaaattcttgacagctaatcgttgaatcaaacaaaggaagggacagtctaaactcaagtggtaaaactttagtgtaccaatgtctcattgccatctccacctgatgtccaattagacccacaaggtgatacaaatcacttgaataagcacacttgctagctttatgttcagttctttgtagaagtaatatgtacgaatgcatttgggcaaaccacttttcctgaattgagtcatcttcagcaatttcccattttccttcttcagagtgagttagtgtacagtaaggtagatttgtttcatcttttttcatatctggaagttgggcccttgtaatttcttcaaatgtctgtacacgacgcaaatgattcaacaagcgactaaaatgaacagcttctcctttctcttgtaaaaaagttgcgccttttcttttcatcttgaatatagccacatatttcggctgtaagaccactgaaattcgttcggccatatcagtatacagtttgcccttttcaaactcagaaatagtgagtgtgtagactgccatgaaaacgtaagcagtaaagctttccaagttgaattgatcaaatgaggcttctaaagcatcacgagcccttttaaagtaaaattttccatattcaaccaaagaagcagaaggtagacatcctgcaatatgtttacatcgcagtgtacagatagtagcacaaagagccattgcagcagcggattctcttgtgtcgagaaagcatctaataaacgtggggacatggatagctaactgttgaaaatgttgacaacgcaaataagcttgtatcaacttattggtcgtaacttgtatattttcaggtgaacatgcagtgactattgtatttacacttgacattctcggtgcagtaaaaatacgtattgattttgcgacgtttttacattgagttttaccatactttttgcgaatcaacataacaagttggtcgactatattatcctgtttaatgcaattttttattactggaggaatgcttgatccgtactccacagactgcagcacacaataaagattattaaacagatccgaataattgttgatatgcgtatcaatgcaaaagtctccttttttcacattaagcacccacggttgtgtttctctctctcctttttttaaaattgcctgtgtgccattatctaaaacagcaatcagctttgaatgctgggcaggttggcttgaaaagctgagagcggttgaaggtgatgaagggaactcatcagtcatacttccatcactgtcattagttaaagaaggtgtactacttccttgattcttcatgcgtttcattgttttttccatgtttgctatttcaatttctaacgactccgcttgctttaagagttctgtttgtattgcaatctgaatgaactcttcatcaacaggagaatgcgagcttgagtatacacaatcgatatcaaacttgtagcatctggatcgtatacctttgataagtaaagattatttgaatgcctaaattttaactaacctttcacagggttttaaaccattgcatttccgtttctgatttcgacactctaaattatattttaagcattttaattttttgattaatgtcctaaggcttatctaccttcgcatggaactttcttcattgtcatgcttaaagaaaaaaattcccaaaaagtaaaataattaatccgttactgcgtgtttataaactgtttagcctttaagccaatttctcttacagaatatgggaaaactattttgccgggcttattttaagtagaatgaactgtgattttttatattttattcgttgttgttgttatgctcctaccttgatagttataaagagacttatcattcaatggaataacaaatttcgtcttgtgatgaaaggattatctgcttatggaaacccatcgtgtattcaatttgttacagtgcaaacatgttctataccaaaagttaaaaacactaattgaaaataatcaacaatattgactatatatagcttcaaaatatatctaccggtttttatcgtctatttgcaaggagaattgatgctttaaaatatcgaaaaataaagctggaaactcatacctttaagaatttaacaacttatattccaagataaaaatatgcatgaagtatgtttttttctttacttactagcaattaactccaaagctgaaatttgcttaatcttaatagcattctttattgatgacataaataatgttcaggttggtgatagaagagcaggagttatggtagtaactcttcaatttgcgcttttatttattcaaaattacagaaaaataataaatgcacaaacatgcataccttatccttttcaaaccaagaaacgaaactttttttcatcacttttttaatttataataataaaaaaaattattcataaaatgaaaaagagtaataaagatacggtaggaccaaatatacattatcattttttttagttataaatatccagagttcatgtacttttcactatgtagatattattgtatacatttcgaagctgactatgtactatatatattatgcagtaagctgtatattaagtattatgaagacctattcataatttaatacaagaacgtgctcctgtatcgactgtttgctataacgttaaataagtccaaatttgtacacagttatacagttcaataaaaaaaataattatttgttattctgcaatgagctgctttatcaagtcagagaggatagagaaagaagagaaccggacagaaactaagaagcttgaatagtcaactaaaagaggacagtagagggtggcgttaaggatttgaagttatgaactgcaaataggacttaaaatagctgataagcaagaacgaaacaaagataagtaaagataggaatagacgtacagtctaatagagagaatgatacttgataattgactgatactttattaataactacaggtgtgtatttatacaaaagtcagaaacgcaatttgacaaaagaatgaactcagattattgagttttcagttaaaggatgttaagagactttaatgttattttcgagtttatatttaattctgatcaatgagtgatcttgccaaagtagtgaaaaccaaacaagtcagaagttatagaactttttagatagaagaaagaaagatgtcctttattaagtgtgttttttgtgtctatttatacactacctcaaaaaattgatcattttgaaccgccttttgctcattttgtaaattaactgcttcatattatttaggctagggggttttaggtaaaaggtagtataacaacaaagataaagaaatactgtgagggtatttctgggaagtcacagtctgactcagtctccagatttatcgtttttgggcgggattgagaatagtaaggaatttttttttttttttatggatgaacattttaatgtttattaaaactcatcaaagagtataaggattaagagcgatacaagtgtattaaacagtgacttgtcgcgaaaatactgtggtatttacacatgtaataaagtaataatgtaagttactacgaacaatggtcctccaaattaggaatatcggacattgtattacgccacttccaataaaatcccgatccactccagaatattctaataagttcctgatcaggattaataattacttcttgataagaagatgttaaactatgccaatcacataaataactcatcgtctaatatcgattaataatcaatacgcatacactgtaagtattattatttagccgtgattagaaaagtataaatacactcatatttttaacttgaataaaggacaatctactttgagtctcacttatttttatatttgttgattgacttagtactttttatattataaaacctcaaatatcacaaatacaaaagaaattagcatagagaagtgtgagcagatagtttcaatagctccttctggatttgattgatgacaatctcatccacgacaggagtctgttcaaataattgttgccagtgggctttccaaatgaagcgaatgactgtagcaaaaaaatcatagattgtaaacttgtcatgatagtgtaagatgtaatacttggataatctaagtgtggataaatcctcgaatattgagctacagttgggatctttaggatttgacaagtatttcttgaaggctgcgttccacaagtcttgtttttgaatacaagtcaagagcatatgctgctctgtttctggtagcttgcacaattggcagtagtcgtcatctacctttgctgggatgattctatgtaaattggcgcgagtggataattttttacgaagaagtctgtaccatagattcctaggaatatggtgcatagggctactgataaaagctttccaattgttatgacttatatttgtgatttgtgagtttgagttgaagctaaacattgtctttagttgacgattcttcaatgctgttatattgatatcttcatagctcatctgttgaatgagtgggtcaaagttgatatttggttcagttggatggtcttcattgtccaattcaagatcttgctgttcagctgataataaagatgcaaaatacggcttgaagataaggtttccagtaaggacagcatttttgattttttgtagaatattgggagagccacaatgttgtctgcttttgaactgtataccatttaaaaggaaatcttgttcaaagaaatgatatgctttttgtgcttgaagaaacttgctaaacttgaatttttcttgagggtcttcttcgcatatatctttgaagggaatgagcagactagtttgtaatgatattgtcaagtcattttctgtaggtgaacgaggacaggagtccaaagcactaaacatggggattattggatggaggcctttcatgttgccgtataatctagaatgtttgaatatcaaagggatgacgtgtgagggagcatcaaaggaagattgcagagtaaatatcaacatcttgtacaggaagtctggtatcctttgacgacagtttaacagcaatggattgatatatcgaa

SEQ ID NO: 32 - DNA, 12516 bp, unidentified
  misc_feature 1..12516: note = Fanzor polypeptide
  source 1..12516: mol_type = other DNA
tatcttttattctgggaattcctcactgatttgaataacgttattttacgcgttatttcaattatgtgaaagattagaaatattcctgacattggattggatttggttattttagttgatacttcttcttatcaaagaactctcatgaatacgatacatattctaaaagaacatgtttaattggaattgattgtatgatcttatttaaataaacttatattttattttattttaattatgatcttgtattaagacttatatttattaatgtcaactacaatcagttactgttctacaacagttatttctctgtatcttaggtgcatgaaaagaaatggttttagtgtggcccatttgccctagtggtgtacttcaggagcggcaccctggtaacctcactaatgccatccccctcaaagtatttcgtgttaactattacatcaaccaaatatatattcactaattgtatttctctttcctcatcttatttttctcgttttatagccaactactacgttctcgtgttaccaaatattcgtaccactcccacagtcttcctgttcgctcgctatgacagcttgagggctataaataaaactctgttcatttattttttaaatgcctatcaaagcctttgtttgataacagttatagtcaagtaaaatttgagattttcgagagtttataactgctgttaaaaaaaactataagatgtattaatagccagttgaacagtagaatgattatgtctcaaaaaaaccttctcgaaataaaaagtaattttgccataggaaaacctaatgttgctataatcctgtatgtatatcagaaacgatattttcacatcctgtggagacactattgatgaatgtccttaaacaaatacaccagaatgcgttttttgatgaaaggatgggttctccacatacttgtacatattataaaaaaccttccttggatccctgtttgattcacacttcattaaaaaaaagctatctttttatgagttagctttattggtcaattgtcaaatatatgttatgggagtattacaataaaaataatagtacctactatgtatacaatttcctactaagcttaacagtcacctacttaaaaccataaaatctattattttaacaacaattttgtaatatcttcatttctttccatataatatgtcccttacgcgtatcccaatttacccaaatgctgaagccttcataaagctaaaaaagcaatatatatacgaaaagcaacaacagcaagaagaagaagaagcggcagcagcacgcagtaattttagaggtcaagttaaagaaaaaaaggtaatgtgaactatgtgccaataatgaaacagaagaactcaagttttagaaggcgtaaaatggaaggatacagcggaagaaaagattaacaaaagatcagccaaactggcgcgtaattcccgtgttgtaacaacagacgtattgtgtaaatcttgtggtgaaagcgggcattcatctgcgagaagcaagcaatgcaaaaaccataattacacaatacaagaagtaattgaaaaaaagatcggcctcaattatcaaagatacactatatccgtaccacttcgatcttttctccctataccagatgatgcgtttaataataccctgaaaaaaatcaagagtttgtcgatgttccttagaaatgtgatgtatagggcacagctctttatcaaccactatatccttaaatacccagatggcttgccgaatgaattttttcaacaaaacttttggtattctttatgtcgattaataaatgaaaatatttcaattgatgtcttcaagcaaaagtattcttcccatattccttatcttgaagaagtatggaatgaactcagcggccttgaaggtgtcagtatggtagtaaataaagaaggtcttaccaactatggccaagatttatcgaccgcatgcgaaagtgttgcaacatgttacaacaatttttacatagaaaactttggaaatgttgttaatagctactgcatatacatgattcgtaaagaatttccggtaaatgaaaatttgaaatagacctttttttttctacaacgattgatactatcaattcataggacttgaagatgcctttgatcaaatacattgtatacaatcatgtattagagatcttgtttagcaccccatcatcaactttacctgaaaacattggaagttctgtagataaacagacccaagacaaaattcgaaactttctaaacccgttgattttagaaatcaaagaccgcttaccaccagctcctatcacaaaagagacattaaataacgcccctttcaacataatgcctgtttttagacatatattatcaaaatacgaatcaataattgacgcgaaccaacaaataacacccgtagttcaactaacagtggcttcacaacaacagcctaacttattacagcaagcagagggttcaaaccagccacgacagaggcccaaaaaaaagaaaaaagtattaaaaaatgaaaacccaagggagcgtaataataaagatagacagttccaaccaccgagactgttcagtttatttccgaatccaagcttaaaatggcggttcatcaaaattgatagtcaaaacctacaaggtatttttggaagaagaacccatcaacaacaggaagagactccttttgatttaacccaaaggtctttctttgaatgttttgacttcaaaaagttgaaaattaaaaggtaagctatgtaaaacgttctatgaatagtatgcatacttattttcaacatgaatagtctggtagaactacaatcaatgcatgaaaaaggcaggatgttcttaaacagcttctataccgatggttatacctgtagagtctccttttgtagaaaaagatatatcaactcacatttggataaagtcacactcacgctaaatgacttcaatagcgagagggttgagcagctatttcgaacttgcacagtagatcctaaccggaaggacgttttcacatcttaccatggagcaaatgatataaggcgtctctctagctctgaataccataatatgaacggagttgtcaatcgtcaaaaactagagcaagaacgaaagaagagagacaatattgaacatattgaaacaagaatcccttcacccaaaacaactaatgctgaaaactataaaaaacacataatgtatatgctccagcactttggaactttagtaaacttttacgattttcaaactgctagaatacggtggtcaaactatatagggaatcgaaaagctacagatcatgccatcaatattctgctaaacggttctacaaaatacaacaaaagcaggagaaaaaaaaccagacgaaacaaacgtaaaagaagaaaaacgaatagcaaatacgaacgagacctatcaaatactaagcactcaaaaaaagggaaacaagtgatgaggtacaacttacatttttatttttattttttatctagaagcattgatctttttattttttataggactcacaaagaaaggtttgaagaaggagacagaaaaaagatgccaatgattgtatttggaaatggattgcaaaacaaatctcatgtcaaatacaaaggattgaggcgcgggatgactgataagttgtacaaacagctgaaattgcgtgaaaaatcgggtgaattgctactgcttgacatcgacgagtttaatacgtcaaaggtgaaataaatatatgctcattttgcacaagtattaataacgcatcacttcttttgtagatatgcaatgaatgtttcacgaaaaacttggagaatttgaagtgtgatggtcgtaaaatccatcaggtattcaactgcaaaaattgcaatatcttttggaaccgagacgtcctggcatcaaaaaatatgttcaccattgctacctctatttggagcggcaatggatgtcccaatgtctttcaaagacaaagcgccacctccaatgtggttgcctcgactcactccggtgagtcgacggcttaaagatgactgcaggtaagaagtcttcataaagaaaaaaaaaaaagacaattctgatttccatataaaataggtaaacaaacttttaagctacagttgtgattcgtccaaaaaaaaactaacattttctaaacccataatattttttgtctcaactctatttttatttcatccaaaaagggtaagcaaagcgtctaacttaagtttttgatccgtctgaaaaaaaactgacatcatctgattttagactaaaatcctgtatgcatagatgtgatttatcataagacaatgaaggccatccaattgaatcaagtatcaattttgacccattcattcagcaactgagctatgaagacatccctatcactgcaatgaagaatcgacaattaaagatcatgttcagctttagcacaaattcacaaatcacaaatataaacaatagcaactggaaagcttttattaggagtcccatgcatcatatttccagaaatgtatggtacagacttcttcatagcaaattatccacccgatccaacttgcatagtcttatcccaacacttgtagaagatgaatcttgtcaactgtgtaaacttccagaaacagaacagcatatgctctttacttgcatacagaaacaagacatatggcaagcagttttcaagaaatacttatctaaccctaaagatcctcactgcagctcaatattccaggatttatctacacttaggctttccaagtattacatcctgcactaccatgacaagtttacaatatatgatttttttgccacagttattcgattcatttggaaagctcactggcaacaattctttgaacagacgcctattttggaagagattgtcatcaatcaaacccaaaaagaactattgaaactatctgcttacaattccttatgctaatatcttctgtattttcgtgacaagtcactgttttatacacttgcttcacatttaatcatctactctgatgagttttaataaacattaaaattttcatccataaaaaaaaaaaaatgtgatttatcataaaaaaagaaaaaaaagaaaatacatgtgatttattactatcttttgtattttcgcgacaagtcactgtttaatacacttgtatcgctcttaatctttatcttctgatgagttttaataaatattgaaattctcatccataaaaaaaaaaatacatgattttattggactatgtacagaataaggtatttaatgcggataataactggaaggtggatgggaaaatctcttgttgacttcatcttcagtaagttttcttgttacaaatgaaatgtcactcattgttctctgagagtattgatttggatattgtcttcccattgttttaaatttgcgaacatgaatacacattacgagtaataagatcagtggcaaatagacgaataaactttcaagtagaatccatatagatatatgataatcatctcctgctccatagcgtatccagcccaataaacacatacccatcattgacattgagaacagtaaaggcacaatacgtaaaaagaatagatcatccctattttgacgaacgttaccaaaccttgagctcttccatattacaaagcaattaataatcgtaagaatccataaaattgtaatacagataggcattgccacgctttgtacggttgaagtagatatttgaataacaatacagcatacaataattatagcatagaccaacaaaacgattacgcttgtccaatagttccagggacgaagggaatgcctttcttgtgctcttgggaatccctccgacttttcagaatctcttaaatagatactacgccaacgttctcggttataaagcgcagcagctacgtgtcgaatgaataatatctgagcttccataattccaaggagcaccaagatggatatcacaggtaatacattcaacacaagacttttactggaccaatctgatgttaatgtgaatccataatgtgcgctaagcataacgattaatgctatacttgtcaagaggccaaaaaggacaaaaggaagtaataaaagattatgacaacagcgtgctgccaatatgatagaaagtacagcaaaaaatacagtataaattatccaagctacttcttgtgctgacaacatggataagaacagaaagaaaagaagaaactaaggaaaggatcatttgtttatgtaaaaaaaaaaaaaaagcaatgctaaaaaacagctttctaaaaacaatagttttggccaagcctatcttttttccttttctagtaaagttttttgctcttccgtttctaataataagctataactctatttttatttttgacatctgatttttaattggttaaaataaaaataattaaaattcgggccaagactaagaaaagttgatgtcatgtccatttaacgaactctggtttatactctaattcatcaacaaattaaatttgaccatcttaaatctttaagcagagaggaagaagtcgatgattttaaaagctttatacaccattttcagaaagtaaattcgcatttttacaaactttataatgcaatatatacaaaaagcgttaagtaaacgcaatatttattcctgaaaatagtgtatgttttaagaaaaataaatagatgaaatggctatttcggacagtgattgattgagattattttctgtggttttatttattataatgcacacatcaaagagtagaaatcttctaccaaacttattgtcaccttctacaatgagttacacggaaacaaatagaaaaataaaaggtataatttacttatgttgtaggtgaatatagttagatttcaggtcgattatactaaacctgctaaagttttttatttttaaaaaaaaaattaaggtaaatcaatttgaaatgccccaggagaatattatctagtaaaaaaaaataatgtctaaaatggacatattctagttactcgcgttttgtttttgcagtacatttagataaacttgtacaagttaagcagctgtaattctataaaagaagcatgtacactatttattgagataaaaaataaatgcgctaaggcaattttttttctttaaatttttcttatgaaataaacaggctttaacattgggaaatcaaagaatttgaaggttttggagcaatattcttttaatttcaagtctagaaagaactattctatagaccataatcaataacaataacaaaagcaatggtttgtgctacttttcacaaaggctttgaattgtttcagccacactgaatttgcatgactacagtatgctgaaagtgaaatcagcaacatgttcaactcttgatatcaaattattctaattatttgaacataatgtttagtaaataagcaacaaggtattataggtatagccgcttctaatttgtttgtagtattaaactcgaataaaattcacaaactataaaaaaaaatgactgcattattgtaaataaagctgttaatgttaatccattgacaatggagagaaaggcatatatagcaaatataaatgcttatttctagtgacatcagctttcttttggcagctaaatgtttttaataatagtaattgaaaagtgtataaaatacaaataaaaaaagctgtaacttgttagctataaagttttaataataatttactaatgcaaggatgataatttactgaagggaaagtcaaagcttcatacaatatatagatttgtacaaattggccataaattaatgcagggttttgaattatacaaaatgctctaagcgtcagggcatgcaacacaatcacaatcgtcttcttctaccatttgattttttaattctctttccataatttctacataatcgccaactttgccttgatatggttgtaatctaagttcgtcatgaacaatggccaagcatgtagacaaatatttgtgaatacggggaatatattctgtgatctctggtggcatcattatttgcactttagaaatattcaataacaactgccaagcgttaatcaaaactcgcatgtcaaaataacagtcagtcgaccttgaccgaagatatttaattaagcgaacagtattgaaggcggcatgaactcctgttataacaatatgcttctgaatgtgggattcatgtggtcctagaaatgattctaccattgcaaagtattcttcatcagtaccttcaaaatcaatcttagcacgaagttctaatatcttttgtattcttctcctccattttctgctgatatttgcattttttggaatatttccgccattccaatgcatttttaataatttccattcattttcaggttgcggaattgctttagggaggtaagactgtgccatgataagccattcttcataaataactagtgtagtcaaaacaggtataacgctgtgggagcattctctttctaatgtactataaaattcttgacagctaatcgttgaatcaaacaaaggaagggacagtctaaactcaagtggtaaaactttagtgtaccaatgtctcattgccatctccacctgatgtccaattagacccacaaggtgatacaaatcacttgaataagcacacttgctagctttatgttcagttctttgtagaagtaatatgtacgaatgcatttgggcaaaccacttttcctgaattgagtcatcttcagcaatttcccattttccttcttcagagtgagttagtgtacagtaaggtagatttgtttcatcttttttcatatctggaagttgggcccttgtaatttcttcaaatgtctgtacacgacgcaaatgattcaacaagcgactaaaatgaacagcttctcctttctcttgtaaaaaagttgcgccttttcttttcatcttgaatatagccacatatttcggctgtaagaccactgaaattcgttcggccatatcagtatacagtttgcccttttcaaactcagaaatagtgagtgtgtagactgccatgaaaacgtaagcagtaaagctttccaagttgaattgatcaaatgaggcttctaaagcatcacgagcccttttaaagtaaaattttccatattcaaccaaagaagcagaaggtagacatcctgcaatatgtttacatcgcagtgtacagatagtagcacaaagagccattgcagcagcggattctcttgtgtcgagaaagcatctaataaacgtggggacatggatagctaactgttgaaaatgttgacaacgcaaataagcttgtatcaacttattggtcgtaacttgtatattttcaggtgaacatgcagtgactattgtatttacacttgacattctcggtgcagtaaaaatacgtattgattttgcgacgtttttacattgagttttaccatactttttgcgaatcaacataacaagttggtcgactatattatcctgtttaatgcaattttttattactggaggaatgcttgatccgtactccacagactgcagcacacaataaagattattaaacagatccgaataattgttgatatgcgtatcaatgcaaaagtctccttttttcacattaagcacccacggttgtgtttctctctctcctttttttaaaattgcctgtgtgccattatctaaaacagcaatcagctttgaatgctgggcaggttggcttgaaaagctgagagcggttgaaggtgatgaagggaactcatcagtcatacttccatcactgtcattagttaaagaaggtgtactacttccttgattcttcatgcgtttcattgttttttccatgtttgctatttcaatttctaacgactccgcttgctttaagagttctgtttgtattgcaatctgaatgaactcttcatcaacaggagaatgcgagcttgagtatacacaatcgatatcaaacttgtagcatctggatcgtatacctttgataagtaaagattatttgaatgcctaaattttaactaacctttcacagggttttaaaccattgcatttccgtttctgatttcgacactctaaattatattttaagcattttaattttttgattaatgtcctaaggcttatctaccttcgcatggaactttcttcattgtcatgcttaaagaaaaaaattcccaaaaagtaaaataattaatccgttactgcgtgtttataaactgtttagcctttaagccaatttctcttacagaatatgggaaaactattttgccgggcttattttaagtagaatgaactgtgattttttatattttattcgttgttgttgttatgctcctaccttgatagttataaagagacttatcattcaatggaataacaaatttcgtcttgtgatgaaaggattatctgcttatggaaacccatcgtgtattcaatttgttacagtgcaaacatgttctataccaaaagttaaaaacactaattgaaaataatcaacaatattgactatatatagcttcaaaatatatctaccggtttttatcgtctatttgcaaggagaattgatgctttaaaatatcgaaaaataaagctggaaactcatacctttaagaatttaacaacttatattccaagataaaaatatgcatgaagtatgtttttttctttacttactagcaattaactccaaagctgaaatttgcttaatcttaatagcattctttattgatgacataaataatgttcaggttggtgatagaagagcaggagttatggtagtaactcttcaatttgcgcttttatttattcaaaattacagaaaaataataaatgcacaaacatgcataccttatccttttcaaaccaagaaacgaaactttttttcatcacttttttaatttataataataaaaaaaattattcataaaatgaaaaagagtaataaagatacggtaggaccaaatatacattatcattttttttagttataaatatccagagttcatgtacttttcactatgtagatattattgtatacatttcgaagctgactatgtactatatatattatgcagtaagctgtatattaagtattatgaagacctattcataatttaatacaagaacgtgctcctgtatcgactgtttgctataacgttaaataagtccaaatttgtacacagttatacagttcaataaaaaaaataattatttgttattctgcaatgagctgctttatcaagtcagagaggatagagaaagaagagaaccggacagaaactaagaagcttgaatagtcaactaaaagaggacagtagagggtggcgttaaggatttgaagttatgaactgcaaataggacttaaaatagctgataagcaagaacgaaacaaagataagtaaagataggaatagacgtacagtctaatagagagaatgatacttgataattgactgatactttattaataactacaggtgtgtatttatacaaaagtcagaaacgcaatttgacaaaagaatgaactcagattattgagttttcagttaaaggatgttaagagactttaatgttattttcgagtttatatttaattctgatcaatgagtgatcttgccaaagtagtgaaaaccaaacaagtcagaagttatagaactttttagatagaagaaagaaagatgtcctttattaagtgtgttttttgtgtctatttatacactacctcaaaaaattgatcattttgaaccgccttttgctcattttgtaaattaactgcttcatattatttaggctagggggttttaggtaaaaggtagtataacaacaaagataaagaaatactgtgagggtatttctgggaagtcacagtctgactcagtctccagatttatcgtttttgggcgggattgagaatagtaaggaatttttttttttttttatggatgaacattttaatgtttattaaaactcatcaaagagtataaggattaagagcgatacaagtgtattaaacagtgacttgtcgcgaaaatactgtggtatttacacatgtaataaagtaataatgtaagttactacgaacaatggtcctccaaattaggaatatcggacattgtattacgccacttccaataaaatcccgatccactccagaatattctaataagttcctgatcaggattaataattacttcttgataagaagatgttaaactatgccaatcacataaataactcatcgtctaatatcgattaataatcaatacgcatacactgtaagtattattatttagccgtgattagaaaagtataaatacactcatatttttaacttgaataaaggacaatctactttgagtctcacttatttttacatttgttgattgacttagtactttttatattataaaacctcaaatatcacagtcaatcgcatgcttaaacggctgtcagaggagaaaataaacgatcacaaacaggcattaaccgcatccacatcaatgtatgatatttccaaggagcctggattacat

SEQ ID NO: 33 - DNA, 22145 bp, unidentified
  misc_feature 1..22145: note = Fanzor polypeptide
  source 1..22145: mol_type = other DNA
cagaatgctacgaaagagtggtagcaaagtgtaaagaataaataaatatgttccggagagtagattaacaatatgattttttttgaaaaaatcaaaaatttcaaccagctatgtgagtcaaacaggccctgaaagtatgagtaaatagagattcatgtagagcaaggatgagattatatggatgcatttcatagtataagttatagaagctgattgcgtatctagctaaaaacaagattgattaaaatctgttatgatcatatgtagattttttcaatttaacacgtaagctcttctatagccccttttaatgcttatgaagccttcgaataagtcgggtatactcgtacagctcaagattttcgctagtccggacaaagaaaacggatgtttcatcagataatataaattcagttgatcatcaggttcgggtgcttctaaaatgaccaaattctttgtagcatactggtctctcgtcatacacattcatgtagggcccttgaaataatttaaagtcgaatacactcaaaaggggccacgatttctcaaaaagagaaaacatgtatatactatttgttatacacaaaaaaaaaaaaaacattttctccttctcggcccaatcatgtaggacacttgaaataattgatgagtacatacactaaaggggccatgatttttcggaagcaaagaagaaaacttgcataattgttcattagggggtggttatttacaaataacgatcgtcaggccaatcatacgacagtaacagtacataaaaaaaaacaacaaagaaatactcctttttatacaaaaacaaaacaaactttcatcttctcctgggccattttcccaagatatatataaagcggacgatatatctcattattctcttcgtttacttcattcaattttttttattgattgatggcagttgagagtagaatcctcaaatgcaaactgggtccgctattgcagcaggatttcaaacctttcaaggtataatccatcaaaagttttaaagacaacatctttattaatagtcaaatatattatcatagaatgaatttcgcgttatttcagaagagcatagcattcttagaagagacgctatcaattttgcatgctatatggttgtacactggttagaaaatagggacactggagatcctcagccatgcccgcctctacttcaaggtcaattttggagccattgctatagactagtcagtgattatcggaatttcaggcttgacgttgtatgttgtcagaattatttacaataagagaaatcttgactcacttacaatcatacctatttatttatacaggacgttgcagtgaatatggcacatcgcttcattgaatttgataatttgaggctgaacgaagctagaggtatacttgatgatttctttaagttactatccgttgaaaatgctaactactttaactagaatatctctatcccagagttcaattggatctcttacatgcaactttagcaaacagctacggggttgatatcatgacaagtaaatgcttaatttaatctgaaaacgtcattggggtgctcatatttaaaatttacgtatgtattcatttagacatcaagctacatctgacaagaaacatccctgtgtatcaaaagcgtattctcaaagggttttttatgagatacaagatcgataatggtttagaaaatttcaatccaggtcaactaggtttgtatacataatacctacgatatcaagccggttgtctaatatacacactttactacttgtatttatagccgatgaagcattccgtaatctttttagattgagagtaaaccaaatcgatggattgtatggcgatcaaggtgaagttcatgctgttgctttaagaaattttttcaggtatactcaacgcaacaaagttcgttcatgatccaccttaatttaacttatttttatattttatagagcgcagtttaatcgttggcgtactacttttgcgaataccaagttggaggtcattaccgatttttcttacgctactcctgctagagttgcaacgattttacaattttatgctgctcttttgaatgatattggcttgcacaaccttaatgtaaaacggtggtccttaagtgtgtacgtttcaatccaggtcaactaggtttgtatacataatacctacgatatcaagccggttgtctaatatacacactttactacttgtatttatagccgatgaagcattccgtaatctttttagattgagagtaaaccaaatcgatggattgtatggcgatcaaggtgaagttcatgctgttgctttaagaaattttttcaggtatactcaacgcaacaaagttcgttcatgatccaccttaatttaacttatttttatattttatagagcgcagtttaatcgttggcgtactacttttgcgaataccaagttggaggtcattaccgatttttcttacgctactcctgctagagttgcaacgattttacaattttatgctgctcttttgaatgatattggcttgcacaaccttaatgtaaaacggtggtccttaattcctatagctacacatcaaatgggtattttatataatttggcaaagtgtatctcgatcagtgcaatactaaccacttttataattttttttagtgcatgtgaatttctctggccctgtaatagtatacattttacttcaacgattgagaaatagaggacccttgcctgatattgaactacaacacgaaactgggatactggtaacttgcaactatttcactagagtactttcatttttttttaacatttacgtaaacatgacagaggtttaatcaaggaactactcgtgctgaatttctcaggcactacaggataccggaatttaaagagcatttgtggcagcagatcttccgactagacaagttggtcaaaaatagaagattaggtgggtttgcttgtcacctttatcagtgaaaaaacttaaattaatcgtaatgtttagagaatgaagtaaatcgtgatagaccctaccaactcgcttatggatttaagactgatggccatatgatttctatgcatttctacaaagacatgcaaggtcgacgtaagtgattcttttgtgcgtaattgtttacatgatctaatgattatttatcactctagcacctatcccatttgatatgggtgaattacgaactatggctagaaaccttgatgtctcgcactgggagaacggaatggtggaactaataaaagaacccataggacttcctaacgactgtcgtatagtgggtgtcgacccaggtatgcactctaaaaatataaaaatgagtttgtcaattttttaatttaagcaatattcgtaggagtgcgtgatttactttgtgcagtagaaagggtcaatgttgaaggtcaagaagtcaatcgcaaagcttttagtatatctaatgcggaataccagtaggttttaagtgaatatgtcaatacatgataaaatttactgataatctaattttatatagagtgcgttcagtttctatgcatttctacaaagacatgcaaggtcgacgtaagtgattcttttgtgcgtaattgtttacatgatctaatgattatttatcactctagcacctatcccatttgatatgggtgaattacgaactaacgcacacactcttgatgtctcgcactgggagaacggaatggtggaactataaaagaacccataggacttcctaacgactgtcgtatagtgggtgtcgacccaggtatgcactctaaaaatataaaaatgagtttgtcaatttttttaatttaagcaatattcgtaggagtgcgtgatttactttgtgcagtagaaagggtcaatgttgaaggtcaagaagtcaatcgcaaagcttttagtatatctaatgcggaataccagtaggttttaagtgaatatgtcaatacatgataaaatttactgataatctaattttatatagagtgcgttcaggccgtcaatgggcgcaaatgaaggagttgcaatcaagagagcacgcccatattcaagaagtatatgatcttattgctagcccaaaagttcacaccattacagacttcagcttatatgtgagatccatttctcaaactcataataggtcggttattacattttatatagtttactttcagctactaataccattttctcattagaatcttcgacttcaatagatcatatagacatagagaaattaaaggttatttgtactctgctaaaaaaatgacacttgactacattgccgacaatattattgggctgtatcctttacgggtggataacaagacatattgtaaagtgatgctcccccacaaaagtacaaaaaaagaacgtcgacgcgccagaaaacaatttagaaatgagagtactggttttcaaccacccacacaaagaacaattgtagcattcggtgatgcgtccatcaatagctctatgaaaggtcatccaccaatccctcaccaagtaagtattccaatcaaatgattgatgaaattttgaactaactgtctttatttgtttacacagcaacaacaaagagccattgcaagaaaagcaatactagttcgagtcgacgagtacaacacctcccaaacctgcaacgtttgcagcagccgcctggaaaatgtgtactccagagagaacgtttgctttgagcacaggtaccaagataccaactttcattattatccataaaactaaatctagatttctgtagaaaaagacgaaagaaaatacaaggagtccaaaaaagaaaaaagtgctgtgttggtgacgacttgagtattatttcgcaagcatcacaatgcactcaacgcactctgcacaatggttagtagtttaatcatgttttgttgaatttagaaattaactgtttttttagttcttctctacccgttgaaattctgtaaccaatgtttagctggtagatccactgtaagtgcacttttgcatgttccaaatggtgtttttatataacagttgtaatgtaggtgtggaaccgagacttcaatgctgcaattaatattcgaaatatccttgctttatatattgagaataattatgacatcaactctcggccgactcccctctcaagaacacggcggtaatgaaacgccagacagctacccgtttagcccgcatgtaagtaacaaaacgacaaaattaagagttctgcaagaactaaccatcttctgtttaggctcgtaagttttatattgtcaagtttgtagttaaatgtgtgactaattttttttttacaacgtcattttggtggcttaaataaaaggtcgtgctttcagtcggagaaacaacttgatttgctctgtgtttcaatccccaagctcagttcaattaaaatgaatgatatgtgtcctactacagcagtaattctactgcaataagaacaatactttattgtaaatatttagatactcttatctataatcttggagtgaacattgtattcgctaatctcactttgtgatattttcttgttggatgagcccaagtatttgaatgtacgctttttcatattatgcgaaaactgagagcacatagctaaagcgtttcctttatcagatctgagagtgtaattagtgataacatcacgacgaccgataacatcaccacttccaacgaagtttgattgacttcctttctgtgtcgcaacactgtaaattccacgcacgtgaatatccactgccttcaaatcatgaatctttcgtctgttggataatcgactggctcttctgctttgcgacttcttggtatcaatcaattcagcccccaaattatcttcctcatccacataattttcatcttcgtcatcagtgactgcatgcgactcttttacaatattagaccaaggtgatgtgatagtatattgtttgggttgtaattcttgcgcattcttctcaatgatttttgaatagagttcttctttttcaatagcgtttaactttgaccattcctcctcttcttctgcaggaaccaacacatgtagaccttcctcttcaagaatgtcttttctttgtaaaagttcccaattaccactggtataactaccatcattaatcgccgcagcagaagacaatacaggaaactctgcactgtcttctaaccaatcgatgtaaaattctgtgctagcggatggatcttgtacctgctcagcaaaagcgacagggaaatcttgtttatatgtgagtgttgaggacattacgatctgtaataaagagaaagaaatgttcaagataaagaggggttaaatgattattctcatttgaataactgcggctggactgcggtcattggtactgtcttatgacagatgacctgcccctctcacacgcctttgtgtacagttcaaattgcattatcgtcggcattttaaataatatcgttatcgtcacttgcaataagcctgcaataaataatagttttcgttacgtacgtaaatggtatcagttacctgagcgtttgtatggtgaatttctgcattgaattctcttactttagtgtatgtgtgaaagggatccgtgatatatcgtaatttgggttgagcgagtgtagacttcaaaagttttccccaggccatgaactctgtagtattatgttggaattcatatataacataaaaagaaatacatatcttgcataaaagctgacaaacgcttcaagaaatatagttatcaccactgagcttagtgtatgacatggagaagtgctcttatcatgcagcgcgtccagcataagtattgtgagttttgaatactacaagaaggcaaacatacaggcggtctattaacgcattctgatgagatgtttgtttataatttcttatcgactgtgtctcattttaaaataccgtcagacaccccttcgtatatgcatcacaaagtaatatgacgaatcaaatcttatccattttaatagttgaataatctagttttttattacagtgaaccttataaagataggggagagtacgtagaaagaacattatatacacagtttatatcgagggggatgctaataatcaacggggtatatgacaatgataatgatgaaagatagaaaaaaataaaaggtgcaatgaaaatatggagaagtaaattattgtcttacaatagctgaatgaattgagaattcagaaacgtcagggaatgcagggcgttttgtctcggtaggtccagcactgtacttgtaagtatatcgcttcacgttgtgtgtgaatctggcagaaaatgtaagagcttgagctttgtttgatactctaaaattagccaaattatcaacgtatgtatccaatacagtcttgtttttacgttgttcgattgttggcaacttcttttcgtatggcacccaagttacttctgtcttacccaaattggaggtagccaatctgaaaataccttcgacatgaatgtccactgtcttcaagtcgtgaatcttgcgtttgcttgataatcggttggctctagtgctttgagatttttggcaactgcgtaattcgtaagataaatcatcttgatatgtatcctcatcaatttcatcgtcttcttcctttttcgcagcctttttcttgctgatattagaccaaaggggttgaatatcacgttttgtaggctgtaattcggaggcattcttttcagtaatttgagagtaaagttcttgtgttgtacctggagtcgtaagctttgaccaagcttcgtcttcaacaggaattaaagtgtgatcaccatcgttgatttcttttctttggagtagttcccaagttccggcggtaaggttgctttcatctttggtggaagataaactggggaattcagaaccatcgtcaagccattcaacgtaaaatacggtatcatcgttggctgggaggcaattgttggtttgttcggcaaagccgacaggaaagtcttcttgctgtaaggaagcagtcaaagcggacatctttcttgaaagaatgagattgtttgagttgataatatattataccattgacttatttgacctatttatatgtttatgaattactgctgcggtgagcgtaaaagcagccgcagctctccttctagtgtaaaatgttcaaacacagcagtgagaaaaatagggccaatcagaactctcgtttggaatcgactgcggacgcgctgttttcacacttttctcagaaagaaaatttaaaatttggtaaactattttaacccagctttcggaccttttcaaaaaatcttcggacgttctcaaatcttgattggacgaaatcattttttttttaggaccttctcaggttctaaattcggatcaagtcatagctctttcagaaattttcatcatcgattctagttaaacgtataacacttttaataaaaaaaatgaattataataattatcagcctaattttgacaactataagtccgaggatggtggcgaagagatagagttagaaataaccgcgatcgagtttggctcagtcgaaaaaatacttgacttcgacggaatgaaaaatattcaggaagtcgaggaggaagaagcagtaaatgagcttgccgagagggtggagcttgtctgtataaaaaaactagaaagtataagaattatggaccgagtaatatagaaaggttcattcactttatgcaggaggaaggtctttctgtccccaaagccgctctactttacggtataccttttagcactgcctatgaattattgaatgagtttaatgagagcaatgggacggtgttacatggtgataaccctaggaaacccagcaaagagccaaagagcttttatttgagcactcagcgttcttaatctctctatttgacagcaatccttccaccgtgctcgaagaagtgaggattaagctgtgcgaaacgtttcctggactcacagaaaaatgcgcattatctttgaagcaagcatcaaagtatacccaagagagggatgcacctagaacattgaaacttcgttttaattttattttccaatggaaagcagcaggcatagactacataccgaaaaaattgtgtttttttttacgaagccggctttcacacgcaaatgtcaagaggacgcgcatggtctaagaaagacgattttgcctttgtgaagatgcacactcagaaggcagtgaatgtaagcatcgtcggctctttttctagcatgggaattatcaacttttttaaagttgaacctttcaagaaaagcgatgcagctcaggttgaaaaagagtttggttcttacgccagcaagaagagaaaagaaggcagcaaagaggctgccaagcctagaaagcttgggaagggtactaccgcataccatattgtttgcttcatgaactcagttatggacttctcggatatgcattacgaaaaaggcattttcatcgtaatggaccactgtagaatacaccattctgcatttgtagttgacgccatcaacgagcgtggatataggtctttgtttatgcctccataattaccatttttgaacccaatcgaggagtgttgatccaaaatcaaagagtatattcgcagaaatcctctcgagagtgctgatactcttacccctcgcattgctgaggctatcagtaaagtcactgcagagggctgtcagggatggattaaacactctgagacattctgggttacatgtctcgccaaagaaataggtttaaaataaaccattttatttcatgataaatttgagtttttttaatattgcttgacaggtggatgtgattggttcaatataatgacagaaaaaaaaaacgccagttttaaatgattttgacaacaatgtgctttttattcatctttcttcttcattttttttttaacagagaatgtctagcgatgtaaatgataaagatgtaatatactaataactcaaacagtcttacattacgtagtttaactctttctttcttttttgtaataccagacaactccgcgaataatgtctgtcaaggcacctattcacaaagttttcaaaccagagtttattcaaccaactatcaaattggcagaaactgtaaacgatataacaacgcacacatactccttcttgaaatacatatttatcaaagaagtcaaagatgaccgcaactttgaattgtcaagttttctaaacaagtctttctttattgaagtatttttgtcacttgtagaaaggcaagtacgagatggtgtacggagtggaagtggaaattcttcaataaaagagacaacaacaacatatcgtaatttgatcttgaaacacaaagaaaaatattgcagatatagcggctatgtaccacccaagttaacccatgcgaagcagaatgcggattatgagtgtacgaagattaatacagcatatatcaataatatcaaagctcatttcggtgaccggcttaaacaggtagtaaacatcatttgtggaaaacaaaataaaatacgtgaacttgaagaaaagatgaaggccgcaagatacacagctgaagcaatcaaagggctaatcaaaaatactgtaattacaccttgtgcgaatgtgaagatatcggtatcaaagaaacaagttccaagtgacaatttcttaggtgaaaaagaaaaagctttcataagaaggatcttattttcgtatccccaagactataccttcatgaaagactcgatatactacgacgtgaaggtcaaccctctaaatcactataaggcctttattcaactggaggagataattgaagaattaacttatgataaagaaaagcagacctgcaaatcatttgttgtttatcctttacgcacatcattcatacctgcacacgtaacgatggacaccactattatgaattaccatattctgggggcaaaatcatacaaagaagagaaatcgaatatctggcctaaaattatgaacatggattacaaggcgctaaagaagcaaaaaactgacaagtccctgtgcttccacggtatgattcaaacagatggtgtcactgtaaccgttttgaagcaaaacttcgaaacaggacgccgacaacaatccagaaattcgaagccagctgatgatgatgatggattcacttatatagaaagtatgacgaaagagcaactggaacaaacaaaagaaaagtgcgttcttgtagatcccggccgccgtgacatactctattgtatgaaagaatcaagtacaccaaaaaatagacagtgttttagatttaccaaaaatacaagaagcaagaagtcacgtaggtttcgctacttgagaaaccaactgaaaccagattctatcaagtctgcagaaggtcaattgtcaaaatttcgttcaaacacacttgatcctgacaagtttatcgagtacctcgaagcgagaagggacgtgggaacacagttgaaagtatattattccaatgaaacatatgatgaaactccagattactatcctgaaccattggattttgttgttggaagaaaaggtgatatctattatggaagacgcttgttgtttataaaacgcgttgaaaatgctcgtcgtggtgttgctgatttacattcctatttacgctacctggccatgttgatgtcgtccaagcatttggtgaaaagactgacacgtcaagatactgacaacttgagtaggattatttcagatacaaccaaatgtttagacgaagatcaattatcaccagaagaagttaataccaaacatcgtgaagtcaagcaacaagtacataaaattgtttcgaagcttttattacttccttttcgcagaatgaagtttacatcgaagatatactatgacaactgtgacatgactctggccaaagacttgaaggaaaaatttggaaatgactttattctcatcattggcgactggtcagccccaacccaaaaatttcacgagccaactaggaacaaaggcttgctgaaatttctcaagaagagtggattccctatttacttgattgacgaatacaaaacgtccacttgttgcccgttttgtttttcaagtaaccttgagaaatttaaggaggttcagaacccaagaccgtaccagagagagaagcacccacttgttaagtgtcatggtctgctaaggtaatatttaaatcagacaaggataaaacacaagactgatttgttttattagatgcaagagcgagtcatgtttggctattggaaaaagaagaatcatgaacagggatacagcagctgtattgaacttccgtctaattctaaacagtttaagagaagaaggctcaagacctccaagattttgtagaagtgcccccaaacgacaacttacagatgagggtggaagtcaaaggaagtcccaaagaagaaaacaataattgtccatcttggttatcgctattgattatattttgcaggtaagtcgagccatccaaatatggttttgaacccatctgataatccgcttcattttttctagttctcttcactgacctggtccgagaaggtaagctaaaaagtctcgaatttaattttgattcgtccaaaagaaaattaacattgtctgttttaagagtttaaaaactgtaaactatacttatttaagagctgctcaagattttttttgcatgacgaatgaatttttgtgagatgcacatgtagcttatggtcaatgtctgtgaaataattaaattgaatggataaaactaaagattaaggtgtatttggctatgtatttgtgatatttatttacaatattacattaatatttaagaagtagctaaagggtaatatacaatttaagagttgaaagtcttttgggcttcacccttcttttcttgagccttgttggcggcttcaccagaggtgttaccagtgagagagttgacagcacccttaacagcaccagagacttggtcaatggctccttggacgtaaccttgtacattggcagcggtttcttggacattaccagcgttggcttgggtcttacccttggcttcgagggattcgttaccgacgacgtgaccgacgttttccttggtgtgaccgatgaattgatctttcttggcttcagttcttgatggagaggacatttttgttattatactttaatattaaattaattgatgaagaaactgtggagaggtgaatttcaattgtatttatatgttttcagggcaagaagatccctttacgtcatgtttccatatagggaaattttcttgaaatttcgtcatgatgaactcaacaaaagtatagcaaaagtcgttcatatgaaagatgatcaaatatttggactaatcaggatctgcataaaataattgcattacgtgtacatgttttttatttacgagcagtaaacattgacgtagctcactcggataacgcgaacgtcattatttacatatcacgtcgtctctagaaccaagatcacgttttgtttgaaaaggtatgacttcacacgtcaaacatcaacgaatgtggcgtgaagtaaaaatgcatcaatcggttaaagttattttagtttattgtccaagattataaatgagacgagaggaagtttattagtaccttttgtgaaaggtaatttccaaatcgacagggctgacaatagggaatccagcagtaggcatttgttcagaattttcagcatgtttaggagcggaccaagtaaattttttgactgtgatacgcgagatgtttaattaccgttagtgtgattagtacgaagcttacgctgtagtcaagtacaataatttaacttacgcatcattgaaagcaggactctctgttcatttagagtgaaattcatgccaatgcactgtcttgcaccatttccaaaaggtgaccaagctactccttccccagatccacgaattccgtctccattcgaggcaaatctatctggattaaactcgttactgtctttccagtgtttattcctatgatggagattatagatgttgacagtgagatgagaaccctcgggaacaaaagtaccgctgggtaaaattgtatcttccgccaccgttcgggtaagaactcttggagctggacagtgcaaacgaagagtttccttcaaaacttgattaatatacaccatttttttagtatcttccatagtaggaataacgtccattggttcgtcacccaagatggtgatagcttcttctcttgctttttgttgaacttcctacgtattcagtaaaaatatataggaaaacgtgcatgaataattgaataaatcaaagtgattgtataacaaaacttacagggtgtttgcttaattcatgcaaagcaaaacttaaaacgctagctgaagtgctttgaccagcaaaaaagaataagcgcaagttactctgtgagttaaagatgtaggtattagaaaaccacagacatttgtaggtagcctttttgttcaagtcgacatacctttaactcttcgtcagtaatcatttcttttcctgtagattgactttcgatcaaaagagtcaacacatctttttcgttttcctccaggtggctgttatagactattccctctttcaaaagagttcttttatactcgatcacctcgtcaagcatttctttaagcctgtctaattttttatgaattcttcttctttggggaaaaagccatagcaaatgcttatccaaggaagggaaaacgaaaaatttaatatcgcgaagacctataatgatatgcttataggtttccaaccactcgttgtcactttcattggaaagtgtgttaaaattgtagtctacgtgtaaatcgattagtagtgatatcattttgtaaatggtgaagcggtggtttactcaccaaaagcagctctaccgatggcatcaagtgtgtatctcaacaacaagtctgatacattgacagtttcgtccatggtttccatgcaaacaaacatttctttagctacctctccaaaaagagtaataggtgatgagcgtctaaatgcagggttgattatcattcgttgagttttccactgattactgctcaaattaagtacacttggtcctcccaagaacttcgcaaaaaaattaccaacgttcgcctctctgatgtctattttaggaaaaatctctacgtacataaaattttttgttgagcttaataccaactgagagagagattttacatcactacataccatgcttcatgagaactaattttgcatcctccggatcagaaatatttacttcccatcccaacattccgggttcctgttaatataatttagaggtctaaagtcgaactgcataccataagcaccaaattatgtttatgtcttaccaagtatacaccaaggttattatcattattcaggaaaggaaggtttactttatgagctcgtttaaaaaatgagtcatttgtgtacaaagatttgataacgctaaaatatccaaggtaaggaatatggcgtaggttttttggaggcctgagcgcccaatcttgaacaaaatatatcaaagtcatggtggctgcaacaccgatgccaattattttgtttttcttggtaactccatgagtcagctcattattgaagaaggtaatcagcttttgcattggaacagcgattgatactttagccattgtattagacatctgtcttgttgaaagaataaaagacgaacaaaagactttacttgcaatttccaattaactttatacatactcacctgcatgtgatggattgtttctagaattgttatcttctcctgctgattatatgtatgttgttcgcttcttctgctgattatatgtatgatggtctcacctgcataacctaatagtctacatacctaaatagatcagcttgccgtgaaagattagagtctgtaaaagacgagtatcaacacacatcgcattctggaagctatatcactccataactacaagatcatccattgcttatacttttttacggtattaatgacataaagtttctatgggctgtgaatctttttcaaatatgacatttacgtatttatataaaacgtgcacttagattcactggatacatattcgtcttacatgtgcaaggagaaacaagtgctcaagtactttcattttaaaaatcttgcgtaccatgagaaagattatcactcaatatgggatgtacataaagttacgcatacacttgcttcttgtattcttatttacaaccttccaaaatacatcatcaaggcatctatttagaggaagaagatgtgaagttgtctctattataattggtttttggtatattcatcttgcatttacttcattaagtacgtacgcgcctagtttaaaatccgccctctgcttggctcgcatacgtaatgcaactgtagcttataggattaagtaaactacttaaattccacctctaatatcatggaagaaaatatacgaatcgcataaaattactttttctataatcaagtttgcaaagtgtttttactatttgaaagcgttggagatgtaagggtattttcaggtgcattactctttatgtgataagtaatgtaggagtaaaaaatattcatggggttaatctgcaaagacatgataaaggagaagcacaatcaaatttcatataccaagttgataaatccaaacctcttgccaacttttaatacctttccatcgatgtattccaacagtttttgtttatgggttgaggaagggaaaagcaagggcacgtatgaaattcaatcactgtttttagaaaaaggagcatagttgtggtacatgattaaaataatccatgtttgtatacttcctttgacaaaaagctaaattttgccactatgcaatgcttattcattaaatataatgtgcagaacattttcaaatcaacagcctatatgctgtttattgcaggtctgatcaaaacatttctatagtactagttgcatataaaatacatttcataaatgtgtacgacacagtctttgatcctaagtataataaggctcaaaattatacttttacatatacgctaactttatatgcaatgtattatcaagtagcatatagatgtagaactatggaaaaagcatcgttcctgaaggttactatatgacaagtttttccatataataaccatgatggtaaaaacagagtatctacattcagtgttttataaatataagtctgttgtaagtcgatacatgagttctttagagaaaatattgaaacctctcattagttgttcatgtctaatgatttttatcttagactgataagcaaatttcaacctagaaaagaagaacctaaataattccaggagttgtggtactccattgcctcgtataatttgagacagagacgattggcttaccctccttccttaaataacctgtttaaaaaagacaacagaaaaaatttttcaacacaggctattgtgacatcctacaaacgttcaaatttgaatatacaatcggattacttcgtgaatcgctttgtatcttaacattaggtgaacatatttacatgttacacttgtaaagttggacagctcattttttccttttagaggattcaggaagagctgaggtgaaacaattcttcctgacttcttcctgagtattccaaggttacattattactatataagttaatgtagttactacattggtcaatatacttactatattcgtcaagtaacaccgaagtcaggacgaagtcaggaagtaagttttgcttgagaacatgaagtcctatttttttgagtaatactagtgagtcacaaatggtaaggtatctttacaagcgatcaagtcgagatattttaatatatattaaccaaggtcggaagtgtttttagtgattgtggtatcattcatttcactctgctagtacatacgtaccattcgttttatcttgcaaaggcagcgaatgctttgattctttcctcaaagaacaggtcatcagttccatgcccctgctgcaaaactaaacacgcacagtttctggatctttacttgaataatcaaaattaaatgcagtaagtactcctgcttagccctcccctttattttttctggtaaactgacccctctttattgtaaatttaaccgatcaaaatcaagatagcttattcataaaagcagaagaaaagcagaagaaaagatttatttttcccattccttcttgttcttgtattttatagcgatcttaaaacatttatacgtacaaaataaaaatgtcactctttacttcatataaatacagcaaagaccacgtatggatctcttttgataatggcatcggcaccatcggtatcactgattttgctcaaaattctttgggtgatgtcatttatgtagaagatcctgccattggtactttttttgaatgtggagacccactgatcgttgttgagtccgtccaaactgcttacgatgtttactcccctgtttctggtaaaatcatcgaaatcaatgaaaatttggatatcgatccttcactggttaaccgcagtcctcagatagacggttggttggctaagatcgagcttagcgatccttccgaacttgaatcattgatggacaaagctgcctatgaagctttaaacgctggcgaagaatagcctttaaaattaataccagataattcggaggctgcacagttccctccctgatagcccacatagcgagagttatacaataaagaccgcacagaataatgttatctacataaaacacagcatacacatgttttttttcatatcgcttaatgaattaaatttaaagtaaagacttgagcaaatactaatttggggccaaatcataactgaagttcgaatgaggttacgtctaccgtggtcgatgaacctcataatgatggtcttttatggtataagcaagtatgttcgtatagtatgctgggtttaaagatgctattaccatgtagacatggaatacataggatacgacataagagtaatatacgttatcttccactgatgcaatttcgcgcatggaccatttgcagcgaaaatatgctccttcgattatttagagcgtaaatgcaacatcaacttcacaacctgtacgtattatttaaatcattgtaaacgcttgggttttattatttgaaagtgaaagcacagtctacatagagtttagctagagtaaaagttctagctattggtcgcgataaaatcgctcggaaaggtaaaaaaaaatgaaagagaggttaatatacttttctaacagttgagcgagaaagtgcctagagtagtcttgatgaaagcgaatgttacgtacggatgaacacacttcattttgatgtgtataatgcttaattaattttcgcaataggtatagcgaatggggttattactatgatttatcacacaattcattttgaattacgaagagtgaatatctatagatgtcgctgaatttttatttggttgccacaaagtttaaattctgcgccaccctgggccatttacacaataaaaaaaaattacagtggctgtaattccacacatacacgtcaaacaaatacgcagagtgaaaagtatatttcgatacatgtagttagagagtttatttacaatgttacattaatatttaagaagtagttgagggtaatatacaatttaagagttaaattccttttgggcttcacccttcttttgttgaaccttatttccggcttcaccagaggtgttaccagtgagagagttgacagcacccttaacagcaccagagacttggtcaatggctccttggacgtaaccttgtacattggcagcggtttcttggacattaccagcgttggcttgagtcttacccttggcttcgagggattcgttaccgacgacgtgaccgacgttttccttggtgtgaccgatgaattgatctttcttggcttcagttcttgatggagaggacatttttgttattataatttaatatttaattaattgatgaagaaactgtggagaggtgaatttcaattgtatttatatgttttcagggcaagacgatcccttacgtcatgtttccatataaggaaattttctttaaatttcgtcatgatgaactcacttcgctatgacgacaatgtaatgatgaagaacttcattgtttaagattggtcaaacgtatgcattaaagtaatacacaagaggagcaaacattgacttagctcgttcaagtaacgccaaaaatcagaactttttcgtttgcataatacaccaacatgttcctgcaaaactagtgcgaactgtgtgtaaacaagagtatacatcgatgatttgataaagaaaaaaatatagtaaatttattcttgcgtagacattatagttaaaaacaggaactctattaatacctttttttgaaggtaagaatcagagtaaccgggctgacaacagggataccagaggtgaccaatccatccttatggatagaatcctcgggaatagtccaggagtatttacgaactatcaacttgtaagtaactgtaacgtatcacttgtatcataataaaaacttacgcatcatcgaaaggaaaactctctgttcattcagactgaaattcataccaatgcattgtcttgcaccatttccaaagggtatccaagacaatccttctccaggtccacgcgtcccttcttggctatcagcaaatctatctggatcaaacttactgccgtctttccaattactctccttatgatgaatgtcaaaaacgttaacagtaacaatcgagtcttttggaataaacgttccaccagataaaactacatcttcggctgctttacgggccacaactctggggaagggatcgttcaaacgaagcgtttctttcaaaatttggttgatataaaccattttcttggtatcttcaacggtaggaataacatcgattggctcgtcacctaaaatacggatagcctcttctcttgctttctgttgaatttcctatagcaagagcatcgcctcagtaagagcttacttgatacagaaaaaaagttttaaattatgaaacttacaggatgtttacccaaatgatacataacagacgtaagcgcgctggctgtggtatcatggccagcaaaaaagaacatgcacaagttgctctacgtatatatgaatattatgacgtgcttaaaggtataaagatagaaatacatctctcatgcaagtgtttacctttaactcttcgtgagtgaggagtccttctcctctgttttcgctttcgattaagagggtcaataaatctttttcgttttcttgcaaatggctgttatgagcgtttccttctttcaagagatctttcctacgttcaatcaccccatcgagcattttcagaaacttgtccaacttttcatgtagtctctttctttctgggaagagccataaaaaggtcgagtccaaaaatgggaagagaaagaacttacggtcttgaagaccttcagcgatatcattgtagatatccacccactcattgttttccattttgtcaagcgaatggaagttgaagtctacggtttgcatgtcaattagttcatgtacgcaaacggtgcaataaagaaaatataccacgcaccaaaaccagctctaccgattccctcgagtgttagtcgcatgatcaagtcagatacattcacagcagtattatccatcctttccatagcagtaaaaacttcttgggtgattttaccgaaaagtttgacaggcagagagcgacggaatgcgggattaattaccattcgttgatttttccattcctgacccattgtcagaaccacattgggtccgcccacaaactttgatatcaaggtgttttcatttccctcggtaatgtttaacttggggaacgattctacgtagaatagatttaatcagttattttttacatggcaaagtcgagaaaagcaaacacttaccctgcttcaaaagaattttctttgcatcctcagggttcgaaacatgaatttcccatccaaatcttccgggttcctaccaaaaaaccaaaccagttttcattagacatattgtacacagtgaaaatcagaaaagaaattaaaaacctaccgcgtaaagaccaagattactcttgtttaacatggggattatcactttgtaaccgcggtcgaacagcgaa

SEQ ID NO: 34 - DNA, 12680 bp, unidentified
  misc_feature 1..12680: note = Fanzor polypeptide
  source 1..12680: mol_type = other DNA
ccgtaatctttttagattgagagtaaaccaaatcgatggattgtatggcgatcaaggtgaagttcatgctgttgctttaagaaattttttcaggtatactcaacgcaacaaagttcgttcatgatccaccttaatttaacttatttttatattttatagagcgcagtttgatcgttggcgtaatacttttgcgaataccaagttggaagtcattaccgatttttcttacgctactcctgctagagttgctacgattttacagttttatgctgctcttttgaatgatattggcttgcacaaccttaatgtaaaacggtggtccttaattcctatagctacacatcaaatgggtattttatataatttggcaaagtgtatctcgatcagtgcaatactaaccacttttataattttttttagtgcatgtgaatttctctggccctgtaatattatatattttacttcaacgattgagaaatagaggacccctgcctgatattgaactacaacacgaaactgggacactggtaactttcaactatttcactagagtactttcatttttttttaacatttacgtaatcatgacagaggtttaatcaaggaactactcgtgctgaatttctcaggcactacaggataccggaattcaaagagcatttgtggcagcagatttttcgattagacaagttggtcaaaaatagaagattaggtgggtttgcttgtcacctttatcaatgaaaaaacttaaattaatcgtaatgtatagagaatgaagtaaatcgtgatagaccctaccaactcgcttatggatttaagactgacggccatatgatttctatgcatttctacaaagacttgcaaggtcgacgtaagtgattcttttgtgcgtaactgtttgcatgatctaatgattatttatcactctagcacctatcccatttgatatgggtgaattacgaactatggctagaaaccttgatgtctcgcgctgggagaacggaatggtggaactaataaaagaacccataggacttcctaacgactgtcgtatagtgggtgtcgacccaggtatgcattctgaatattagaacgagtttgtcaatcttttaatttaagcaatattcgtaggagtgcgtgatttgctttgtgcagtagaaagggttaatgttgaaggtcaagaagtcaatcgcaaagcttttagtatatctaatgcggaataccagtaggttttaagtgaatatgtcaatacatgataatagttactgataatctaattttatatagagtgcgttcaggccgtcaatgggcgcaaatgaaggagttgcaatcaagagagcacgcccatattcaagaagtatatgatcttattgctagcccaaaagttcacaccattacagacttcagcttatatgtgagatccatttctcaaactcataataggtcggttattacattttatatagtttactttcagctactaataccattttctcattagaatctttgacttcaatagatcatatagacatagagaaattaaaggttatttgtactctgctagaaaaatgacacttgactacattgccgacaatatcattgggctgtatcctttacgggtggataacgagacatatagtaaagtgatgctccctcacaaaagtacgaaaaaagaacgtcgacgcgccaggaaacgatttcgaaatgagattactggttttcgtccacccacacaaagaacaatcgttgcatttggtgacgcgtctattaatagctctatgaaaggccatccaccaatccctcaccaagtaagtattccaatcaaatgattgataaaattttgaactgattgtctttatttgtctacacagcaacaacaaagagcgattgcaagaaaagccctactagttcgtgtcgacgaatacaacacctcccaaacatgcaacgtttgcagtagccacctggaaaatgtgtactccagagagaatgtttgctttgagcacaggtactaagataccaactttcattattatccataaaactaaatctagatttctgtagaaaaaggcgaaaaaaaatacaagaaggccaaaaacgaaaaaagtgctgcgttgatgacgacttacgtattatttcgcaagcatcacaatgcactcaacgcactctgcacaatggttagtagtttaatcatgttttgttgaatttagaaattaactgtttttttagttcttctctacccgttgaaattctgtaaccaatgtttagctggtagatccactgtaagtgcacttttgcatgttccaaatggtgtttttatataacagttgtaatgtaggtgtggaaccgagacttcaatgctgcaattaatattcgaaatatccttgctttatatattgagaataattatgacatcaactctcggccgactcccctctcaagaacacggcggtaatgaaacgccagacagctacccgtttagcccgcatgtaagtaacaaaacgacaaaattaagagttctgcaagaactaaccatcttctgtttaggctcgtaagttttatattgtcaagtttgtagttaaatgtgtgactaattttttttttacaacgtcattttggtggcttaaataaaaggtcgtgctttcagtcggagaaacaacttgatttgctctgtgtttcaatccccaagctcagttcaattaaaatgaatgatatgtgtcctactacagcagtaattctactgcaataagaacaatactttattgtaaatatttagatactcttatctataatcttggagtgaacattgtattcgctaatctcactttgtgatattttcttgttggatgagcccaagtatttgaatgtacgctttttcatattatgcgaaaactgagagcacatagctaaagcgtttcctttatcagatctgagagtgtaattagtgataacatcacgacgaccgataacatcaccacttccaacgaagtttgattgacttcctttctgtgtcgcaacactgtaaattccacgcacgtgaatatccactgccttcaaatcatgaatctttcgtctgttggataatcgactggctcttctgctttgcgacttcttggtatcaatcaattcagcccccaaattatcttcctcatccacataattttcatcttcgtcatcagtgactgcatgcgactcttttacaatattagaccaaggtgatgtgatagtatattgtttgggttgtaattcttgcgcattcttctcaatgatttttgaatagagttcttctttttcaatagcgtttaactttgaccattcctcctcttcttctgcaggaaccaacacatgtagaccttcctcttcaagaatgtcttttctttgtaaaagttcccaattaccactggtataactaccatcattaatcgccgcagcagaagacaatacaggaaactctgcactgtcttctaaccaatcgatgtaaaattctgtgctagcggatggatcttgtacctgctcagcaaaagcgacagggaaatcttgtttatatgtgagtgttgaggacattacgatctgtaataaagagaaagaaatgttcaagataaagaggggttaaatgattattctcatttgaataactgcggctggactgcggtcattggtactgtcttatgacagatgacctgcccctctcacacgcctttgtgtacagttcaaattgcattatcgtcggcattttaaataatatcgttatcgtcacttgcaataagcctgcaataaataatagttttcgttacgtacgtaaatggtatcagttacctgagcgtttgtatggtgaatttctgcattgaattctcttactttagtgtatgtgtgaaagggatccgtgatatatcgtaatttgggttgagcgagtgtagacttcaaaagttttccccaggccatgaactctgtagtattatgttggaattcatatataacataaaaagaaatacatatcttgcataaaagctgacaaacgcttcaagaaatatagttatcaccactgagcttagtgtatgacatggagaagtgctcttatcatgcagcgcgtccagcataagtattgtgagttttgaatactacaagaaggcaaacatacaggcggtctattaacgcattctgatgagatgtttgtttataatttcttatcgactgtgtctcattttaaaataccgtcagacaccccttcgtatatgcatcacaaagtaatatgacgaatcaaatcttatccattttaatagttgaataatctagttttttattacagtgaaccttataaagataggggagagtacgtagaaagaacattatatacacagtttatatcgagggggatgctaataatcaacggggtatatgacaatgataatgatgaaagatagaaaaaaataaaaggtgcaatgaaaatatggagaagtaaattattgtcttacaatagctgaatgaattgagaattcagaaacgtcagggaatgcagggcgttttgtctcggtaggtccagcactgtacttgtaagtatatcgcttcacgttgtgtgtgaatctggcagaaaatgtaagagcttgagctttgtttgatactctaaaattagccaaattatcaacgtatgtatccaatacagtcttgtttttacgttgttcgattgttggcaacttcttttcgtatggcacccaagttacttctgtcttacccaaattggaggtagccaatctgaaaataccttcgacatgaatgtccactgtcttcaagtcgtgaatcttgcgtttgcttgataatcggttggctctagtgctttgagatttttggcaactgcgtaattcgtaagataaatcatcttgatatgtatcctcatcaatttcatcgtcttcttcctttttcgcagcctttttcttgctgatattagaccaaaggggttgaatatcacgttttgtaggctgtaattcggaggcattcttttcagtaatttgagagtaaagttcttgtgttgtacctggagtcgtaagctttgaccaagcttcgtcttcaacaggaattaaagtgtgatcaccatcgttgatttcttttctttggagtagttcccaagttccggcggtaaggttgctttcatctttggtggaagataaactggggaattcagaaccatcgtcaagccattcaacgtaaaatacggtatcatcgttggctgggaggcaattgttggtttgttcggcaaagccgacaggaaagtcttcttgctgtaaggaagcagtcaaagcggacatctttcttgaaagaatgagattgtttgagttgataatatattataccattgacttatttgacctatttatatgtttatgaattactgctgcggtgagcgtaaaagcagccgcagctctccttctagtgtaaaatgttcaaacacagcagtgagaaaaatagggccaatcagaactctcgtttggaatcgactgcggacgcgctgttttcacacttttctcagaaagaaaatttaaaatttggtaaactattttaacccagctttcggaccttttcaaaaaatcttcggacgttctcaaatcttgattggacgaaatcattttttttttaggaccttctcaggttctaaattcggatcaagtcatagctctttcagaaattttcatcatcgattctagttaaacgtataacacttttaataaaaaaaatgaattataataattatcagcctaattttgacaactataagtccgaggatggtggcgaagagatagagttagaaataaccgcgatcgagtttggctcagtcgaaaaaatacttgacttcgacggaatgaaaaatattcaggaagtcgaggaggaagaagcagtaaatgagcttgccgagagggtggagcttgtctgtataaaaaaactagaaagtataagaattatggaccgagtaatatagaaaggttcattcactttatgcaggaggaaggtctttctgtccccaaagccgctctactttacggtataccttttagcactgcctatgaattattgaatgagtttaatgagagcaatgggacggtgttacatggtgataaccctaggaaacccagcaaagagccaaagagcttttatttgagcactcagcgttcttaatctctctatttgacagcaatccttccaccgtgctcgaagaagtgaggattaagctgtgcgaaacgtttcctggactcacagaaaaatgcgcattatctttgaagcaagcatcaaagtatacccaagagagggatgcacctagaacattgaaacttcgttttaattttattttccaatggaaagcagcaggcatagactacataccgaaaaaattgtgtttttttttacgaagccggctttcacacgcaaatgtcaagaggacgcgcatggtctaagaaagacgattttgcctttgtgaagatgcacactcagaaggcagtgaatgtaagcatcgtcggctctttttctagcatgggaattatcaacttttttaaagttgaacctttcaagaaaagcgatgcagctcaggttgaaaaagagtttggttcttacgccagcaagaagagaaaagaaggcagcaaagaggctgccaagcctagaaagcttgggaagggtactaccgcataccatattgtttgcttcatgaactcagttatggacttctcggatatgcattacgaaaaaggcattttcatcgtaatggaccactgtagaatacaccattctgcatttgtagttgacgccatcaacgagcgtggatataggtctttgtttatgcctccataattaccatttttgaacccaatcgaggagtgttgatccaaaatcaaagagtatattcgcagaaatcctctcgagagtgctgatactcttacccctcgcattgctgaggctatcagtaaagtcactgcagagggctgtcagggatggattaaacactctgagacattctgggttacatgtctcgccaaagaaataggtttaaaataaaccattttatttcatgataaatttgagtttttttaatattgcttgacaggtggatgtgattggttcaatataatgacagaaaaaaaaaacgccagttttaaatgattttgacaacaatgtgctttttattcatctttcttcttcatttttttttaacagagaatgtctagcgatgtaaatgataaagatgtaatatactaataactcaaacagtcttacattacgtagtttaactctttctttcttttttgtaataccagacaactccgcgaataatgtctgtcaaggcacctattcacaaagttttcaaaccagagtttattcaaccaactatcaaattggcagaaactgtaaacgatataacaacgcacacatactccttcttgaaatacatatttatcaaagaagtcaaagatgaccgcaactttgaattgtcaagttttctaaacaagtctttctttattgaagtatttttgtcacttgtagaaaggcaagtacgagatggtgtacggagtggaagtggaaattcttcaataaaagagacaacaacaacatatcgtaatttgatcttgaaacacaaagaaaaatattgcagatatagcggctatgtaccacccaagttaacccatgcgaagcagaatgcggattatgagtgtacgaagattaatacagcatatatcaataatatcaaagctcatttcggtgaccggcttaaacaggtagtaaacatcatttgtggaaaacaaaataaaatacgtgaacttgaagaaaagatgaaggccgcaagatacacagctgaagcaatcaaagggctaatcaaaaatactgtaattacaccttgtgcgaatgtgaagatatcggtatcaaagaaacaagttccaagtgacaatttcttaggtgaaaaagaaaaagctttcataagaaggatcttattttcgtatccccaagactataccttcatgaaagactcgatatactacgacgtgaaggtcaaccctctaaatcactataaggcctttattcaactggaggagataattgaagaattaacttatgataaagaaaagcagacctgcaaatcatttgttgtttatcctttacgcacatcattcatacctgcacacgtaacgatggacaccactattatgaattaccatattctgggggcaaaatcatacaaagaagagaaatcgaatatctggcctaaaattatgaacatggattacaaggcgctaaagaagcaaaaaactgacaagtccctgtgcttccacggtatgattcaaacagatggtgtcactgtaaccgttttgaagcaaaacttcgaaacaggacgccgacaacaatccagaaattcgaagccagctgatgatgatgatggattcacttatatagaaagtatgacgaaagagcaactggaacaaacaaaagaaaagtgcgttcttgtagatcccggccgccgtgacatactctattgtatgaaagaatcaagtacaccaaaaaatagacagtgttttagatttaccaaaaatacaagaagcaagaagtcacgtaggtttcgctacttgagaaaccaactgaaaccagattctatcaagtctgcagaaggtcaattgtcaaaatttcgttcaaacacacttgatcctgacaagtttatcgagtacctcgaagcgagaagggacgtgggaacacagttgaaagtatattattccaatgaaacatatgatgaaactccagattactatcctgaaccattggattttgttgttggaagaaaaggtgatatctattatggaagacgcttgttgtttataaaacgcgttgaaaatgctcgtcgtggtgttgctgatttacattcctatttacgctacctggccatgttgatgtcgtccaagcatttggtgaaaagactgacacgtcaagatactgacaacttgagtaggattatttcagatacaaccaaatgtttagacgaagatcaattatcaccagaagaagttaataccaaacatcgtgaagtcaagcaacaagtacataaaattgtttcgaagcttttattacttccttttcgcagaatgaagtttacatcgaagatatactatgacaactgtgacatgactctggccaaagacttgaaggaaaaatttggaaatgactttattctcatcattggcgactggtcagccccaacccaaaaatttcacgagccaactaggaacaaaggcttgctgaaatttctcaagaagagtggattccctatttacttgattgacgaatacaaaacgtccacttgttgcccgttttgtttttcaagtaaccttgagaaatttaaggaggttcagaacccaagaccgtaccagagagagaagcacccacttgttaagtgtcatggtctgctaaggtaatatttaaatcagacaaggataaaacacaagactgatttgttttattagatgcaagagcgagtcatgtttggctattggaaaaagaagaatcatgaacagggatacagcagctgtattgaacttccgtctaattctaaacagtttaagagaagaaggctcaagacctccaagattttgtagaagtgcccccaaacgacaacttacagatgagggtggaagtcaaaggaagtcccaaagaagaaaacaataattgtccatcttggttatcgctattgattatattttgcaggtaagtcgagccatccaaatatggttttgaacccatctgataatccgcttcattttttctagttctcttcactgacctggtccgagaaggtaagctaaaaagtctcgaatttaattttgattcgtccaaaagaaaattaacattgtctgttttaagagtttaaaaactgtaaactatacttatttaagagctgctcaagattttttttgcatgacgaatgaatttttgtgagatgcacatgtagcttatggtcaatgtctgtgaaataattaaattgaatggataaaactaaagattaaggtgtatttggctatgtatttgtgatatttatttacaatattacattaatatttaagaagtagctaaagggtaatatacaatttaagagttgaaagtcttttgggcttcacccttcttttcttgagccttgttggcggcttcaccagaggtgttaccagtgagagagttgacagcacccttaacagcaccagagacttggtcaatggctccttggacgtaaccttgtacattggcagcggtttcttggacattaccagcgttggcttgggtcttacccttggcttcgagggattcgttaccgacgacgtgaccgacgttttccttggtgtgaccgatgaattgatctttcttggcttcagttcttgatggagaggacatttttgttattatactttaatattaaattaattgatgaagaaactgtggagaggtgaatttcaattgtatttatatgttttcagggcaagaagatccctttacgtcatgtttccatatagggaaattttcttgaaatttcgtcatgatgaactcaacaaaagtatagcaaaagtcgttcatatgaaagatgatcaaatatttggactaatcaggatctgcataaaataattgcattacgtgtacatgttttttatttacgagcagtaaacattgacgtagctcactcggataacgcgaacgtcattatttacatatcacgtcgtctctagaaccaagatcacgttttgtttgaaaaggtatgacttcacacgtcaaacatcaacgaatgtggcgtgaagtaaaaatgcatcaatcggttaaagttattttagtttattgtccaagattataaatgagacgagaggaagtttattagtaccttttgtgaaaggtaatttccaaatcgacagggctgacaatagggaatccagcagtaggcatttgttcagaattttcagcatgtttaggagcggaccaagtaaattttttgactgtgatacgcgagatgtttaattaccgttagtgtgattagtacgaagcttacgctgtagtcaagtacaataatttaacttacgcatcattgaaagcaggactctctgttcatttagagtgaaattcatgccaatgcactgtcttgcaccatttccaaaaggtgaccaagctactccttccccagatccacgaattccgtctccattcgaggcaaatctatctggattaaactcgttactgtctttccagtgtttattcctatgatggagattatagatgttgacagtgagatgagaaccctcgggaacaaaagtaccgctgggtaaaattgtatcttccgccaccgttcgggtaagaactcttggagctggacagtgcaaacgaagagtttccttcaaaacttgattaatatacaccatttttttagtatcttccatagtaggaataacgtccattggttcgtcacccaagatggtgatagcttcttctcttgctttttgttgaacttcctacgtattcagtaaaaatatataggaaaacgtgcatgaataattgaataaatcaaagtgattgtataacaaaacttacagggtgtttgcttaattcatgcaaagcaaaacttaaaacgctagctgaagtgctttgaccagcaaaaaagaataagcgcaagttactctgtgagttaaagatgtaggtattagaaaaccacagacatttgtaggtagcctttttgttcaagtcgacatacctttaactcttcgtcagtaatcatttcttttcctgtagattgactttcgatcaaaagagtcaacacatctttttcgttttcctccaggtggctgttatagactattccctctttcaaaagagttcttttatactcgatcacctcgtcaagcatttctttaagcctgtctaattttttatgaattcttcttctttggggaaaaagccatagcaaatgcttatccaaggaagggaaaacgaaaaatttaatatcgcgaagacctataatgatatgcttataggtttccaaccactcgttgtcactttcattggaaagtgtgttaaaattgtagtctacgtgtaaatcgattagtagtgatatcattttgtaaatggtgaagcggtggtttactcaccaaaagcagctctaccgatggcatcaagtgtgtatctcaacaacaagtctgatacattgacagtttcgtccatggtttccatgcaaacaaacatttctttagctacctctccaaaaagagtaataggtgatgagcgtctaaatgcagggttgattatcattcgttgagttttccactgattactgctcaaattaagtacacttggtcctcccaagaacttcgcaaaaaaattaccaacgttcgcctctctgatgtctattttaggaaaaatctctacgtacataaaattttttgttgagcttaataccaactgagagagagattttacatcactacataccatgcttcatgagaactaattttgcatcctccggatcagaaatatttacttcccatcccaacattccgggttcctgttaatataatttagaggtctaaagtcgaactgcataccataagcaccaaattatgtttatgtcttaccaagtatacaccaaggttattatcattattcaggaaaggaaggtttactttatgagctcgttt

SEQ ID NO: 35 - DNA, 22205 bp, unidentified
  misc_feature 1..22205: note = Fanzor polypeptide
  variation 13259..13599: note = n is any nucleotide
  source 1..22205: mol_type = other DNA
cgagacggtcgccgtgcctgccagcagggatgtcagggacgcgttcgtcgagctcaatgttcccgcagagaggacaggggccgtgagagtcgatgcgaacgaggccggacccgccaccgagaggctgccggagactgatgcggagccggtgatcagcagcggaccgttcagggagaggctgccagacacgaacgcaccgccggtgagagacgagaagcctgtcgcgatcagtgtggtcgcactgaggttcccggtcacggaggcggtcgtcgcggtcaacgaggtcaccgtggcacccgtcgccgtgagggatggtgtggtcacggaggtcatagaagccggacccgtcactgacagactgcccagaagcgaggtggtgctggcgaccactagcgggccgccgaccgacaggctggaggcctgcaccccgccggtgagggacgagaatcccgtggcgttcacggcggatgcggtcagtgtcgctgtcacgttcgcgacggcagtggtgagggtggttatcgtcgcggatgtgacggtgaggccgctcgtgaccagggacggggtgaccacggaggtcgtgaaagaagcggggcccgcaacggtgagagacccgctggtgttgacgtccccgccgacatccagtgcgtgggcgggagccgtgttgatcccgagctgtccgagggagttcaaggtgaggcctgcgacgccgaagcttgcggtaccaccggcagtgctggtgcccagagaaggacggatgagcaggttgccgttcagcttcatcacctggaacgccgtcgaggtgtgcgacgtcctccatgcggtgccgtcgtagtaggcgtcgaagttcatggacacgttgtcatgctgccagttgagcccttggtacagcgggtagttgtctgcagtcgtgtatgcggagctgtggggtcccaggatgctggacgggggccctgtctgctgcagattggagtacatggccagcccggacccgctgacgccgagcaccatggtgctgccgttgtacaccagcatggagggctgttgaccggcctgcctgactgtcacggcagccccagtgcctgcattgtcaatctcaaactgattggtcgtcgtcgagttggtatacagatgggtcagtgaccccatgacgatgaggtttccgtcgacgcggaggtcgtttccgacatgtagccccgcgagtggattgggggtgcctacacccaagaaggacccaccgttggcgaacatcaggcgggacagggatccgccctctgtcagcgccagaccggtgccggaatagccgagggtgtacttggccccgtcgggcccctggatcaggatgcctgactgcagcgtgacatcgggctggactatgtgcagctgctgtgtgggcgacaccgtcccgatggcgagcctggagctcgggaccgccaggtcggaccctgacaaccgcagggctgtattcaagaccgaaagcatctggtcaggtcactgttagtgtgtgccacattttgtggcttggacggacgggaggccccggatggcatgcgtctaccaggcgcgaacgactgcaaagcaacgaaatatacgctagctgtgaatccacagccagggcaggtctacatcacgagattcttcagtttccacatgaagccaccgtcccttctcactatccttttcctgtcatctgcctggtacacctcaccgcatcctttcacgtatgtcaggtcagcctgagtcggtctcgtgaggagcttcggcatcaatgcctttccctgttcgagtttcttccataggctttcggcaccctcgcatgtctcgaaatacagcttcacgaccctgctcgggtagcctccgtcgttgtagaaggctctgtccaccctgtagaaaccgtagtgcatggagaatatcatgtggaggtcgtggatcagatcgtcctgcttctcagcgtccatctccttgctggggaacgcgtagcgcagaatgatggtgttcttgtcaagcatgtcacgtcgcgctgtggttttgggcttcatcccagggtgccctaacacgcggctttgcttttgcctgcgagtggtgtcagctagtgatgaaagcaacgccatgctcgctgcacccatgatctgaatgttgctcctctttctggtgcccttccagcactgtgcccttccaggtgagcactgcgtgatgccctccgggaaagaccgcgattctggtcgccacaagcactatgctagcgttgatgtggccacataaaagtacgctttatcaccacgagcacatgaccacagaggtcaaagagataaagtgcccgacatgcgagcaggtctttaaagaggagcgaagtttgagcaagcacctagtgaaaaagatcccatgcattcccaagggacaggcacggcactcctgccaggcctgcaatcagacattcgaaaggagaaatgacctcgccaagcacctaaccacaaagaaacacgctgacgctgtggcaagagcaaactcaaccgactccagtcacactctgacgggcgatgccacatacaagtatactatcgcgaatccgccaccccgaccaaggatgttcggccgctccgaccttctccacgttgtcgacatgacttccgaggagcttgacaaacatctccacttacgaaccaggactggtctgacgctgttcctgaacctcttcaagctgacgcatctcaacgatgacgcgcccaagaatcacaacgtgatgatagagtcccccgacgcaccttttgcttgggtcttcaagcagaagcactggagacgcgtcgatgccgatggtatcgtcagggactgtcttctccagacgacggtgctcgctctggactttgaattcgcaatccaggaggccatggacgaggctcactactgcaagttcatcaaactccgaggccaggtcgaatttgagacgtgtggaccgaggccactgtcacctggagtgtcaagcctgctgaaaaggatctgcgtagcaatcgtcgctttcacagaccgccatcccgacttgctgcactatgcaagggcagacagcgagacagcaccgcccatggtggcgctcccaaggcaacgtacactgtctatgtggcaacctggtggagttcgatacgaagctttccgagagacccgggagactgaagatcacgcacgtttaccatcgacacctgcaatgatgcgtctcctatacaaggtccaatgccgtcatcctgagtgtcctatttgtgaaatgccatccattgatgttcggtacagcaggagagattcctcgtcctgtcacaggaggtgacaggactacaaccgaaagatggagatgcggatgctgaaaacgagtccgcgggtttcgcaggtgccggtcatgtaggccacagagcccttgtccattgagtaactgtccgaggattgtccgaagcgggtgacctcaagggcgagggttgtctgttggaagggcagggaacggtggcacagtcgggtcagctcggcagcattcgtcgaggaggacgcagtcagcgccttgtcgatagctgcgaacacgctctctgcggtctgcttgggaatgttctggctggcgtggtacttggtgaacattggtctgggttgttcgagttcctcaggtcgatttttggttttcttttcttggccacactgatgaggggctgctgccaggctctgtcaagttcgcagtcggtctgtgttttgcacccaggatcctacggtggtcatggctgcactctcaaaagggctctagagcagacatcctgagtgtcctgttcgcgaacttttccccaggaacagccttcatcgcttcttgcactgcgtcacagagctgtcgcgatcccagcagtcgcacacccatctcggtgaaggctcgtacagccttcgtcctggtgctaggcttcgaaaaagtgacaaagctgtcgctgtaacttttcttgaactccagaaagtcatcgagatggaagaggagggctgccctgaggatcaagtacgagaatacgctgctcgtctgcaccagccgtgtgcccttgtcaggggacgatcgcaggaaggccttcaggctcggaaacccgtagtggtgaagcaccttggcagcctggaacactgcccatctgcgttcgacgtccagcagctccaagcaatttgacgagcccagcacggcggcgacgaacatggtgttcaggatgtccgccacacactcggtgtaggcctcgttgggcagcactgcagtcttgcaattcataaacttgtctgtgcagccggtgtcatcgatgtagaaccccctgtagaattctccgagcaacttgtgtggatagcgcttgatgtcgaagcagaggcagtgcaccagctcgtgctgaaacaccttctggtgctcctcggcacgccagcactgtatcagaccgtgtcctcgtgccagggtgctccctgagttgatgtgtgtgggtcctatgggctctccaggtgctggcaaacatttctttgcgtcggaaggcacgtagtcgatgtgcaccctgtcggtgtgcccgaacatcagcatgatgcagagcaggtgtcggaggatcgcaaggaagccctcgggtggtcgacggcactcgacgtgcacctcgacctgcatgcctccatgctgacaccgatacagccacgctgttttcccacacagctcgatggccttcgacgtcacaaaggcgttgtcggccagcagatctgctctcgcctgagtgggttcacaggagctcgatgactcctcgcgcacctgatccctccattccagcagcctcgtgtactgtgttttcagcatcgtctgactcgtgggcgagagtggtggcacggatatccctgaaacgaatgcctcgagtcgctgtgactcagggctgatcatatgggtagtaaatgcggagaaactacataaagctttccttcatctgtcagagagagtgtcatgatggagagcaagcgcctcatgatcgtcgagtcatcgacgaagatcaagaccctcacgaggtttctcccggcggacatcgtcgtcaaggcatgcttcgggcatgtctcggacctgccgaagagggagctgggcatcgacatcgggaagcagttcaggccacactggagggagttgcaggagaagaaggggacgatagagcaattgaaaagagcatgcgaggcctccacgacggtgattctcgccaccgatcccgacctggagggcgaggccatcgcgtggcacctgaccagggtgctcaagctcgcgaaggagagggtcgtgcgcgtagcattctgctcggtcacggaggcagaggtgctccgggcgttgagctgtccccgcaaggtggacaggaacctcgtggatgcccagatcgctcgccgcatcgtggacagactggtggggtaccgggtgtcacccatcctgtggaggcacctcaagagcggactgtcagcaggacgtgtgcagtccgctgcgctcaggctgctcgtggagcgcgagagggagatcgaaggctttcgaccagagaagtcctggcagctcacagcgagcttcgaggatggcaagatcagcggtacgtaccagaacgctttcgcaacgcgtgatgaggctcgcgaggccctggaaggaatgaaggatcacgagtacatcatatcgcacatcgatcgaagtgtggaacatacctccgctcctcctccactgcggaccgccaccctgcagcaggaggccggcagcaggttcggcatgtctccgaaggtcaccatgaccctggcgcagggcctgtacgaggctggtcacatcacgtaccaccggaccgactctgtggacatgtctccggaggcgatgcagggcctgcggacctacatcagcagcacgcacggggagaaatacctcgcagaccagcagcgcaactttcgacaggctccaggagcgcagatggcacacgagtgcatcaggccgacgagctggacgaggacggcgatcactgggggtgcccagaggctgtacgacctgatatggaccagagcggtcgcatcacagatggcacgtgctgcctacgacgtctgcaagctgcaggtgccatacagagactcgcacttcctgagcagtgcgagaagcgtggagttcgatggctttctcagggctagcggacacggcggtgaccctcatggctctggcacgatggcaatgctggcgaacctgaagtgtgggcagaggctgactctgcacgagggcaccgctcgagagcagctcacatctccacccccacattacagtgagagcgggctcgtcaaggagctggaacgctgtggattgggcaggcccagcacctacgccacaattgtgacgaccctccaggacaggcggtactgtgagagtgcggcacccagcaaggtcaagcaacgcttggaagtgatgcacctcagggaggggaaaatcacgatgggcaagagggagcaggaggccccaaacgtgaggggtcgtttgacggtcaccgagatcggccaggacgtctacagctacctcgacaagcactttggatgcataacggacatcgcattcacccgagacctggagctagaactggacaggatcgccgcaggcagcgtgaaatggatggacatcgtgaagaagttccatgacgagttcgggccgactgtcgacaccctgatgaagacgaaggcgctggagaagcgcatcccgcgggcaatcagagaggtgcgcaggatcggcaggcacccccacacgggccagatgatcgagacatgcaaggcccggtacggcccggtggtgaagatgggcgacggctacaagaccgtcttcgcgaagatcgacgctgcatcgatggacagtctggacttgaataccgcggtcaccatgctcaacaggaagatgcattgacgattgttgtgtaaaagtcgtgctcaaacccgactttttcttgagaataatcactcgttcactagagactgagggaccggtggtggagcctcgacagggcccttcgaccccttctcggcggcgcgctgatgcagcagcatggcgagccttctcaggaagcgtctgagccatcgatcggactcgtcatccgtcagcttccacggcagatggatctcccggatgagggctcgactgaacgtgatgcagtttcgatcgcgcaggaggctgtagccattgtccgggaatttgcctgcacggaggcgctgcagcgcagtctcgacctcaccgaccgtgctgacaccggcgaagaccttctcgaagggctcgaagtaccgtgggtagcgcaggatagacgtgatgcctccaccagagtaggcgaggggtctcagctgttgcttgaagacccggtgtcgtagtcgctcgaaccagccgtgtctcgcgatgcgccagtagctgtactcgccgaggaacttggggcgctgctcatgagtccagacctctaccgacgcgtgcatgggcatgacatgatggctcatgaggaatccgccgaggaggcggtagagtttctgctggcccccatcgatggcgtaggagcgctcgtaaacatccactggcacgtctggtgccgatgttgctggcatacacgttttgatgggactcaagacactgtgccatcggtaaatcaatttttgtcagcatctctgcttgggactgcgcgatggcttgtcagccttgccgtaccgagccagctccttgcgcaccgcatcgagctcctccctcacatcgcgcagctcctgacgaagcccggcgagcgatctgttctggtcgatctggttgtcatgcacaatgcctatcgcgtctgtgagggcattcactctatccaccaaagcctccatgtttcagtaagatgcagaagggtgtcgctgttgctttatgagagtctcaaagtgctgcagcacattttcttgggaaaagataagaggatgacagttcttgaccgcatgaagcagagcctgctgtctcgctacggagcgcacggtggtacggtcgagaagaagcaccttcccccggccgtggaggaggtcgtgcaacaccaccacgtcaaccgcatcatcccggtgatcgtcagggaggaccacgaggtccacgtagagcagtcgatcctgcccatcatcgagaacctggaggaggaaggcgacgtgcaggagcggacccaggcgccgtcgttccgggaagtccatcacgacatgccgcaggacctcgtaagcaagcgcatgcagaaccgacaggccatggtggacatcggcaggaacatcaccgaggacgacacccaggagaccgtggaggacgaacccatcgtggaacaccgagtcttccgccacgttattcaggagtgccagcccgtcatacgcagacgaattcggaaatcgcatgtcgtccacacgatagcccctatcttcgagaagagcctgcgcatctcgcacattgccgatctgcacgagcacaaggcgattaccatggccgagtggaatcgtcagcagaggcagctcgagaatggtggtcaatccagcggtacaggcggggaagtcactgaggctacgcaggagtcttgaacccgtcgtagtagaggtgatgaatggtcacagccctgtctggaatattgcagacgctctgtaggatctgagtggtgagaacatctaagcgagctttccacactttcttctgaggcagtggcacctcctccttcttactatattgaaagcatgatggaatgactgtgccctcgctgtcgacgtatttgtcggggttgaatctgatcattatcaagggccgaaagcctgtgtcttggtagatctccatcatccgcttgttctcgcacggataagaagattcgctggcgtgctggttttcgtcacattcgatcacgatcgcgtgcgaaaagcactcgagaaaggcatcaggacgtctgcgcgagcacccacccagagcccgatcgaaagtcagctgtagccccttcagacgctcgtcagtgctagcaagctcagatatgtgttggcgaaagcgtgtctcttttgttttccaattgcgagccacaggctcgtcagggtacagatggatgtaacagcgaatacagtacccatcgtacttgtttctggatgtcatggcctgacagccatttttgcacctgtaattcatgacatcaatcatgcccaggggttcgccgtgtgccctacagtgcgtggccgctcgatcaattattacccctaacgctgacaatgtcagtcattgagatctcagattcgttctgagattccttcctcacatacttaccaccccctccacggtatgaggcctcaagccatcagaacttgtttcttccgtatgcgctctcttggatgctcctttcgacacatctccgatgcactcgctgtctctcagagacagctctaccggtggcagcgcgcgcctctgctcatgactcgccccctggacagaagtcatctgcgtcggaagacgacaatagagatcggagacgctgttatccgtttggtaacccagcgcaacattgtcaccctgggtgacattcgaaacaacctcaggtccaccctctcggtgttggcctccaaacagtccatctctcgggtgctcaaagaacgcaagtggacgaggaaaagaggcgccaaagcgtacacagaggcggacgcctccagatgtgcagcattcgcgagatccatagcgagcgggctcagctcaaggctgctcgccctcgacgagtgtgccttctttctcaaccacagccagcactacgcctggagccctcgaggctccagagctgtgatcagtaggcccggcaaccgtatccgggcctactcgctcctgctgtgcatgggatacagtggacacacctcgtggcgcctgttcgagggagccgtcaccgcctctcgctttcagaagttcctgacactcatcccacacagcagcgacctcattctggacaacgcagccatccaccgcgccactcgtgtcctgagactccaggggagcccaaccatttctgatacagccgatgcccggggcatcggtctcagatacctcccgccctactgtccccagctcaacccagtggagctggcgttcaacaccatccggcagttcgtgaatcacagacagcccagggatccggtcgccctggagcgatgcataacggaggccatcgcacggctgaccccccaagtctgctctgccacctttcggaagtgcttctcggcattctcatagagaatctcggtgcgtctggatctggggaaagaaatctggcagacaccaaagagatgaggagaccgaagaaacctccgaaagatccgcagctccgcctgcaggagcagtacctcgtctacgccaagaacaagctcttcaaggagaagaaggtcaaggagaaggctgtcagggaggacgtgaaggagcgcgcagtaacaaacgcccactccactttcacagtggtcaagaccacatggaggagcctctgcaaacgtgcagcacgcctcttggatttggagactgctctgcgcgaggtcaacaccaccatcgccgaggcctatctcctggccaatgtgcacgtcgtccgcctctgcaccgccggcatccctctgtgcaagctcaaccagtccttcttctaccagtgcctctcggcggtgagcgtcagtgagagggagaaaccggagatcgaagacttcgagctccgcatgtccgtcaagctgtacagatcctggcgcccccaggggtaccagccgcctgacagcaccaacctctcgtctggtttccaccagcaggccagcaggcagatggcgacgaacatgcgcaactcgacagtcgccaacttctacaggaggttcaagaggtatctcaagttgcgctactccctggatggcaagcaggcctacgaggccctgcttgccatccgagccgccgagtacgagggtgaagaccccctcgtgaagcgatacagagatatgctgcccccgaagcccgagaagagtcgtctggaagacaatccagagctggtcatgccccttcagcaccattttctgcgcgctttcgaggctgcgcaggccgaccagcaggcagagaaacctccgcgtctcttctctctggtgcccacgaagcagggattcgaatgcagccacatcaagatctgttcgagcggcctgtacggcctgctgaggaggagcggcatcaaggacttgcccagcagcaaaggcttcccaggcaaagccgacgctttttggaggcgtttcttccacatctcgaagttcgagaccaccaacaggaggttcgcaggggagatcctgacggacggcaagggcgtcagcatcgtcctgaggaagccgaaagtggaacccgcggcaaaaggcgcacctctggacccagacacgttcggagaggtgtggggtctcgatcccgggcgaagagagatgtttgtcgccagcaacgacgctcagagggtgcagagagtgacgacacggcagttctaccacgacgccaagtacagggagtcgaatgcgaagatcagggtgtggcaggatcacgatccggacatcctggaggcgatccggaacatgccctccaagaagcactcacatctggaggggctgcaggcgtacgtcagctacctgttgccgatgctggactttctcttgaggtggcacatgtgcaaagctttccgggacctcaaattcaagcgctacgtgttcgccaagaaggtgctgaggaccatctgtcagaatttgacccgcgaggcgggtcagaacaccctggtgggcttcggagactggtcgaatcaggatagcgcaggcatcatcaagaagtcgcctgcaggccctgtcaagagactggagaacgagctgaggaggcactgcagggtggtcagcgtcgatgagcacctgaccagcaagctgcacagctgctgtcatcacaggatgaagcagatgtaccagcggagggtgtgcagagatggtgtgatgcggagcgtgaaggtgcacagtgtgctccattgtgacaacaatggctgccatggcatgacggtgaaccgagacgtgaacgcatcgcgcaacatcctgcacatcctgagggcgacagccggcggagggcctcgcccggaggcgttccatcggtcgagaacgaagtattcagaggcacccgccacgagcgggctgcctctgaatggccagtcgactctggcattattaccagtacctgacagccactgacattgtgggcgttaggggtaataatccatacatggccgaatgctcgcagtcaggctcttcacaacgcttcgtcgcaaggcatcgcatcccaagctctttgtgcaggaaacaacgagctttctcctctacaccccaggtcgcaacgtttgtgcaactctcaaaggagcatctcttactgactaggttgagatagccatgtggtcgagcatgcgcagcgcagaaccgagcttttccatcctctggaccaaagcatgctgtgatcttacatccctcttcttcacattgcttgttgaccacacacacaaatgcaagctcctttccatgctttgagcagtattttgctttcccgttctcgggtccaaagctggcccgggtgtcgcagccaggcttttggcactttacatttttgacatcttcgtagcccagaagctcaccatgctccttgcaatgactggctttcttcccagcagggccgaagtttggtcgcttgtcgcaccccgctgtcttacaacgtgcgctcttgttgttgtcatagcctcgctcctctccgtgccctttacagtactggggttgaccaccaacagggccgtgcgatgggtgtttgtcgcacccggcgacctcgcagcgtttgttcttgacatcgacgtagccctccagcgcgtgctctttacagtacatacgtttcccatttggttcaccaaagttcgctctcttgctacagctcaattcaagacagaactctggcatctctctgccctgatcatccgccagggggtttttccagatattttacgcagccctccagagaaaaattgatgtcgtccgagccgaaaaccaagaggatggtcaaaatgagtgtggacgccgctacgcagaccactccctccaagtcggcaggactgccgaagcccaaagcaaatccgctgaccggcctctgcattcagctcgtcatgctggccctgatgctcgcaggcttcatcgccctgatcgtgctgatcgtccggcaggacagacccgagacccacgcgcagctcctgtgccagggtctggannnnnnnnnnnnnnnnnnnnnnnnnnnnnnnnnnnnnnnnnnnnnnnnnnnnnnnnnnnnnnnnnnnnnnnnnnnnnnnnnnnnnnnnnnnnnnnnnnnnnnnnnnnnnnnnnnnnnnnnnnnnnnnnnnnnnnnnnnnnnnnnnnnnnnnnnnnnnnnnnnnnnnnnnnnnnnnnnnnnnnnnnnnnnnnnnnnnnnnnnnnnnnnnnnnnnnnnnnnnnnnnnnnnnnnnnnnnnnnnnnnnnnnnnnnnnnnnnnnnnnnnnnnnnnnnnnnnnnnnnnnnnnnnnnnnnnnnnnnnnnnnnnnnnnnnnnnnnnnnnnnnnnnnnnnnnnnnnnnnngagtgccagcccgtcatacgcagacgaattcggaaatcgcatgtcgtccacacgatagcccctatcttcgagaagagcctgcgcatctcgcacattgccgatctgcacgagcacaaggcgattaccatggccgagtggaatcgtcagcagaggcagctcgagaatggtggtcaatccagcggtacaggcggggaagtcactgaggctacgcaggagtcttgaacccgtcgtagtagaggtgatgaatggtcacagccctgtctggaatattgcagacgctctgtaggatctgagtggtgagaacatctaagcgagctttccacactttcttctgaggcagtggcacctcctccttcttactatattgaaagcatgatggaatgactgtgccctcgctgtcgacgtatttgtcggggttgaatctgatcattatcaagggccgaaagcctgtgtcttggtagatctccatcatccgcttgttctcgcacggataagaagattcgctggcgtgctggttttcgtcacattcgatcacgatcgcgtgcgaaaagcactcgagaaaggcatcaggacgtctgcgcgagcacccacccagagcccgatcgaaagtcagctgtagccccttcagacgctcgtcagtgctagcaagctcagatatgtgttggcgaaagcgtgtctcttttgttttccaattgcgagccacaggctcgtcagggtacagatggatgtaacagcgaatacagtacccatcgtacttgtttctggatgtcatggcctgacagccatttttgcacctgtaattcatgacatcaatcatgcccaggggttcgccgtgtgccctacagtgcgtggccgctcgatcaattattacccctaacgctgacaatgtcagtcattgagatctcagattcgttctgagattccttcctcacatacttaccaccccctccacggtatgaggcctcaagccatcagaacttgtttcttccgtatgcgctctcttggatgctcctttcgacacatctccgatgcactcgctgtctctcagagacagctctaccggtggcagcgcgcgcctctgctcatgactcgccccctggacagaagtcatctgcgtcggaagacgacaatagagatcggagacgctgttatccgtttggtaacccagcgcaacattgtcaccctgggtgacattcgaaacaacctcaggtccaccctctcggtgttggcctccaaacagtccatctctcgggtgctcaaagaacgcaagtggacgaggaaaagaggcgccaaagcgtacacagaggcggacgcctccagatgtgcagcattcgcgagatccatagcgagcgggctcagctcaaggctgctcgccctcgacgagtgtgccttctttctcaaccacagccagcactacgcctggagccctcgaggctccagagctgtgatcagtaggcccggcaaccgtatccgggcctactcgctcctgctgtgcatgggatacagtggacacacctcgtggcgcctgttcgagggagccgtcaccgcctctcgctttcagaagttcctgacactcatcccacacagcagcgacctcattctggacaacgcagccatccaccgcgccactcgtgtcctgagactccaggggagcccaaccatttctgatacagccgatgcccggggcatcggtctcagatacctcccgccctactgtccccagctcaacccagtggagctggcgttcaacaccatccggcagttcgtgaatcacagacagcccagggatccggtcgccctggagcgatgcataacggaggccatcgcacggctgaccccccaagtctgctctgccacctttcggaagtgcttctcggcattctcatagagaatctcggtgcgtctggatctggggaaagaaatctggcagacaccaaagagatgaggagaccgaagaaacctccgaaagatccgcagctccgcctgcaggagcagtacctcgtctacgccaagaacaagctcttcaaggagaagaaggtcaaggagaaggctgtcagggaggacgtgaaggagcgcgcagtaacaaacgcccactccactttcacagtggtcaagaccacatggaggagcctctgcaaacgtgcagcacgcctcttggatttggagactgctctgcgcgaggtcaacaccaccatcgccgaggcctatctcctggccaatgtgcacgtcgtccgcctctgcaccgccggcatccctctgtgcaagctcaaccagtccttcttctaccagtgcctctcggcggtgagcgtcagtgagagggagaaaccggagatcgaagacttcgagctccgcatgtccgtcaagctgtacagatcctggcgcccccaggggtaccagccgcctgacagcaccaacctctcgtctggtttccaccagcaggccagcaggcagatggcgacgaacatgcgcaactcgacagtcgccaacttctacaggaggttcaagaggtatctcaagttgcgctactccctggatggcaagcaggcctacgaggccctgcttgccatccgagccgccgagtacgagggtgaagaccccctcgtgaagcgatacagagatatgctgcccccgaagcccgagaagagtcgtctggaagacaatccagagctggtcatgccccttcagcaccattttctgcgcgctttcgaggctgcgcaggccgaccagcaggcagagaaacctccgcgtctcttctctctggtgcccacgaagcagggattcgaatgcagccacatcaagatctgttcgagcggcctgtacggcctgctgaggaggagcggcatcaaggacttgcccagcagcaaaggcttcccaggcaaagccgacgctttttggaggcgtttcttccacatctcgaagttcgagaccaccaacaggaggttcgcaggggagatcctgacggacggcaagggcgtcagcatcgtcctgaggaagccgaaagtggaacccgcggcaaaaggcgcacctctggacccagacacgttcggagaggtgtggggtctcgatcccgggcgaagagagatgtttgtcgccagcaacgacgctcagagggtgcagagagtgacgacacggcagttctaccacgacgccaagtacagggagtcgaatgcgaagatcagggtgtggcaggatcacgatccggacatcctggaggcgatccggaacatgccctccaagaagcactcacatctggaggggctgcaggcgtacgtcagctacctgttgccgatgctggactttctcttgaggtggcacatgtgcaaagctttccgggacctcaaattcaagcgctacgtgttcgccaagaaggtgctgaggaccatctgtcagaatttgacccgcgaggcgggtcagaacaccctggtgggcttcggagactggtcgaatcaggatagcgcaggcatcatcaagaagtcgcctgcaggccctgtcaagagactggagaacgagctgaggaggcactgcagggtggtcagcgtcgatgagcacctgaccagcaagctgcacagctgctgtcatcacaggatgaagcagatgtaccagcggagggtgtgcagagatggtgtgatgcggagcgtgaaggtgcacagtgtgctccattgtgacaacaatggctgccatggcatgacggtgaaccgagacgtgaacgcatcgcgcaacatcctgcacatcctgagggcgacagccggcggagggcctcgcccggaggcgttccatcggtcgagaacgaagtattcagaggcacccgccacgagcgggctgcctctgaatggccagtcgactctggcattattaccagtacctgacagccactgacattgtgggcgttaggggtaataatccatacatggccgaatgctcgcagtcaggctcttcacaacgcttcgtcgcaaggcatcgcatcccaagctctttgtgcaggaaacaacgagctttctcctctacaccccaggtcgcaacgtttgtgcaactctcaaaggagcatctcttactgactaggttgagatagccatgtggtcgagcatgcgcagcgcagaaccgagcttttccatcctctggaccaaagcatgctgtgatcttacatccctcttcttcacattgcttgttgaccacacacacaaatgcaagctcctttccatgctttgagcagtattttgctttcccgttctcgggtccaaagctggcccgggtgtcgcagccaggcttttggcactttacatttttgacatcttcgtagcccagaagctcaccatgctccttgcaatgactggctttcttcccagcagggccgaagtttggtcgcttgtcgcaccccgctgtcttacaacgtgcgctcttgttgttgtcatagcctcgctcctctccgtgccctttacagtactggggttgaccaccaacagggccgtgcgatgggtgtttgtcgcacccggcgacctcgcagcgtttgttcttgacatcgacgtagccctccagcgcgtgctctttacagtacatacgtttcccatttggttcaccaaagttcgctctcttgctacagctcaattcaagacagaactctggcatctctctgccctgatcatccgccagggggtttttccagatattttacgcagccctccagagaaaaattgatgtcgtccgagccgaaaaccaagaggatggtcaaaatgagtgtggacgccgctacgcagaccactccctccaagtcggcaggactgccgaagcccaaagcaaatccgctgaccggcctctgcattcagctcgtcatgctggccctgatgctcgcaggcttcatcgccctgatcgtgctgatcgtccggcaggacagacccgagacccacgcgcagctcctgtgccagggtctggagcccgccaaggtcgagagggaggacgcctacgacaagtactccaagttggcgctggcggtgatcgtcggcctgttctcactaggcgacaaaattcactcgattgtaatcctgcgcagccacaagcagcagctgcaggccgtcacctctgcccagcagtccgcgcagcagcagcagccgctgacctccggtgaggactggggcatcggcagcgacgccggggaccgcgaggtcgacgtcgacgtcaccatccacaagcactactcagctcctatccaccgttgattctgaatcaaccaaccgcacgaggtgtctcgtgcggttccccacagtatcacaccagccgcgttatctgagagtttttttcttgccacggttgcacatacgggtgatggaggcgatcgtgcaggcatacaacaatctgctcaaggtgctcgaggacattcagaagatgggcaagctgactctgggcgaggccagcgcaatattctccagcgtgctgggtatgaagaacgccatcgacgagggcatcaaggaccccgggcagcgcgccaagggcagcggacctggcgaggactccagcaaccgcctgaaggaggctcaggtacagctcatgacgaggaacatcgagctgcagaacctcaaggagaggttcgccgagacactggagcagctgaacaagctgaacggtaacaaggggggcacccagatcgaggaactcccgtgaagaaactaatctgcccggatagaaatggctggtgctagccctgacttcgacacgttcaaggaggcccctggcaggaagcgttacaaccgccacgtgctcacggggagcgtgtgcggcaacctgctgaaccagctcttcctgtccgacagcaacatcaagatcatccagaacgcgatccggtacaaggtgtatgaaaaatcaaacgggaagctggtcatcagcaaccaggacgagaccgagctggtcatcaccatgcgcgctgtctacctagagtacggcaggaacaccccggacgacgtcaagggccagatcgcagagctcaatcaaaaggtcttagagttggtcgtgccgggaatcatcggccaggcctacgggtaccaacagtacctcatagacgcgaccacccagccggtgcccatcgccaggccctccaacgtgtcgtcctccgggacgaagaccctccgatccgtgaccagtgtcttcgcttgaggcatggactggatgagcgaggcctacagcaggtggctgaggcccgtcgacatcaaatccaaaaaacgcaggaggagacgccccggcgttgtagactgcatccggggactgctgagcgatgtttccggtcagcagtggctgtgtgtcggactcgtgtcgatcatctacaattgttcttcgtggagggtcgcgctctttatggtccccctcgcgtcggtcgtggcctgctgggggcaacgcgcccccacttcgggcctgctcctggctgcgggttccgccctcgtcgtgcggctggcagtggtggccagcaatgccgtgatcgagctggcgttgttgacatgtgtcagtgccatggccctggcagccgtgcgatgcaagagatggggtgtgtggacacgccatctcgggaccctcttcgcgcagccatcggatattgtcgccgcacagagtagggaatgactgcgggtgtctctgtgacgctcttcgtgtacgatctcgcgcaatccaacacactgacccgctggctcgggctgggcaagtacctcgcgacggtcgagatctatggcaccagggtgtgggccggcaagaacggggtggagacttccaaggacccgctcgatctgccactgcgctggacgggcgtgatcggacacaccaccaagagcagggcggagaccatggcggtcgtcgaagatctgcgcgaccacttcaaggacggggcctacgatgccatcggaaacaatggaaacacgttcgcatccgagctgtgtgtgaaattgtgcggccgcgacatcccacaatgggtcaacatgctctacgacgtgttcgcgaccctgcacttctatccgacacttcagctgttcaagcccgttcacggaacgagtatgaccgcgtagacgactgcacgcagtatcaacagggccacgtatgacgcgagaacatacacataggttccctgaaggcctgcagcgaccctggcgtcgagatcggggtcgccggcgatgctgtggtacgcgtatccgcctatcgcatccagagagagcagagcgatgagccccatgaccagcagggccccaggcagagtcgttgcgggggctctcaggagcatgactgcgagaagcgggttcacgccgaggctcaccatcgacatgccgttcacgaagcttctctgcgaagacggagacggggcgctccagcgggcgagcagcgcactcttggctatctgcaagacgagcaggatcccgatgaccgcattcgccgcgactcctatcttactgaatgcccgtggcatctgtataagcagccgacatattctcgcctcagcacacgaccctgcctctctggtaggcccgcagctcctccagatcattcgtgatgtctttcgaggagaatggagagctgtagcccctggaggccatcctcgccagcttgactgggtcgagaggaccggtgtgcgtccgcacgtgcttggccacatcggggaatcggcgctcgaagaactgttcccagcaccgccggttgatgttgcagaccttcggtggctgggtgaagagctctccattcaggtccctgtcaacgtacctgctgtatctcccgcgtcccctgccgtatcggccaaacagctgtttgcagaggtcgtccagggcctccgtgcaattcttccccgacagggtgagcccgaagaccctcgacaaactcttgctgtaggcgggcagcatgcgcgtgttccagccctccagtatgcaggctatgtactgggcatttgcactgtgggacagccacgcgttgtacgtccgctggcggctctcctgatcatctggcatcgctacgctggcgtccatgacgtagaagaggagacggaggacatcggtgaggtgctcggcgggaaagtagtccagcaggcggaactcgaagccgaatcccttgcccttcgaagggtcgcgcctgaagtccgtgccgatgatggggaccaggggatcgttgccgttgctgagtatggctccgtaccgcgtctggatgtatcttctcagcgcgagcggagatgacatcgtctgcttgtacagggtcctgatccactcgggaaacttgtccacgctctccttgactgtctgcatgatcttcttcagggcgcgctgcatctgtccggtatccagggggttgtacgcgtctggctgacgaaggacgagatcctccctctgccgcggataccgtgccgcaaggatacgctcgtagtactgcttcagggggtctttgccgtcgtccgtggagcgctcctccgggaagccgagcatgccgatgttgctgccgagagccgtggccaacgactcctcaccgtgcctgaccgagagctgcgtgaagccgtttccgtcgaggatgcaggcagggctcgggcatcccagcactgccatcaacagcggctctatccactgcaccatctgcgcggccgcctcgtgtatacggatgaa

SEQ ID NO: 36 - DNA, 22205 bp, unidentified
  misc_feature 1..22205: note = Fanzor polypeptide
  variation 7991..8331: note = n is any nucleotide
  variation 22004..22205: note = n is any nucleotide
  source 1..22205: mol_type = other DNA
ggagagggtcgtgcgcgtagcattctgctcggtcacggaggcagaggtgctccgggcgttgagctgtccccgcaaggtggacaggaacctcgtggatgcccagatcgctcgccgcatcgtggacagactggtggggtaccgggtgtcacccatcctgtggaggcacctcaagagcggactgtcagcaggacgtgtgcagtccgctgcgctcaggctgctcgtggagcgcgagagggagatcgaaggctttcgaccagagaagtcctggcagctcacagcgagcttcgaggatggcaagatcagcggtacgtaccagaacgctttcgcaacgcgtgatgaggctcgcgaggccctggaaggaatgaaggatcacgagtacatcatatcgcacatcgatcgaagtgtggaacatacctccgctcctcctccactgcggaccgccaccctgcagcaggaggccggcagcaggttcggcatgtctccgaaggtcaccatgaccctggcgcagggcctgtacgaggctggtcacatcacgtaccaccggaccgactctgtggacatgtctccggaggcgatgcagggcctgcggacctacatcagcagcacgcacggggagaaatacctcgcagaccagcagcgcaactttcgacaggctccaggagcgcagatggcacacgagtgcatcaggccgacgagctggacgaggacggcgatcactgggggtgcccagaggctgtacgacctgatatggaccagagcggtcgcatcacagatggcacgtgctgcctacgacgtctgcaagctgcaggtgccatacagagactcgcacttcctgagcagtgcgagaagcgtggagttcgatggctttctcagggctagcggacacggcggtgaccctcatggctctggcacgatggcaatgctggcgaacctgaagtgtgggcagaggctgactctgcacgagggcaccgctcgagagcagctcacatctccacccccacattacagtgagagcgggctcgtcaaggagctggaacgctgtggattgggcaggcccagcacctacgccacaattgtgacgaccctccaggacaggcggtactgtgagagtgcggcacccagcaaggtcaagcaacgcttggaagtgatgcacctcagggaggggaaaatcacgatgggcaagagggagcaggaggccccaaacgtgaggggtcgtttgacggtcaccgagatcggccaggacgtctacagctacctcgacaagcactttggatgcataacggacatcgcattcacccgagacctggagctagaactggacaggatcgccgcaggcagcgtgaaatggatggacatcgtgaagaagttccatgacgagttcgggccgactgtcgacaccctgatgaagacgaaggcgctggagaagcgcatcccgcgggcaatcagagaggtgcgcaggatcggcaggcacccccacacgggccagatgatcgagacatgcaaggcccggtacggcccggtggtgaagatgggcgacggctacaagaccgtcttcgcgaagatcgacgctgcatcgatggacagtctggacttgaataccgcggtcaccatgctcaacaggaagatgcattgacgattgttgtgtaaaagtcgtgctcaaacccgactttttcttgagaataatcactcgttcactagagactgagggaccggtggtggagcctcgacagggcccttcgaccccttctcggcggcgcgctgatgcagcagcatggcgagccttctcaggaagcgtctgagccatcgatcggactcgtcatccgtcagcttccacggcagatggatctcccggatgagggctcgactgaacgtgatgcagtttcgatcgcgcaggaggctgtagccattgtccgggaatttgcctgcacggaggcgctgcagcgcagtctcgacctcaccgaccgtgctgacaccggcgaagaccttctcgaagggctcgaagtaccgtgggtagcgcaggatagacgtgatgcctccaccagagtaggcgaggggtctcagctgttgcttgaagacccggtgtcgtagtcgctcgaaccagccgtgtctcgcgatgcgccagtagctgtactcgccgaggaacttggggcgctgctcatgagtccagacctctaccgacgcgtgcatgggcatgacatgatggctcatgaggaatccgccgaggaggcggtagagtttctgctggcccccatcgatggcgtaggagcgctcgtaaacatccactggcacgtctggtgccgatgttgctggcatacacgttttgatgggactcaagacactgtgccatcggtaaatcaatttttgtcagcatctctgcttgggactgcgcgatggcttgtcagccttgccgtaccgagccagctccttgcgcaccgcatcgagctcctccctcacatcgcgcagctcctgacgaagcccggcgagcgatctgttctggtcgatctggttgtcatgcacaatgcctatcgcgtctgtgagggcattcactctatccaccaaagcctccatgtttcagtaagatgcagaagggtgtcgctgttgctttatgagagtctcaaagtgctgcagcacattttcttgggaaaagataagaggatgacagttcttgaccgcatgaagcagagcctgctgtctcgctacggagcgcacggtggtacggtcgagaagaagcaccttcccccggccgtggaggaggtcgtgcaacaccaccacgtcaaccgcatcatcccggtgatcgtcagggaggaccacgaggtccacgtagagcagtcgatcctgcccatcatcgagaacctggaggaggaaggcgacgtgcaggagcggacccaggcgccgtcgttccgggaagtccatcacgacatgccgcaggacctcgtaagcaagcgcatgcagaaccgacaggccatggtggacatcggcaggaacatcaccgaggacgacacccaggagaccgtggaggacgaacccatcgtggaacaccgagtcttccgccacgttattcaggagtgccagcccgtcatacgcagacgaattcggaaatcgcatgtcgtccacacgatagcccctatcttcgagaagagcctgcgcatctcgcacattgccgatctgcacgagcacaaggcgattaccatggccgagtggaatcgtcagcagaggcagctcgagaatggtggtcaatccagcggtacaggcggggaagtcactgaggctacgcaggagtcttgaacccgtcgtagtagaggtgatgaatggtcacagccctgtctggaatattgcagacgctctgtaggatctgagtggtgagaacatctaagcgagctttccacactttcttctgaggcagtggcacctcctccttcttactatattgaaagcatgatggaatgactgtgccctcgctgtcgacgtatttgtcggggttgaatctgatcattatcaagggccgaaagcctgtgtcttggtagatctccatcatccgcttgttctcgcacggataagaagattcgctggcgtgctggttttcgtcacattcgatcacgatcgcgtgcgaaaagcactcgagaaaggcatcaggacgtctgcgcgagcacccacccagagcccgatcgaaagtcagctgtagccccttcagacgctcgtcagtgctagcaagctcagatatgtgttggcgaaagcgtgtctcttttgttttccaattgcgagccacaggctcgtcagggtacagatggatgtaacagcgaatacagtacccatcgtacttgtttctggatgtcatggcctgacagccatttttgcacctgtaattcatgacatcaatcatgcccaggggttcgccgtgtgccctacagtgcgtggccgctcgatcaattattacccctaacgctgacaatgtcagtcattgagatctcagattcgttctgagattccttcctcacatacttaccaccccctccacggtatgaggcctcaagccatcagaacttgtttcttccgtatgcgctctcttggatgctcctttcgacacatctccgatgcactcgctgtctctcagagacagctctaccggtggcagcgcgcgcctctgctcatgactcgccccctggacagaagtcatctgcgtcggaagacgacaatagagatcggagacgctgttatccgtttggtaacccagcgcaacattgtcaccctgggtgacattcgaaacaacctcaggtccaccctctcggtgttggcctccaaacagtccatctctcgggtgctcaaagaacgcaagtggacgaggaaaagaggcgccaaagcgtacacagaggcggacgcctccagatgtgcagcattcgcgagatccatagcgagcgggctcagctcaaggctgctcgccctcgacgagtgtgccttctttctcaaccacagccagcactacgcctggagccctcgaggctccagagctgtgatcagtaggcccggcaaccgtatccgggcctactcgctcctgctgtgcatgggatacagtggacacacctcgtggcgcctgttcgagggagccgtcaccgcctctcgctttcagaagttcctgacactcatcccacacagcagcgacctcattctggacaacgcagccatccaccgcgccactcgtgtcctgagactccaggggagcccaaccatttctgatacagccgatgcccggggcatcggtctcagatacctcccgccctactgtccccagctcaacccagtggagctggcgttcaacaccatccggcagttcgtgaatcacagacagcccagggatccggtcgccctggagcgatgcataacggaggccatcgcacggctgaccccccaagtctgctctgccacctttcggaagtgcttctcggcattctcatagagaatctcggtgcgtctggatctggggaaagaaatctggcagacaccaaagagatgaggagaccgaagaaacctccgaaagatccgcagctccgcctgcaggagcagtacctcgtctacgccaagaacaagctcttcaaggagaagaaggtcaaggagaaggctgtcagggaggacgtgaaggagcgcgcagtaacaaacgcccactccactttcacagtggtcaagaccacatggaggagcctctgcaaacgtgcagcacgcctcttggatttggagactgctctgcgcgaggtcaacaccaccatcgccgaggcctatctcctggccaatgtgcacgtcgtccgcctctgcaccgccggcatccctctgtgcaagctcaaccagtccttcttctaccagtgcctctcggcggtgagcgtcagtgagagggagaaaccggagatcgaagacttcgagctccgcatgtccgtcaagctgtacagatcctggcgcccccaggggtaccagccgcctgacagcaccaacctctcgtctggtttccaccagcaggccagcaggcagatggcgacgaacatgcgcaactcgacagtcgccaacttctacaggaggttcaagaggtatctcaagttgcgctactccctggatggcaagcaggcctacgaggccctgcttgccatccgagccgccgagtacgagggtgaagaccccctcgtgaagcgatacagagatatgctgcccccgaagcccgagaagagtcgtctggaagacaatccagagctggtcatgccccttcagcaccattttctgcgcgctttcgaggctgcgcaggccgaccagcaggcagagaaacctccgcgtctcttctctctggtgcccacgaagcagggattcgaatgcagccacatcaagatctgttcgagcggcctgtacggcctgctgaggaggagcggcatcaaggacttgcccagcagcaaaggcttcccaggcaaagccgacgctttttggaggcgtttcttccacatctcgaagttcgagaccaccaacaggaggttcgcaggggagatcctgacggacggcaagggcgtcagcatcgtcctgaggaagccgaaagtggaacccgcggcaaaaggcgcacctctggacccagacacgttcggagaggtgtggggtctcgatcccgggcgaagagagatgtttgtcgccagcaacgacgctcagagggtgcagagagtgacgacacggcagttctaccacgacgccaagtacagggagtcgaatgcgaagatcagggtgtggcaggatcacgatccggacatcctggaggcgatccggaacatgccctccaagaagcactcacatctggaggggctgcaggcgtacgtcagctacctgttgccgatgctggactttctcttgaggtggcacatgtgcaaagctttccgggacctcaaattcaagcgctacgtgttcgccaagaaggtgctgaggaccatctgtcagaatttgacccgcgaggcgggtcagaacaccctggtgggcttcggagactggtcgaatcaggatagcgcaggcatcatcaagaagtcgcctgcaggccctgtcaagagactggagaacgagctgaggaggcactgcagggtggtcagcgtcgatgagcacctgaccagcaagctgcacagctgctgtcatcacaggatgaagcagatgtaccagcggagggtgtgcagagatggtgtgatgcggagcgtgaaggtgcacagtgtgctccattgtgacaacaatggctgccatggcatgacggtgaaccgagacgtgaacgcatcgcgcaacatcctgcacatcctgagggcgacagccggcggagggcctcgcccggaggcgttccatcggtcgagaacgaagtattcagaggcacccgccacgagcgggctgcctctgaatggccagtcgactctggcattattaccagtacctgacagccactgacattgtgggcgttaggggtaataatccatacatggccgaatgctcgcagtcaggctcttcacaacgcttcgtcgcaaggcatcgcatcccaagctctttgtgcaggaaacaacgagctttctcctctacaccccaggtcgcaacgtttgtgcaactctcaaaggagcatctcttactgactaggttgagatagccatgtggtcgagcatgcgcagcgcagaaccgagcttttccatcctctggaccaaagcatgctgtgatcttacatccctcttcttcacattgcttgttgaccacacacacaaatgcaagctcctttccatgctttgagcagtattttgctttcccgttctcgggtccaaagctggcccgggtgtcgcagccaggcttttggcactttacatttttgacatcttcgtagcccagaagctcaccatgctccttgcaatgactggctttcttcccagcagggccgaagtttggtcgcttgtcgcaccccgctgtcttacaacgtgcgctcttgttgttgtcatagcctcgctcctctccgtgccctttacagtactggggttgaccaccaacagggccgtgcgatgggtgtttgtcgcacccggcgacctcgcagcgtttgttcttgacatcgacgtagccctccagcgcgtgctctttacagtacatacgtttcccatttggttcaccaaagttcgctctcttgctacagctcaattcaagacagaactctggcatctctctgccctgatcatccgccagggggtttttccagatattttacgcagccctccagagaaaaattgatgtcgtccgagccgaaaaccaagaggatggtcaaaatgagtgtggacgccgctacgcagaccactccctccaagtcggcaggactgccgaagcccaaagcaaatccgctgaccggcctctgcattcagctcgtcatgctggccctgatgctcgcaggcttcatcgccctgatcgtgctgatcgtccggcaggacagacccgagacccacgcgcagctcctgtgccagggtctggannnnnnnnnnnnnnnnnnnnnnnnnnnnnnnnnnnnnnnnnnnnnnnnnnnnnnnnnnnnnnnnnnnnnnnnnnnnnnnnnnnnnnnnnnnnnnnnnnnnnnnnnnnnnnnnnnnnnnnnnnnnnnnnnnnnnnnnnnnnnnnnnnnnnnnnnnnnnnnnnnnnnnnnnnnnnnnnnnnnnnnnnnnnnnnnnnnnnnnnnnnnnnnnnnnnnnnnnnnnnnnnnnnnnnnnnnnnnnnnnnnnnnnnnnnnnnnnnnnnnnnnnnnnnnnnnnnnnnnnnnnnnnnnnnnnnnnnnnnnnnnnnnnnnnnnnnnnnnnnnnnnnnnnnnnnnnnnnnnnngagtgccagcccgtcatacgcagacgaattcggaaatcgcatgtcgtccacacgatagcccctatcttcgagaagagcctgcgcatctcgcacattgccgatctgcacgagcacaaggcgattaccatggccgagtggaatcgtcagcagaggcagctcgagaatggtggtcaatccagcggtacaggcggggaagtcactgaggctacgcaggagtcttgaacccgtcgtagtagaggtgatgaatggtcacagccctgtctggaatattgcagacgctctgtaggatctgagtggtgagaacatctaagcgagctttccacactttcttctgaggcagtggcacctcctccttcttactatattgaaagcatgatggaatgactgtgccctcgctgtcgacgtatttgtcggggttgaatctgatcattatcaagggccgaaagcctgtgtcttggtagatctccatcatccgcttgttctcgcacggataagaagattcgctggcgtgctggttttcgtcacattcgatcacgatcgcgtgcgaaaagcactcgagaaaggcatcaggacgtctgcgcgagcacccacccagagcccgatcgaaagtcagctgtagccccttcagacgctcgtcagtgctagcaagctcagatatgtgttggcgaaagcgtgtctcttttgttttccaattgcgagccacaggctcgtcagggtacagatggatgtaacagcgaatacagtacccatcgtacttgtttctggatgtcatggcctgacagccatttttgcacctgtaattcatgacatcaatcatgcccaggggttcgccgtgtgccctacagtgcgtggccgctcgatcaattattacccctaacgctgacaatgtcagtcattgagatctcagattcgttctgagattccttcctcacatacttaccaccccctccacggtatgaggcctcaagccatcagaacttgtttcttccgtatgcgctctcttggatgctcctttcgacacatctccgatgcactcgctgtctctcagagacagctctaccggtggcagcgcgcgcctctgctcatgactcgccccctggacagaagtcatctgcgtcggaagacgacaatagagatcggagacgctgttatccgtttggtaacccagcgcaacattgtcaccctgggtgacattcgaaacaacctcaggtccaccctctcggtgttggcctccaaacagtccatctctcgggtgctcaaagaacgcaagtggacgaggaaaagaggcgccaaagcgtacacagaggcggacgcctccagatgtgcagcattcgcgagatccatagcgagcgggctcagctcaaggctgctcgccctcgacgagtgtgccttctttctcaaccacagccagcactacgcctggagccctcgaggctccagagctgtgatcagtaggcccggcaaccgtatccgggcctactcgctcctgctgtgcatgggatacagtggacacacctcgtggcgcctgttcgagggagccgtcaccgcctctcgctttcagaagttcctgacactcatcccacacagcagcgacctcattctggacaacgcagccatccaccgcgccactcgtgtcctgagactccaggggagcccaaccatttctgatacagccgatgcccggggcatcggtctcagatacctcccgccctactgtccccagctcaacccagtggagctggcgttcaacaccatccggcagttcgtgaatcacagacagcccagggatccggtcgccctggagcgatgcataacggaggccatcgcacggctgaccccccaagtctgctctgccacctttcggaagtgcttctcggcattctcatagagaatctcggtgcgtctggatctggggaaagaaatctggcagacaccaaagagatgaggagaccgaagaaacctccgaaagatccgcagctccgcctgcaggagcagtacctcgtctacgccaagaacaagctcttcaaggagaagaaggtcaaggagaaggctgtcagggaggacgtgaaggagcgcgcagtaacaaacgcccactccactttcacagtggtcaagaccacatggaggagcctctgcaaacgtgcagcacgcctcttggatttggagactgctctgcgcgaggtcaacaccaccatcgccgaggcctatctcctggccaatgtgcacgtcgtccgcctctgcaccgccggcatccctctgtgcaagctcaaccagtccttcttctaccagtgcctctcggcggtgagcgtcagtgagagggagaaaccggagatcgaagacttcgagctccgcatgtccgtcaagctgtacagatcctggcgcccccaggggtaccagccgcctgacagcaccaacctctcgtctggtttccaccagcaggccagcaggcagatggcgacgaacatgcgcaactcgacagtcgccaacttctacaggaggttcaagaggtatctcaagttgcgctactccctggatggcaagcaggcctacgaggccctgcttgccatccgagccgccgagtacgagggtgaagaccccctcgtgaagcgatacagagatatgctgcccccgaagcccgagaagagtcgtctggaagacaatccagagctggtcatgccccttcagcaccattttctgcgcgctttcgaggctgcgcaggccgaccagcaggcagagaaacctccgcgtctcttctctctggtgcccacgaagcagggattcgaatgcagccacatcaagatctgttcgagcggcctgtacggcctgctgaggaggagcggcatcaaggacttgcccagcagcaaaggcttcccaggcaaagccgacgctttttggaggcgtttcttccacatctcgaagttcgagaccaccaacaggaggttcgcaggggagatcctgacggacggcaagggcgtcagcatcgtcctgaggaagccgaaagtggaacccgcggcaaaaggcgcacctctggacccagacacgttcggagaggtgtggggtctcgatcccgggcgaagagagatgtttgtcgccagcaacgacgctcagagggtgcagagagtgacgacacggcagttctaccacgacgccaagtacagggagtcgaatgcgaagatcagggtgtggcaggatcacgatccggacatcctggaggcgatccggaacatgccctccaagaagcactcacatctggaggggctgcaggcgtacgtcagctacctgttgccgatgctggactttctcttgaggtggcacatgtgcaaagctttccgggacctcaaattcaagcgctacgtgttcgccaagaaggtgctgaggaccatctgtcagaatttgacccgcgaggcgggtcagaacaccctggtgggcttcggagactggtcgaatcaggatagcgcaggcatcatcaagaagtcgcctgcaggccctgtcaagagactggagaacgagctgaggaggcactgcagggtggtcagcgtcgatgagcacctgaccagcaagctgcacagctgctgtcatcacaggatgaagcagatgtaccagcggagggtgtgcagagatggtgtgatgcggagcgtgaaggtgcacagtgtgctccattgtgacaacaatggctgccatggcatgacggtgaaccgagacgtgaacgcatcgcgcaacatcctgcacatcctgagggcgacagccggcggagggcctcgcccggaggcgttccatcggtcgagaacgaagtattcagaggcacccgccacgagcgggctgcctctgaatggccagtcgactctggcattattaccagtacctgacagccactgacattgtgggcgttaggggtaataatccatacatggccgaatgctcgcagtcaggctcttcacaacgcttcgtcgcaaggcatcgcatcccaagctctttgtgcaggaaacaacgagctttctcctctacaccccaggtcgcaacgtttgtgcaactctcaaaggagcatctcttactgactaggttgagatagccatgtggtcgagcatgcgcagcgcagaaccgagcttttccatcctctggaccaaagcatgctgtgatcttacatccctcttcttcacattgcttgttgaccacacacacaaatgcaagctcctttccatgctttgagcagtattttgctttcccgttctcgggtccaaagctggcccgggtgtcgcagccaggcttttggcactttacatttttgacatcttcgtagcccagaagctcaccatgctccttgcaatgactggctttcttcccagcagggccgaagtttggtcgcttgtcgcaccccgctgtcttacaacgtgcgctcttgttgttgtcatagcctcgctcctctccgtgccctttacagtactggggttgaccaccaacagggccgtgcgatgggtgtttgtcgcacccggcgacctcgcagcgtttgttcttgacatcgacgtagccctccagcgcgtgctctttacagtacatacgtttcccatttggttcaccaaagttcgctctcttgctacagctcaattcaagacagaactctggcatctctctgccctgatcatccgccagggggtttttccagatattttacgcagccctccagagaaaaattgatgtcgtccgagccgaaaaccaagaggatggtcaaaatgagtgtggacgccgctacgcagaccactccctccaagtcggcaggactgccgaagcccaaagcaaatccgctgaccggcctctgcattcagctcgtcatgctggccctgatgctcgcaggcttcatcgccctgatcgtgctgatcgtccggcaggacagacccgagacccacgcgcagctcctgtgccagggtctggagcccgccaaggtcgagagggaggacgcctacgacaagtactccaagttggcgctggcggtgatcgtcggcctgttctcactaggcgacaaaattcactcgattgtaatcctgcgcagccacaagcagcagctgcaggccgtcacctctgcccagcagtccgcgcagcagcagcagccgctgacctccggtgaggactggggcatcggcagcgacgccggggaccgcgaggtcgacgtcgacgtcaccatccacaagcactactcagctcctatccaccgttgattctgaatcaaccaaccgcacgaggtgtctcgtgcggttccccacagtatcacaccagccgcgttatctgagagtttttttcttgccacggttgcacatacgggtgatggaggcgatcgtgcaggcatacaacaatctgctcaaggtgctcgaggacattcagaagatgggcaagctgactctgggcgaggccagcgcaatattctccagcgtgctgggtatgaagaacgccatcgacgagggcatcaaggaccccgggcagcgcgccaagggcagcggacctggcgaggactccagcaaccgcctgaaggaggctcaggtacagctcatgacgaggaacatcgagctgcagaacctcaaggagaggttcgccgagacactggagcagctgaacaagctgaacggtaacaaggggggcacccagatcgaggaactcccgtgaagaaactaatctgcccggatagaaatggctggtgctagccctgacttcgacacgttcaaggaggcccctggcaggaagcgttacaaccgccacgtgctcacggggagcgtgtgcggcaacctgctgaaccagctcttcctgtccgacagcaacatcaagatcatccagaacgcgatccggtacaaggtgtatgaaaaatcaaacgggaagctggtcatcagcaaccaggacgagaccgagctggtcatcaccatgcgcgctgtctacctagagtacggcaggaacaccccggacgacgtcaagggccagatcgcagagctcaatcaaaaggtcttagagttggtcgtgccgggaatcatcggccaggcctacgggtaccaacagtacctcatagacgcgaccacccagccggtgcccatcgccaggccctccaacgtgtcgtcctccgggacgaagaccctccgatccgtgaccagtgtcttcgcttgaggcatggactggatgagcgaggcctacagcaggtggctgaggcccgtcgacatcaaatccaaaaaacgcaggaggagacgccccggcgttgtagactgcatccggggactgctgagcgatgtttccggtcagcagtggctgtgtgtcggactcgtgtcgatcatctacaattgttcttcgtggagggtcgcgctctttatggtccccctcgcgtcggtcgtggcctgctgggggcaacgcgcccccacttcgggcctgctcctggctgcgggttccgccctcgtcgtgcggctggcagtggtggccagcaatgccgtgatcgagctggcgttgttgacatgtgtcagtgccatggccctggcagccgtgcgatgcaagagatggggtgtgtggacacgccatctcgggaccctcttcgcgcagccatcggatattgtcgccgcacagagtagggaatgactgcgggtgtctctgtgacgctcttcgtgtacgatctcgcgcaatccaacacactgacccgctggctcgggctgggcaagtacctcgcgacggtcgagatctatggcaccagggtgtgggccggcaagaacggggtggagacttccaaggacccgctcgatctgccactgcgctggacgggcgtgatcggacacaccaccaagagcagggcggagaccatggcggtcgtcgaagatctgcgcgaccacttcaaggacggggcctacgatgccatcggaaacaatggaaacacgttcgcatccgagctgtgtgtgaaattgtgcggccgcgacatcccacaatgggtcaacatgctctacgacgtgttcgcgaccctgcacttctatccgacacttcagctgttcaagcccgttcacggaacgagtatgaccgcgtagacgactgcacgcagtatcaacagggccacgtatgacgcgagaacatacacataggttccctgaaggcctgcagcgaccctggcgtcgagatcggggtcgccggcgatgctgtggtacgcgtatccgcctatcgcatccagagagagcagagcgatgagccccatgaccagcagggccccaggcagagtcgttgcgggggctctcaggagcatgactgcgagaagcgggttcacgccgaggctcaccatcgacatgccgttcacgaagcttctctgcgaagacggagacggggcgctccagcgggcgagcagcgcactcttggctatctgcaagacgagcaggatcccgatgaccgcattcgccgcgactcctatcttactgaatgcccgtggcatctgtataagcagccgacatattctcgcctcagcacacgaccctgcctctctggtaggcccgcagctcctccagatcattcgtgatgtctttcgaggagaatggagagctgtagcccctggaggccatcctcgccagcttgactgggtcgagaggaccggtgtgcgtccgcacgtgcttggccacatcggggaatcggcgctcgaagaactgttcccagcaccgccggttgatgttgcagaccttcggtggctgggtgaagagctctccattcaggtccctgtcaacgtacctgctgtatctcccgcgtcccctgccgtatcggccaaacagctgtttgcagaggtcgtccagggcctccgtgcaattcttccccgacagggtgagcccgaagaccctcgacaaactcttgctgtaggcgggcagcatgcgcgtgttccagccctccagtatgcaggctatgtactgggcatttgcactgtgggacagccacgcgttgtacgtccgctggcggctctcctgatcatctggcatcgctacgctggcgtccatgacgtagaagaggagacggaggacatcggtgaggtgctcggcgggaaagtagtccagcaggcggaactcgaagccgaatcccttgcccttcgaagggtcgcgcctgaagtccgtgccgatgatggggaccaggggatcgttgccgttgctgagtatggctccgtaccgcgtctggatgtatcttctcagcgcgagcggagatgacatcgtctgcttgtacagggtcctgatccactcgggaaacttgtccacgctctccttgactgtctgcatgatcttcttcagggcgcgctgcatctgtccggtatccagggggttgtacgcgtctggctgacgaaggacgagatcctccctctgccgcggataccgtgccgcaaggatacgctcgtagtactgcttcagggggtctttgccgtcgtccgtggagcgctcctccgggaagccgagcatgccgatgttgctgccgagagccgtggccaacgactcctcaccgtgcctgaccgagagctgcgtgaagccgtttccgtcgaggatgcaggcagggctcgggcatcccagcactgccatcaacagcggctctatccactgcaccatctgcgcggccgcctcgtgtatacggatgaattgtttctgggatgtgttcgcggcgtggggcagggtgatgttgatgtggtagctgccgagatagtgcgggaaatcaacgaggctcttgtctttgtactggtacgtgaggtagtcggcgccctgctccgggaagatgaccgagtccggtctgctccccggtctgcccgaggacatcgtgttgatgtcgtggaggagcagatccctcgtccgcaacaggtcagcgacctgctgactcagcgtgcgcccctcccagtcacgagtgatgcactcgatgcagggcctgagtcccgagtggtcctgtttgataatcatcggatacgcccgcgtgtctcccccgtctgcgtcatgctgtacctggtagacggctgaccagaacgattgcctcatgatgaacgcctcggctaccggatacaacctcctggacgccgtcgacaggcggcgattcaggcgcgtactccatatgggtaccacctcctgctcgatcccgagaccccatgtgaccattcggcgtccgttgatataccccggttttttttctgtgtcaaaggacattcacatgtcgcttgtcgagagagtgagacaacgggtgtacatgctgtaccactcacgatgcgtgctggcggagctgcaggtcgtcaccaacaggaacacatgggtcttcgagagagatctctcggagaggtgcagcaagttccggatcgaccccgctggaatcctcacttgagccacccctgcgtcgaggagtctggcgagttgccagactcactggacttgagactgcacgagcccgagctgtcccaattcgccgccctgcaaggcgcgatggcgctgcacaggagggagcagtctgaggcggacgcggtaggcacgcttgtcagggcagtcccggttatggacgtgttggatttccacgtgggatcgggagccgaattgaccttgaggtgcagggtccctgatctcgtcgtgagattttgggggttgactgcgctccggagcgtgcacgagtctgtgccatcgtcgtagaaggcgctcttgcaggcaggagcggccgagcagagcttgctacagacgtcatctccacccacactcgataccatcttgaaagcatccccctgggcatccacgttggacacggccagcacgggcttcgctgttccaccgggcgtcgcgaggctgaggtactcaaaatccgcgacggccgtctccttcccgtccacggggatgtggcaggcgtctgctccggaccacgtcctgcctatgtgagcctcaccgttttgcgcggcacggcacacccactgagtgcctgtgtcaccccttccaccgacaactttcctggctgggaatttgctgtagtacatcggcgagctgccgtccagatatgtaaagtcttgtgcggccacctttgcgccgttccaggcgacatcgcacgaggctgcactgtcggtggtctcccctggcaagacactggtcccccctggcaactgcgcctggcacacgtaacggttgtcccccgacgaggaatatcccccgacctgcttcaggggcgggctggccgcccacctcactgacggggtctggccgctgggctgtgcctgcgcgggtctcgtcgcggatgatggtgtcactgtgctcacgaacccggacagaaggtcgcatgtcgcgaacccctccaggcgagtgctcacgagaacgataacggcgaggaccatgacgagcaccgttcctgtgaggaaccagccgctcgacgccttgggcatgaggcgatatagatctgagtgacatatttgaggaggttgggacgtggccgatccgagggtggatgaggtggggatggccttcatcgaaatctcatataaaagatctcagactctgggaaatcggtgccaatggtcggatgtctaggggcagggtcaagtccatcgttatacagtgtcaaaaagggataaggatggctaccatcgatgcgatagtcatccagggattccctggcgatgtcaaggacagggaactcaggaatcttttgtggacgcttcctgagattaaagatagctggctggaccccgacgatcccacctgcggagtcgcacgcttcttctcgcagtatggcgcattgaatgccgcacaggccatagagtgccacaccttcgatgcaaatcaccgattaagctgttcgctcgccgaacgcaaccctgagttcggcgagcagtgtcggcagcagcagagtcgagatcacttcgccgagtacacagagacatcgatagacgacaggtctggcctttcgatgctaacaggccggctgtccagcgatgcgatgtgttcagagcagtgagcgatttgctgcatattttaggaagcacgtcaaacagcggagggagagctcggggcgctctcccaacaaagtcttcatcggcaagctggctgccacgacggataaggtcggctctgcacttctcgctgattctgagcaaaccttggctctgtgctgggatgttcatccatgaaggcatggcaatcgtgcaggaggatgtcgcgtatgagctgagggcatggagagacagcattcaggacatcaggctggtgcccggcaggcagccttggatgcctgtctctatctttgtagatttcgaaagcgaggaggctgcggccggttgtgtccagaccttctcttcaggattcagggtgaccacatcgagatccgtcggggtcgtggagtttgccaagtgctagggtcaagctgggacacagtaatatgcggcctgatctgggatgcctctgatcgtgatgtatcctggccgtttcgtggagtgccatgatccaaaaggtgtcgcacgcaccctgtcttgcatggctttcgagacgaggacccttttgccatcggctgcttcacatagctctatcgctatggtcacgtcttgaccgagcagactgtaagcctcgcccatgacgcgaccacacaccgtgcccacgtgtgccgagcagtgcacaccggccagagctggcacggatacagtgcccaaagcgagcttcatggccctctgcacgtgtgtcgcatcgttgttggtcatgttgcccatcccgaagaaccacccctctctacagggaacggatgtcagcccgagcttttcacacgatgcggtcataactctcagctgtgggtcatcggctggtccgaagcagacacacgacacatcccggaatacgtcttcctgcatgaccagaccagctatgcccatgatgtagctcgaggaagacgagccgacgactgtttcagcctctttgaacgccatcagagtgtctctgacatgcaccatgggtgggcgagcgcctggatcttcactccaacacgtgaccatgagttcgtaaatggggatggcatcgaggatgtacctgatctcgggcctcttcgcctctgtgccattcggaacagcctcccttactgttgccatcactgcctcgccggattccccagcataaacatcccgcccgtgcaggatctcgtgcatgagcatggcgaaggcgaaagtgtccgaagccatcgtgtgtcgtccgccacgcagcagctcgggggctgtggtcggtgtgggtcccgatggcagggagcgacgcaggcagaaacgattgctgctgtctatctcgacataggtggtgtccatcgacataccgacaaacccctgggaatgcaggtaggcgagaacacacgcgatatcatgcagggcggatgtcacgagggacagagacatagtcacggtcttgttgatcagcaggtcgtgcagtgttccgcgcggactgcgtgggtgcagaaacaccacttcagaccttcttgcgagttccagcactccgagacatgggaagagcagatcgtgctgcaatgcggccaccgcgcacgcagatctagcccgggagtgagtgtgagagggcagcgccagctctcgcagggccctgtctatccacagacgcagtgtccaccggctcgcaccagacgccagattcacatccgcatctgcccctgcgatccctggcagcgcacgctctgtcagcactgcctcccccttcatactggctgcgtgaatgcagccataccggctctttcctatgacctctctctcgatgtgcaccagcttggagggaagggtgcccaatttcttccgccgtcgccccacagctacgcctgtgatgacacaggcgatagcgacaatcacaaacaccgtcgccacaagctgagccaatgtcagggcacctatccatcgcaccgtcgcgtgtacacacggacggcacacgcaggtgaatcccttcgggcatttcaagctcccacacgcctgctgcagattgtgtgagacctgcttgacgaagccggtcggacagacgatggctgaatatatgtcgaagagggtggtgcagactgagaatggaaattgtgcgattccgaggcgctgctggaggttgatggttgggatgagggccggaggtgtcgtccaggtggtgtactgaccgatgacagcctcctgcatgtcaggagtgatgttgagcagggcggaagctattctgttcctggtgctcatcgcgacgtgaggcatgaccgccacgatgagttccgggtacaggggagtggtcgtcgcgaacgggaagccctcccaggttcgaggatccaggtagctgaagatcccagattgcatctgaccctcgctctgcaggcgttctatgtatcctgctcgtgtgaaccccacatccaacagtccagaggctacaccctgaacgactgccaacgagttgtctgtgaggaagacaccagcagcatccgcgaacaggtccaacccatggtcttggacgtacgcccagggcagctggaagctgctcagatagttcaatggacctgtgcctatcaccctgtttctcagatctgtggcaacctgtatctgggtgctgttcgcgagcgtgaatacgacccctgcgatggacgagattttgtggtcttcagcctgctcgacaatcatggccatcggcaggactccatattctgcctgcatgcaggtgaataaggtggttcccatgaaaaggagatcggcactnnnnnnnnnnnnnnnnnnnnnnnnnnnnnnnnnnnnnnnnnnnnnnnnnnnnnnnnnnnnnnnnnnnnnnnnnnnnnnnnnnnnnnnnnnnnnnnnnnnnnnnnnnnnnnnnnnnnnnnnnnnnnnnnnnnnnnnnnnnnnnnnnnnnnnnnnnnnnnnnnnnnnnnnnnnnnnnnnnnnnnnnnnnnnnnnnnnnnnnnnn

SEQ ID NO: 37 - DNA, 16305 bp, unidentified
  misc_feature 1..16305: note = Fanzor polypeptide
  source 1..16305: mol_type = other DNA
aatatccacacaagtcctgtaaaaaatttaaactatttaatctaaggcaattttctgaaaggaacaccctatatatgtatgaacttacctgcggacgcggcagatgcccctgttcaagcagcatggaaaagttatttcaatatagtttagttatcagctatcagtttctttaaaaaagcgtcacttttaacctgactgacgatactatatggaatgaatataaatgtttgtaggtatgttgtaacacaacaacataagtataatagagcttccataccgttcgttcccatcaacaataatgcatacatctatatgaaggcatattctattattttaatagaacctttacattccattacagctgaaggcagccgccgctatcgagacgcaatttcctggcgttccggagacaacaatgttatgtcatggaatactggattctagccgctctctttcttactagatggttaataaagaaattcttgtttggagattgaattttaaacttgaatagaattatggtttcaggtgaatctaaggaataataaaatgatcagttttactttacttctattggttatactcgtttttcatcaatgatatcactggataccgcggcatctccattaacgaatacctattgaaccccgccttgaggaaataattcgtaagtactttataagtaacaattttcattatcgtcaacaacccatacttattttccatgctccatcaatcgacaacgacgcagtttaccattacggtaacatttccaccctcacagcctcaaagacctttacaaatacacaaattttcacgaaacattgaatccgaaaagatactagggaaatgtgaaagttggggctagaaatagctacttttgaaatgctaatatttttttctctccataatatttttccgggtaggtaatgaaagtgaatcgtttgagctcctttttatccctcgacggaaaaaatggggcgctgcctgtgtatctgtctgtggtagtggtagattagctcccaaacggctgagccgattatcgttttgtttttttagggtcataggactcaaaggtaatgttaccccgaacgttcttagccatgtttcatgaaaattggttccaccattcaaaagttatgcgttttatttttgaattttgggggtttttcacgttgtaggtgacttgtatcagtatcgtttatccaattctgggaaagtataccgatacagggtgttgcaaaaagggtaaactaaaccgaaagggggtgactcagggggtcattctgaacaacttatgttttaggaatttgaaaattcacgaaaaaaaatataccttttccatggaaactttagtataccctttttgcaacactctgtacaccaattattttattttgaagaattcctcttgacactgaagctgtaaggttctcacctgaacatgcacgtggatgtccccgctgcggtccgtgctgaccacatatttctgaaacaaaagaaaatacgttcagagaatattccatttacaataaacggaggtcaataggaatatttaggatgatagggttttgcaaaaatggtataagtatgccgaaaaggagtgactgagcttttctcaaaaaatgaacatggcaaaaaacaattcgttaaagtaaaaccaactatattttaatatgaaatagatggagtgtaagtgcaaaagaatagtttcgacaaataacacctcaattctactactgacctcttattttgaattacctagttaggttagaatatttatgtcattgatactatgttaaacttaaaactgtgtgacagtaagggtggcttacacaacaactgattacctttgttgtgcaagccaccctaaatacaatagggacagttgtatgctttgtttttgtatgtgacacaccatcttgtcagtatatcgtttatctaagagtaaaacaaaagtgatgttaagatgtagtaggtagcccacgccaagagcgttgtttgtctatttccggacgccactgaaaacgcaccgggcgcactgtaaacacattacagcgcgactgaaaatgttaaatgccccacctcgcaactaatagttttttagggttccgtagccaaaatggcaaaaacggaacccttatagtttcgtcatgtccgtctgtccgtctgtccgtctgtccgtctgtcacagccgatttactcggaaactataggtactacagtgatgaaatttgatgggaatatgtgttgtatgaaccgctacaaaaatatgacactaaatagtaaaaaaaagaattgggggtggggccccccatacatgtaactgagggatgaaatttttttttcgatgtacatacccgtgtggggtatcaatggaaaggtcttttaaatgatataaagttttctaaaaaacattttttcttaaagtgaacggtttttgagatatcagctctcaaagtcgtaaaaagtatgtccccccccctctatttttataactacggggtataaaattctaaaaaaaatagaggtgatgcatgctaattaactctttcaacgatttttggtttgatcaaagtatctcttatagtttttgagataggttgatttaactgtaatattatatttcctattttattttattatcctcttccccccggacctcactattgagtagacgtgtaacagacctcttgtcgaattttcaaaattatttaaataatcgaaaacaatttttaataacaaaaattcgaaacggaatattaggagtgcatagaagaaggaacgttcacttatcactcactgggtgagtgaaaaagctgtttcctatctcacttcacataaccactggttcaaaagtaccaggagagcataaagatatcggaggtatttcgaagaagcagatatccgaacaaagcgacgaatagatacacgaatttcgctgtgatacgcagaagcatctgtggcctattcgttaagactgctgactctgacgctagaggcacaagttcgaatccacggcacgatcttttttctttttatttgtggctgatatttaagaacactgactctgacgctagaggcacgagttcaaatcctccggcccgatccttttttctttttttctgtggctgatacttatactaaatgaatatccaacgcacgcccccgtcgaatacccaaaagttgtcaggcctgtcggcctcaaacccagatattgcaaatgctacaaactcagtccaacgcgttaagagaccacgccaacaatcagaagaagaaatgaacgatgtaacaaccgaattgacaacttttaaaacagaaataaaggaaatgatcgaaacatttatggacaaacaagaccaagaattcaaaaatatgcgaagactttaaaagaaacacagcagacaaacgcaaatattgaacattcattggcatttctgactgagcagaatgacgttttaaaacggaaaattgagagtcttgaagtgcagatgaaggaagataagaaatacatttcaattttagaagataaaattgaaaacatgcagatggacagccggaaatctaattttgaaattaaaagtgttcctaaaaaagacatggaaaccaaggaagatttaatagatatggttttaaatctgtcagcaaacattggaggtcaactgaaaaaggaagacattaaagacatctatagggtgcgcggaaagaaagaaaatacctttaataccccaattattgtagagacttcgtcaactatcgtaaaaaatgatactttaaagctttgtaaggcttttaacgtgaagcataaagagaaattgagggcaaagcatttgggctttcgttctgaaaacacggagaatacccctatatacgtgtctgaacaactgacagcaagggcttctcgactacactttctagcacgggatctagttaaatcaaagtcgtacaagttctgttggactgcctatggaaaagtctacgtgcgtaaagacgaagggtctcccaattattatgattagaagtgaaatacaaattcaaaacctcattaatggtcaatgactaatcttggcgcttctcgccttctctacgcatgcattattgttatttcaagattttgttacatatttttgccattatcacttttgctttattacgttaagagaaatacttcatatgtacatatcacaattacacatccacacatcccatgtcattcatctcacacacataaaattcttaattgaattgaaaaatgtttttataatttcacacacacacacaactttacactttcaacacaaattaagctatgtccaaatacacagtttcataatattattaactatggtttactataatgtacataaatcaattgtttacgatctcactacattagaattaaataatggataattctttattaacgttgaacgaaatagacaacacaaacatttcgaactcaattaaatgtgatattcatgagtttaccaaacatgtagttataggcagtacggatctcacaataatctcacaaaacatacgaagtatttatcacaactttgacgatctacaggtaactctctctcttttgaaattcgaagcggatatattaatactaactgagtgtagattagacaaaaacaaacccattccacatctacctaactatacgtctttagctacccagaacaatatgaaccaaaacgatggagtagccatatatgtaaaaacctccctcagacctctccgtgaatgaaataagattaaaagatgcttcatgtatacaaataagtgttcttggctacgttatattaggcatatataggtctccatctaattcgaactcaaccaattttattaatcatttatctcgccatttagatacccttaaatcatataaaaacataatcatttgtggtgatattaacataaatttgattcctaatgataaagaaaaatctctagattgcagcaatagacaaaattatcttagtatgttatcctctcacaaaattctgaccgggcataaatttccaacaagagagaaaaattgcttggatcatgtaatgataaaaattgacaaaaaacatatagctacaaacactgtcgtcttaaatactactgttacagaccactttatgacatttttccagtttggtgaaacaaaaaactagagataagagctcgaaaacagctgagttcatcgattataataaagcacttacagaactggtaaaaaagaatttatcggatcttttgtttcatgatgatccacaattggttattgaacatctaacaaacaaattaattgaaacattagagagtagtaaaacagttagatacttgcctaaatcccaaagaacaatcaagccttggataacgccagggattctacgatgtattaaaaataggaacaagatgcaacaaaagctaaaattagacagtgaaaataatattaagataattacgtataaaagatacagaaattattgcggtaaacttataaaaaacttaaagcgtaaatatgaaaaagaacaattagacataagctcaaaaaatccaagatctctatggaaagccataaattctataacacattttaaatcaaacaaaacatccaataataatttaataaatgtacaatcttctcctgatgaatccgttaactacgttaacgactttttttcctccgttgggaaaaaacttgcagaagatagcttctctactattccaacacaatttcatacacaaaattgtctgaacacaagtgctcatcaactttcctcttttgttcttttggaggcagatgaccaggaagtggagaggattctaatgaatctaaaacccaatagtgccccaggatgggatggtgtcccgactaagtttctaaagttggcaaaacacttagttgtcccaatcattagtcacttggctaatctctgcttccgaaccggagtttttccgtcataccttaaaaaatctatagttactccggtgcacaagggtggcaagacagacgatgtcaacaattataggccaatttctgttttaacatccatttctaaaattattgaaaaacttataaatgtacgacttttagagtatctacaaaaatttaacatattatcaaactcgcaatatggcttcaggcaaggtaggtcgacagaggatgcaatattatcactcacatctttgattactgagcaactagaccaagggaataagtgcttaacggttttccttgacttaaaaaagcttttgacactgtctgtctctctactcttgtgcagaaattggaaaccataggaataagaggtcttccactccagctttttagtgactatttaggatgtcgaacccaatgcgtcaaaatagctaatcatatgagcagagacgcgtccataacatttggcgttcccagggaagtgtgttgggccccacattatttttaatatacataaatgatctgacaaatttgaaaataaataatggacatattttttcgtatgctgatgatactgcaattgtgctaagtggtacctcttgggactctgttttttcaaatgctgaaactactttgtgtactgtgtctacatggttaaaaaacaattatcttacacttaacacaagtaagacaaactatatctgttttagtattaataaagccactcaaccgagccgtaacttgaaacttaaaattcatcactgtgatgtcaaaacaaattgtaactgcgaaattattgaaagagtagcgtacacaaaatatctgggagtgatcatagatcaacgactatcgtggcatatgcacatagaatacgtaaatgagaggataaggaaacttgtttggatcttcaagacattacggcatgttgcatcgaataaattaattaaacaaatttacctaacattagctcagtccgtaataagttattgtataacaatatggggtggtgcgacacaaactaaatttctcgaagtcgaaaggggtcagcgctatctgctcaaagttatccacttcaagaaacgtattttttccacagaggaactttacaaactgtgtgaactactttctatacgtaaaatatatatactaactacaattttaaaacaacacaaaaatctaacatttaaccctttactattaaatcgaaggagaaaaggaaaagtagtatctcaacccttcagaagaactgagtttgccaggagacagttctccactcaaagtggttacatttataataaaataaatacattactggacatttaccaaaacacatcacgtgaatgtaaaataaaagttacagactggctaaagacacaaaattatgcagatactgaaaaaatccttaaatatatatcataaaaatctaaaattacaagtattggacatactcattcatctatttacatacacaacataacacaacacaacacacacacacacacacacacacacacacacacacacacacacacacacacacacacacacacaaacacacacacatacatcagcatgatattacaatatgttaatattcacctaagcatgtttttctttatatttcttactaagttataatcttaaagttatttttactcactgtattattattaaacactagattattgatataattaagtacctactagagatatggaagagcggggcctcctgtcacaggttattacatagcctactaggttggtctcagcacttgattatagattgtgtaaaccattattgttaacgaaataaacatttttgatttttgatttttttttttgatttgctgctacggaaccctttgtgcgcgagcccgactcgcacttggccggtttttatataaaatgttggtaagttgctgagagtataacgtcaaataatgtgtgaaatggtatgcttcggctctcatgacaatgaagtataaattctggaaatggtggtagattatgacgtttgacaagtaattctaagattctacgtcaaaaaaataaaccatttcatttcatttcatttcatttcatttcatttcatttcatttcatttcatttcatttcatttcatttcatttcatttcatttcatttcatttcatttcatttcatttcatttcatttcatttcatttcatttcatttcatttcatttcatttcatttcatttcatttcatttcatttcatttcatttcatttcatttcatttcatttcatttcatttcatttcatttcatttcatttcatttcatttcatttcatttcatttcatttcatttcatttcatttcatttcatttcagaacgtatttttgttacaaacaattgtccgtttgaacaagggactcttgtctttggagagaacggagacaagaaactcctaataactagtagattagataggtacataatagtacatatggaaggaatttcctgatgcatgttaaatttattaaataaaacagaataaaatgtgatctacgactaataaacctaaactaaatacatattgtacttaatagaatagattttgtctatctgcttattttatgagtcgtatccattgaaattcggaacattcaaaactgccacaggaattatcttagctagttttgtcacacaatacatttcatctacctgcacgagtaatgtagatactgttatgttcgtagttcttaatacattatgtgcctacgtgaggctaggggagcctagggggtcactctataataaatcggagcgctacttcacacgtcacgactctctctcgttgtattaaacgtgccgattgcacgactgctctcggtttgtttttcgtcagtatagagtaacccgcctgcatcagttacagaacaaacgtattatttattccggatgcgatgcatcgtcgctccgtaactaggatgtgacgtcaccaacgacaggcgaaggctgatcattctgaacaacgcatgtatcaggtcgtagcaaaaacaggattgttaaatagaggtctcatttaccttcaatcgacaactgcaatactgttaaaaacaccgcatcttacgacattctggaaaatttcgaatgtttttaaacactcattcattgaattggacaaacttgaaaaggataacaacttgcgtgacctacgagtacgtacattcggattacctttctttaacttccgaacagagcatgaacttcactgcttatcttttaaataaggtaaaacctacaagttgagtaagaattttaaatttttaaacataggtacttatatgtaaataactatgcctacgattcattaatatgtaaatctggcacgtagttaaattattcctcccgtttaccctaaaccctgcatccattagctagacaaagtaattaaactccaattaaaaatacataatttagtatgaataactgcagaacttttcattaattcttaataagaaattaattctctaaagacctgaaacctctaaaaagcacaaataaacaggcaaccggttgtcagtttttcacccacggaacttataacaccccatattttcattagctgttaaatttcctaacaaaccacacaaagccaagccattacaatacgttataagtggattatcaactacccagtcacccatatatgtacctgcacataggatataggttaagtactaaaaattaaagagcgagctgggtatttcgtaattagtgaaataggtcatcgattgtgtttctagggcttctgttgacataccgtgtgtgatataaagccagttcagattcacttcatataggtacctgtacatgccagaataatagcgttaccaattaggtagtaaatggagtaaatggattctcacaccatagatgcgaattcaaaaccctaaaatcggttctttaccatttaatgacaatggacaccgtaaatcgtccattgctgaaaataggcatgtctgaaggagccccacaacactctatcctggactttactcacccagacactttctacctttctactggttctgttcttcggcaaaatgcctataataggtaccaactatacaggggtttgagctgaaaggaagtcatgctgaacattttttgtactacaaattttgaaaattcgcacaatatttttttcgtcatcactttttactatttatactgattttcatttaatttaacagcaaaaatttatgagaatgacgagttgagtcgcctttttcgtcttccaacattttttttaataccttgtataggtgttttatctaaatggacaatggatgctgatgtaacatgtaacatgttcaagttaccgagctgggcggcgtatcgaccgcgctggaaataaaccagctattctggctgctggctgcaggtcagacagatgccggtcgatgcagctgcaaaggtctcattgttctaatgttgtcttcatcatttttgctaaaacaacatttagaattgtcgttgctgatgcaacccctgagccttgcctaatgtacggctgaaccataattcgtactaaacagacgtacattttaataaaacgtcccttaattatttacgcaggtacctacttagaatttatgtagatataggcatcatgtcgttttcagaaatatttataaggtatacaaaaataacacaaacaaacgtaaactttttctgactacctgccacatgccatatgccgtggaaattcaatgaacggccatacacatcacactctgtatgtgaatttgaaacaaagtttctgaacataacatctgcgatttatcaacttgaattttcatgcttgaccgattaattcaacagagtttataaacaggcagtgaattgagcagtcttataaataggacattactcattgtaaggatctgagccctggtctcgattcttctaaggaatgaactgtggatgacattcataataataatttgaattttcattgcattaatccaattttagcgtaagatattatctaaaaacgtatgcatcttctatcaatcaataacagaaatcattatgtacttaagtacttagtactccaatggcagtttctcaaattgaaagatgtggaacgcaggtgtctgaaacattcagacaacatgactgtgtatgggcatggcattggttgaacctttattagcagacttggccccgagttgtttgaattcggaacgataacctttgcgaaggcaatttcaggtgtttacaaacagattgctgctcgtttatttcggagttttttaaactttagtgggtaaatgacctttgtccttagtggtctttcacttcacaatttattcttattatctttaagattccacgcttgttgaccttacatacaataagtaagtaaggtaagtacatagtttaaaaaaggaaacattttgtacttatgtgtataaaaattaagtacttactatgatctcagaaaatcctttaccatggtactgatacattctccctgagtgatataggcttcgcacgagaaatcaaattacaggtaagtaatgcgaatctcaatcgtataaataaattactttcatataaagttctaaaagagctagatataagataccagaaaaacttgggcaagtacacagacctacctaaaattatggaaatgtattctttttctaggtctctctattacctaagtcacgaactaacccaataataatgtatgtcctaaaaaagtacaagtaattcagttattatgtccttcacacgaaagctccagaacaaagttcccaattcctagcaccagccatcttggtgacactcaataactcggttacgatcgcaaagctcctttgggaaatttcgcaacagaaatcaaattatcctcagtatcggacagattcgggatgtcccaaattgcatattgacagcgacatgagctcatgttgaaaatgccgaacttctaaacggatttaagaataaaactgtaaaatgaatttctatagaattactcttatcaagttttagtactgaagcattcttagttaacgatactaatattgaatgaattacctacttcagtttgcatttctttaggtaggtaaatgggaaaccattttttttatttaaaaaataacattgttattccaccatggtcctacacaggtctagattgaatattgagatatgattgagaagtaaattattcacgacctactgaaaatttaaacaaaaagtacaaatatgtaactacttaatgattagaatcaatgcaaatagtagcagttcaaacacatacttttaatactttataggatgtgttcaacaacattaaactcgctgaaatagttttattgcggctttgtagattaaactatttcgactaaatccaattgaagctgccctatgttttcaaaactgcatacaaaaactataaatccatatttttagctacgttccaggtttactaattaacatttgacctaattcggtcttattgttaatcttctcagaaacagcgctaaaaataacctcagaacaaaaacaatatgctataacataaatatcctatgacatacctatcaaaagtacctccatagaggtaggtactcagtaaacattcggaatatgaacaagtttaagaaaaataaccgtaaaattattcgaaactattaaaaaatataaattccattttcaaaaagccactaacctgaacgcccttttcttctgtatcaggcatttcggctccacttttgaattaggagcgcgcgaaacttttttacttttttcttgttattttttttaataggtctggagcagcgactgcctgctgtagaggcctggagagcagtgagggccctggagcgggaagccgtactgatgagagggtgtgcgcgtattagaagcggaaaacgtttagaaacggccgacattctttcatatgtaaatataggaaaggtatatgtaaactgtatatggaatgttgttccttcggggatatgtggaattcgggatctatgtaatctttaaataaggcatcataatggtgatgaaagctatgttcatgttcgaatacacttatttcggttagagtctgtatgtgcactttgaaaatagcaagctgaaaataaaagtaggttacgtatacataaagttactcagacttcaggtaagtattagtacctacctatattggttttccaatattttcttgagttcattggattgagagatactaaattgacgtgaaacgagacgtctttcctattctatttcttaggaacttgcacttaggtagaatattctgcaaatcttgcgcgaatacatttttatacttacagtccgcagtgttatttcatttcaagtacctacttatatcggttatctttcactattttggtactataaaatgtggattcagcatttaaatgaattactttaggagtttctcagatttaacggtacttttctaaactgttcagaagttcagataaaacattagtgttgaaaagttatatacaatgtcttttgattaaattattttctcttatttttttacgaagatgtaccgaagaaggtattaaatgcagcaaggagttctagcaggaaggcggtgtaattagcggcgcggtgacccaattgccggttcaattgaatgaggtgcagcgcaaataggatccacgtctcacaaattgtgcgcgacggcgctgcaacgaggttttactgtttattggcattccatttgctgtactggccactgagaaaaacaatttgccaatattttttcaggactgtttaaattcttactggctaagaaaaacaaaattgccaatatattttttagtttaagtttgtgttgttctaaatgtttgttttatacctacataccaatagccttaccatctctattcttaagtcggaattaaaattgtcattgcttgactaatcattactgccactttaatttgatgtgagcattttcaaatagcaaatttccattgatagatactttaacaaaatacctatcaataattggtatgtaacgccacctacagttttcaggctgaatctttcagttataaatgtttcagtgcgtgtgaactatgaacataattccgtgtattaccactagacgccaccacatttccactgaagcattgggatctattttaaaactcttgtttatgtatttgtatatgaagtgaatgtaagatgccacttcatatataaatacatatgaagtgaatgtacgatgcgacatgtatttgtatatgaagtgaatgtgcattgcatattttgaaataataaagaggaacttagtttttatttatttcgtctgctaaatacctacgtttaaacttttttttattattacatttattttatttgtaggtaatacattgatactcatgtatattttgatatataggtaactactttatatgagctgacattcaacattttcaatgcatttagttagaaaatacacttaaaacagattatgaaattcataaaagtgaacgactgtataaacgtacctctaacatattggatgcaattttgtgagaatgctaattaccaatttataggagctatgtacttgtgatattgttacactaacatttacactgctgaccttgagatcaatttacgacgttgtttaccgacaatcatgtcttcaaacaatatacatgacaagtcgttgtttgagccaattttcatctggcgacgacattctagcgagggttccttctgtttttgaaatatagaagtcatgtaggccatttcagtacctatggaagcatggacttgggtaggtaaggtactgctcaatgaaaaaatagcaatgatagcgttgcattccataatttccatcctactgaaaattacgttttcagttgtaaaaccggcagtttagtacttatttcaaacacttttaattttttttgtatttatatgtggccgtacacaccgccgtaagaaactctttacattgatcattaaattaaagtcaatctcttcagtataactatatttacagatataatatgtattaaataacagtaaaagaaaataaaactaacgtttaataaagcttagattgattattattaactcacattggttacaaaatctcacttcacattataaaaagtatttatttattttctatattaattaagctatgggctgtttgagccacaaacctttgccacgtcgtcgagcgggaaaaaaagaacgaaagaaaaaaacaaaagaaaatcgggctgtgtgattttggcggcgtcggaattttttttcaaattataatttttttgtttattgttaaaatacgcaataataaaataacataaagtaaagagcgtaaacgcatgcgtcgagtaagtgtattattttgtgatttgacaatagtgcagacattgagaatacggatttgtgaaataaactagcgatcccacatacgccgctatgaagaagaactgtgcaaaccgagatttggggtgagttaagactacagagatacatatgataccttattatacccaacttctcttattgattaatcttttttttaaacacctgaggagacagctattctaccgggacatacctacctacttacttgtggttagggaatgcaatctcgtctcgccgagatctcgatctcgcgagatctcggccatattttacgagattgaatctcgtcaaattttgtacgagatctcgcgagataacgagatcgagaaatgcagcgtgacgacgtgtttttcatgcaaaatatgtgttttttgacaagccattttcagacaaataacttgcctttccgtaccttgataacttcatcttctactttaaacttattgtatttgattaatacgatctcacaacatttatttcaaacttgtgaagtaaaatttttgtttttatttataaacagtaatgttgtattactctgaaactaaagcaatacttaatatagatcatcatattgtataaacttgaacttattagctacagtagggacttataataattaggtatagacataaacaaatgttattagagttaccgaagagacgaccgaatggcgtagtggttagtgaccctgactactgagccgaaggtcccgggttcgattcccggctggggcagatatttgtttaaacatatttgtttaaatgtatttgttctcgggtcttggatgtgcccgtaaaatagcaataggcccgccccctattacattgggactaacataacactctggcgaaaagtgggtgcagcaatgcacctctgcctaccccgcaagtacaaagcgtgagtgtgtgtgtattagagttagagacaaaataataagt

SEQ ID NO: 38 - DNA, 21287 bp, unidentified
  misc_feature 1..21287: note = Fanzor polypeptide
  variation 1829..1969: note = n is any nucleotide
  variation 6272..6371: note = n is any nucleotide
  variation 7484..8961: note = n is any nucleotide
  variation 11706..11870: note = n is any nucleotide
  variation 14108..15391: note = n is any nucleotide
  source 1..21287: mol_type = other DNA
ttctatagcatccattatttttctcacaatcttattattaatgactaagtagctatatgaatcttgccagatctgcgaacacatttcgcgaaattgttgccatgtcatatcagtatttacatgctcattgtagacatgacgtaaatttatatcatcttgcttgaaaagaatgattatattagcattatcacgaattaattgttttggtattttactataagtttggttgaggtaaaaggcatctatttgtttgtgtctacccatcgcaaaatagtcacgaatattactttgactttccccagccacatcatcaaaaattataatggagttaggagaggcaacattcgggcttaaaacctcctcattatcgtgaaacttaaagtagcacaccccaggtacgcgcatcattactttttctaaaaatacataaataggctggtaaagggtttttgagtagacgtaaatattacgaaattttaatccatttgcatgtaacaacaatccgattactaaattggtttttccacaatttgatggaccacaaactaaacaacgaatcgtgttaggtaaaagctttccatgtcgaaactctttcttgaaatgctcgacacaaattttatcaagctgtaaagatgttggttgttttataaacttcatgattggatacacctataattagtgaagttgcttatttcatactgaccgttaaagtggtatgacagtcgcttttatctctgtataaaatcagtaagtaaggcatcgaaaaaaattgcttccgaatctagctttcgaccgtgcatcgttctaatgaacattgtatgattgcggcgttctagctcgctatcgatcgatcggagcggagcggcagcgcagcggagctcgatcgatagtgagttagaacgcccaattatacactactataaacaaaataattattaaaagcttgctctgaccagcaccgtattcggcctgggcaaacctgccagcaagtgcccctcgtgaagaggcgacctcttccgcacacgctgcctgttaccatggccagatgtcgacgcgctgtccgcgccagcaccagctcagccacttagtgcctgggcaactgccaggtgctgctgcttctgtcacgccgcgcgcaccgcccggctcgagcctccgcacagccgtgtcgccgcgccgcccaccacgggctaccgcaaccatgccgcggcgcgcaccgcaagtgcctcctccacgcacctccgctgagcagccccgtagccgcatccgcgacacggcccgcctccgcagacgtcttctccgcgcgtgagggttcccgcatctgcatagccaatttctttacattcatattcttatattcacacaacagttttctagtgatacattcaaaactggtcacgccacaggggctatttacgccacttagggctatataatcacgccacttgggctagtcacgccacttagggctataataattacgccaccggggctagtcacgccacttagggctatatagtcacgccacaggggctagtcacgccacttagggctataataatcacgccacaggggctagtcacgccacttagggctatatagtcacgccgcaggggctagtcacgccacttagggctattataataacgccactggggctaagtcacgccactaagggctatatagtcacgccacaagggctagtcacgccacttggggctatattaatcacgccacaggggctagtagtcacgccacttagggctatataatcacgccacaggggctattcacgccacaggggctggtaacgccacaggggctggtaacgnnnnnnnnnnnnnnnnnnnnnnnnnnnnnnnnnnnnnnnnnnnnnnnnnnnnnnnnnnnnnnnnnnnnnnnnnnnnnnnnnnnnnnnnnnnnnnnnnnnnnnnnnnnnnnnnnnnnnnnnnnnnnnnnnnnnnnnnnnnnnggtaacgccactaacgccacaggggctggtaacgccactggggctggtaacgccactggggctggtaacgccactggggctggtaacgccacagggctagtaacgccactggggctggtaacgccacaggggctggtaacgccaatggggctggtaacgccactgcactcgggctgtaacaacaattacaattatttctacaacaaaagattcagtcaactattgcacactgtcgcgcttatgaaaatggctagctaagaggagagaagagaaatgagaagccagggttcagcttgacacaaatttatttaaaggtcaacgtgtgggttaggcctacactacacgatcagtcagttcttagttggcacggatagggactcccctgattcgaagagtatcggcgtggaatcccgataacgcgaccggcgtggaagtcctcttctccagtggccaggtaggtaggcaggcaggtcacgtggccgttgcgtgcgcgtggcgtgtaggtcggctgcgcggcgtagtcagcaacacgaaggcagggggttgccgaaccagcacgtagagggcgagccgtagaaacacgtagtagttccgtgcagtaggtaaaccgtaccgtggaccccgatattggggaagacacgcacaaggcaccactggtaaagtctaggtcattcgacactttagagcgggctaggcacctagaggactgccgtgaggtagggtcacgcgcagtcgatgccgtagcccgtggacgaatgatcgagagccagtggtcaccgagtggggctgccgcgatagtggggacacgaacaaaagaccgcttcgctggctagggatgggaacgcgtcgataatttgaagaattatcgacgcgaagattaagttatcgataaagtcgatacttttaaaaagggaatttacaattaaattatgaagttatttactaatatgtaagttatttatttagaagaaataaataacgttacaacacccagctgtagcaaactgtaaatcacacatagccagaactttaataataacatcagacataaatccatcaacttaagggcaaggccttaagagccgctatccatggcaactttagagaaaaccaatcacctgcaatcactgaataataaatacaccaataatattcataaatcagaaaaccattttgattcacttgaacgttagtagcgcacaattgcaagcaaatacaaatcaataacccaaaattattcccttttaatcgctgatttctttctcctctcctcaatcagtaaacttttggtatcatatcacaataataccacacttattccgtaacacacgacacacttttacgcatttacttcacacacaggtttgtgtttggcggaggcttccccctcactcaccaagtcagtcctgtccgaatacgagcactttccattgagagccaccttacacaaatagcaattaaacatgttggttatctataatatatattattattatgcgtgtttctgtctgtccactataattattataatacatgtttcttcttctattttattgttcagtgtgtcaaattaatgtttctttctttagttctaataagtacctaccgtgtttttttttttcattttatcatcccgtgtaacttgtgcatgtactgtgttcagtaaataaacaatttatcttggaaattataaatgattctatttgatttgttataacactgcccatcaacttatggagtgatcctcccaagaaatcaggtttgcatccactccatcattcaaacatataagtcaaaagggcattacttaactctcaaagttatccaatgcaatatacatagaaccatttgctgtatgtatacaattatatatttttatgtttgaatattatacaatatacatacatgtgcacgaccatgcattcaacatttgagtattttgcatgcacccaatggaaatatttatactattttaatttccaactgctccccattttatattttattattacctgttagtgttatctagaagaaattactgtcaataatacctccgtaccctactattacattttaatttatgtaggtatctttcaaagtctacttgtgaaaaatagggttgtaatttcgaataaaggtgtattttgatttccatacatggcaaagctttctctagctctaatctaaataattttgtcaatatagcatgaactgtttaagtagtataccttacaccataaattattatgttaaaattgtctcttcatttagcactgtgagccattgtttttaaatatgaaagtaactgttcaggttcctcaaaccttcacgcgatggcgttcattctgataaatgtatcatcaatcccatgtattatacaacccacggccttcctccatgtaatagtaccaaaatattaaacaacttttttttttttgcaatagtacacagttatacaccctcaattgccacgagacaataacattgtttgtagctacagtttaatgaaaactcaacaatatagactgatggatgaaccaaataataccgcgatgtcgaatggtgacaacaccaccatctaatggaacacatatgaaattaaatcttaaaataaaacatccctgttataaatgacacagttgctttgcaagacccgataactttgccaacgcaacatgccaatctgcgtttcgttccacgattttattattattatttattttacccactcattcacttcaagtgtacatgtttcaatatttggcaagccatcactaggatcaaactaagataagtacgacatttatttaattcgttaattccctttaaatttccaagactattactaacataagaatatataataacttacaaaatacttactcaccaactaatcatctgatcttgtgcatccgattcattttcggattgcgcaaatatgatcacatttctgagtatcgagctcaattacagtggcttccaattcgccttcgccggaatactcactcaatcataatgccgcctcttatagcgattcattcgcaatgaaggcagcatgtttgtggaactccttgccagagggagtgcgacagtcaccatcaatggcaacttttaaaaaaaatgtcaggcatcactattttgaatcattaggttggcaggtaaaataggtatatatatatatatatatatatatatgtatttatatttatgtagtattatttatatataagtatgatgttatttttataagtatattttatgttgtaagtagttgtaatctatacaatgataatttaaggttaggtttaaatcataggctaagttcagtttgataattgtacctactcaaattagttaagggatctaatggcatttttctttcacccagtcgaaggttggctggaagaaattgctttttggcaataagcccgcctttgtatacgtttgtgttttttgatttgtaactgttctcttttatgtttttatttgtatgtgtacaataaagtgtataaataaataaataatcattcaacaaagatcaaaattacacaaccatactatactaataaaatccgagatcgcatgtagatattgttgctttcacatgttattccttatctatgccaatttaattcagccttaacaaacaataattgttcaaaaattcacgaaataggtactagcgaataacgatcacgatttcattgatttcaaagtagcttacgttgcgacacttacaacttacgactgacaatgattttaataaaaacgagggtaaactatcgctacttgtaggtactacgacgtcgcatagctttgattcatgtcgttatacctactcgtgatctgcttcgcctattggatcccatacctagcttcaattcaggcaattaatattttataacaactttctttcaactctcaatttagaatattaaaacacgataacagtgtaaaatgtaagtataagtaggtattaatcgagaggttgattagcaacttaaaatgaatatttacttatacctacatgcttatacttacttagcaacctaaaccataaatacctagatgggtacgttatcacgacacacaaagaacctaaaacaacacgcagtgtacctaacacgtaacgatgaacagcttataaatgaactcaaatgataaaataatggaaatgtcaaagtaacatcatgaactattttttttcttaaataattttcaggattcatgaaccctgaaccacatcacattttacacacacaaacactttttaaacgcacacgtcttggtgctctctacggtnnnnnnnnnnnnnnnnnnnnnnnnnnnnnnnnnnnnnnnnnnnnnnnnnnnnnnnnnnnnnnnnnnnnnnnnnnnnnnnnnnnnnnnnnnnnnnnnnnnncgccggcgcctccgcacggcccggccggcccccgccgcgcaccgtgaacatacctactccaagcggtcaccgaccccgcgagtaaaagcgtatggggatgttccagaatcccaaatacgagtaacttacaatctgttcagttcacttatagttgactgtaactgtatgctccgaaattaaatgtataagccttgattatgaacacaaccagtaagtaccagtgtttcgcgatcacttggtaggtattggcatcataactttcacgtcacttgtggatttacgaattaataaaaattggaacgcactgacctctagtctcacgttcagataggtattttccatggaagtaattatggagcttttcccttttcactagtcaggaccgttcgtgcgacttctgactgttgacaaatccgatagggagggtgcaccaatattaaactcacttgttaccacttacttatttattacttttacaacattttcacctgaacattccacacttaatcagaaataataataattgttttgctcgaccgcaaaacgacaacaagcgcgcatatcaagatggcggatcccggaagtaacttcctctattttaatcacagacaaaccatagacaatgggcgatcacagaacagatgtcattcccagatctcagaataataatgtaagaccaaattacaaagtaagatcattacaatggaaaagatcattacttatttaatacaattgagatcataaaatccagtttgtttacaatatgcactcacaactgtaatccccgaaggggtagtcagaggtggctcacaagcgagttttcgtagcacatttttgtactcccgtgataggttgcgaaccatatcgccgttttgggataagtacaatgcacttaggatacacatctagaatctagatgtgcaggtttcctcacgatgttgtacattgtaactgacttatttaatcaatatacgttatatcagtattccaaagcggtggttccttattttaaacaccagaaacaacagaaatataggacaaaataatacttacttacctacgcaaattaggccgctacatgctctggaccttacgagccatatatttacaagnnnnnnnnnnnnnnnnnnnnnnnnnnnnnnnnnnnnnnnnnnnnnnnnnnnnnnnnnnnnnnnnnnnnnnnnnnnnnnnnnnnnnnnnnnnnnnnnnnnnnnnnnnnnnnnnnnnnnnnnnnnnnnnnnnnnnnnnnnnnnnnnnnnnnnnnnnnnnnnnnnnnnnnnnnnnnnnnnnnnnnnnnnnnnnnnnnnnnnnnnnnnnnnnnnnnnnnnnnnnnnnnnnnnnnnnnnnnnnnnnnnnnnnnnnnnnnnnnnnnnnnnnnnnnnnnnnnnnnnnnnnnnnnnnnnnnnnnnnnnnnnnnnnnnnnnnnnnnnnnnnnnnnnnnnnnnnnnnnnnnnnnnnnnnnnnnnnnnnnnnnnnnnnnnnnnnnnnnnnnnnnnnnnnnnnnnnnnnnnnnnnnnnnnnnnnnnnnnnnnnnnnnnnnnnnnnnnnnnnnnnnnnnnnnnnnnnnnnnnnnnnnnnnnnnnnnnnnnnnnnnnnnnnnnnnnnnnnnnnnnnnnnnnnnnnnnnnnnnnnnnnnnnnnnnnnnnnnnnnnnnnnnnnnnnnnnnnnnnnnnnnnnnnnnnnnnnnnnnnnnnnnnnnnnnnnnnnnnnnnnnnnnnnnnnnnnnnnnnnnnnnnnnnnnnnnnnnnnnnnnnnnnnnnnnnnnnnnnnnnnnnnnnnnnnnnnnnnnnnnnnnnnnnnnnnnnnnnnnnnnnnnnnnnnnnnnnnnnnnnnnnnnnnnnnnnnnnnnnnnnnnnnnnnnnnnnnnnnnnnnnnnnnnnnnnnnnnnnnnnnnnnnnnnnnnnnnnnnnnnnnnnnnnnnnnnnnnnnnnnnnnnnnnnnnnnnnnnnnnnnnnnnnnnnnnnnnnnnnnnnnnnnnnnnnnnnnnnnnnnnnnnnnnnnnnnnnnnnnnnnnnnnnnnnnnnnnnnnnnnnnnnnnnnnnnnnnnnnnnnnnnnnnnnnnnnnnnnnnnnnnnnnnnnnnnnnnnnnnnnnnnnnnnnnnnnnnnnnnnnnnnnnnnnnnnnnnnnnnnnnnnnnnnnnnnnnnnnnnnnnnnnnnnnnnnnnnnnnnnnnnnnnnnnnnnnnnnnnnnnnnnnnnnnnnnnnnnnnnnnnnnnnnnnnnnnnnnnnnnnnnnnnnnnnnnnnnnnnnnnnnnnnnnnnnnnnnnnnnnnnnnnnnnnnnnnnnnnnnnnnnnnnnnnnnnnnnnnnnnnnnnnnnnnnnnnnnnnnnnnnnnnnnnnnnnnnnnnnnnnnnnnnnnnnnnnnnnnnnnnnnnnnnnnnnnnnnnnnnnnnnnnnnnnnnnnnnnnnnnnnnnnnnnnnnnnnnnnnnnnnnnnnnnnnnnnnnnnnnnnnnnnnnnnnnnnnnnnnnnnnnnnnnnnnnnnnnnnnnnnnnnnnnnnnnnnnnnnnnnnnnnnnnnnnnnnnnnnnnnnnnnnnnnnnnnnnnnnnnnnnnnnnnnnnnnnnnnnnnnnnnnnnnnnnnnnnnnnnnaggtaactgactgaatttcttccgggatccgatgtaatgtgaacactctgtccggtgtccggttttcggcagatctgccggtccggcgtagtgggaacgctgcctaaggttaaacttagcaatgacagagtcgttagggttatcccgggtccggcatttttgccgagcccggcatttctaccgaacgttttgtcactacgaattgccggtagaacgaccgggcccggagtaatgtgaacgagtttgtgccggtatctgtcccccgctcgccccgctcgtgctcccctcgccccgcccgtgttccactcacgtcattcggctcgcatgttctggtaaaagtagacgtttagcatggatattcaagcagaaactttaattacgcttgtccaagagagacctgttctgtgggataagaccgaagacgtctataaagacaaaaacttaaagttagcagcatggcgtgaagtatgtttaatactgaaaccaaacttcgatgaactggatgagggtgtacccaatgttttcttttattttgccttctattaagataccaccacaacacaacaatttcgtcgtccattgtgtgcgcaggtccaaattcaactgaagactgtctgaatttcttccgggatccgatgtaatgtgaacactctgtccggtgtccggttttcggcagatctgccggtccggcgtagtgggaacgctgccttacagttaacattttactgtaacgtgttgcaccatcaaatcgtcggtcattgttaatgttattagggttgctattcgtttgagacataattatcgccaaagttatgagccgttttccttgacagctgtcagttgagcttttgggtaagccgatagatggcgtgaaaacgcagtgtaccaactgtcaaaaattacatagagagcaaagagtactaaactcagaataagaactcactagttgtgattaaatgtcgggtggtagcgcgagccatccttccgaggctcagactgcatgtggcttgggatagtgctaagtattctgtgaatagttctacccgcgccgtcacgtagtgttcttttctctatgcgcgccgtttgaacgggtgctgcgtgcgagaactgattttctatttttgttgttgtttcatgatgatccacaattggttattgaacatctaacaaacaaattaattgaatcattagagagtagtaaaacagttagatacttgcctaaatcccaaagaacaatcaagccttggataacgccagggattctacgatgtattaaaaataggaacaagatgcaacaaaagctaaaattagacagtgaaaataatattaagataattacgtataaaagatacagaaattattgcggtaaacttataaaaaacttaaagcgtaaatatgaaaaagaacaattagacataagctcaaaaaatccaagatctctatggaaagccataaattctataacacattttaaatcaaacaatacatccaataataatttaataaatgtacaatcttctcctgatgaatccgttaactacgttaacgactttttttcctccgttgggaaaaaacttgcagaagatagcttctctactattccaacacaatttcatacacaaaattgtctgaacacaagtactcatcaactttcctcttttgttcttttggaggcagatgaccaggaagtggagaggattctaatgaatctaaaacccaatagtgccccaggatgggatggtgttccgactaagtttctaaagttggcaaaacacttagttgtcccaatcattagtcacttggctaatctctgcttccgaaccggagtttttccgtcataccttaaaaaatctatagttactccggtgcacaagggtggcaagacagacgatgtcaacaattataggccaatttctgttttaacatccatttctaaaattattgaaaaacttataaatgtacgacttttagagtatctacaaaaatttaacatattatcaaactcgcaatatggcttcaggcaaggtaggtctacagaggatgcaatattatcactcacatctttgattactgagcaactagaccaagggaaaaagtgcttaacggttttccttgacttaaaaaaagcttttgacactgtaacgagccgttaccaaaccatccaccgcacctacccacataccgaagccacaagagcgcccgcgagtcgaggtggggcaccacacaggcgactccggagaatacaaggggcgcggggcgacccgcctataaataaccgcgagccggccgtccgaccaccattcgtcacctcctgctccggcgagtgatcagtccgttcccgagatccttccccgcacctatatctatttaagtatctgttcacgcacactattctcactacaccgtcctccctacgctgtgggtcgcctactagcggatcgaggttccccggaatacacggacgcctgggtcgcctagtttaaagcggccgtgtaccgaactatacaatcgctgaacacacatcggccctcagccacacgttcttatcaacacaactacactccacaaatcctggaacaaatccacacgtaccaccggtattcgcccgacctcctgtaccctgtatttcttccccttattaagatagaaacatccgcgtaggccccttcagggcccgaccaatataaatatcaataaccgtgataagtatttgtgcatttgtgtagagtgttaatattaagtacnnnnnnnnnnnnnnnnnnnnnnnnnnnnnnnnnnnnnnnnnnnnnnnnnnnnnnnnnnnnnnnnnnnnnnnnnnnnnnnnnnnnnnnnnnnnnnnnnnnnnnnnnnnnnnnnnnnnnnnnnnnnnnnnnnnnnnnnnnnnnnnnnnnnnnnnnnnnnnnnnnnnnttaccggattgagaatcatttatttgaaatcgattaaaaaggtttgttatccctgaatttagtagcaagtgatgccatgctaaagaataaaataaagtaattaaaattaattcgatacaatggtcgtgagtcgtgattttacttaatattataaatgcgaaagtttgtgagtatgtgtgtatgtgtgtacctttgttacttcttcacgtcaaaacaactgaaccgattttaatgaaatttggaatggagatagctgacaccctggattaacacataatagcttatgtgttaatccagggaattccgcgataaaaagtagcctttttaacgcggaattcccacgggtaaactaattaagttgaagcgaagctcgtggcaacagctattatttttgtattacctacttcactcgagcaagtaaatatttagatttatgtttttctatgaaaacattaaaaaaaatattgcccttaaatggatcaaaattttaccttttttcggtgaagagcttatttagtggtatcactaatgaaatgtcagaattccgcggaattaaaaattagagtataagcatgtttttctttatatttctcagtaagttataatctcaaagttatttttactcactgtatttactcactgtattattattaaacactagattattgatataattaagtacctactagagatatgtaagagcggggcctcctgtcacaggttattacatagcctactaggttggtctcagcacttgattatagattgtgtaaaccattattgttaacgaaataaacatttttgatttttttgattttttgatttattgtatgatcctaaataagatcccaaagaaatacttacaagacaagatgagaatgtgtgccgtcgcaacttgtaaaaataaaggacatcataaatttccaaatgatgaaagccaggcgcaacaatggattaaggcgactcggataaatgtgcgaaaaattgattggaaactgcgaaaacattcatggttgtgttcggatcatttcataccaagtgattttcattcacgtaagtaagttaaatcattcgcggtaatgtaaattaaccattgttacataacatgatatattatgtaggtacctacctatctaacataagcactcaaacaggtaggtagagttgcctaacatgacccaccaagtcagggattaaattcattaaaaaggatttgagctgcatgtaggtacttatagcttttcacattttatatgcactaggttgcttgctcagtcagtacctgtacctatatttatcatataacttaatttattattaatcacttgcttttctttcttacaggtggcaaacaaatagcattaaagaaaactgcggttccttcaatattttcttggactacaccagaaaataatactacaattctacctacctacgtcactttcacatttcgttagcctcacagaataacatattgtgatctgagtgtgttctgaggttttgaaagttggtccaaccccagacaacgccatctatttctccaaaaaggaactttttttttttttaacaaacgcctcattgtgggaaacgtttttatgtaaggcaataccaaatctagctgtcggactgaagccgccacagagtacattgtagccgtcattctctgtcaaagcactcaaagtcaacatgtcataggaactaagtctgttgttcctccaaatattgaccaaaagattatcatcaatgagccgttttccttgacagctgtcagttgagcttttgggtaagaggatagatggcgtgaaaacgcagtgtatcaactgtcaaaaattacatagagagcaaagagtactaaactcagaataagaactcaaactcaaactatctcaaaagagtcactatctcaagtgcactaactctacagtatcaagggaggaggagcagatagctcaaatacaacacaattaatacaggagaaacacaaggaaactgagaaaacttgaaaagaacggctgtacgcacaatcgcactgaacgctgaagcaacagtgacatcgacatcatagagaaaataatactacaattctacctacctacgtcactttcacatttcgttagcctcacagaataacatattgtgatctgagtgtgttctgagggtgtgaaagttggtacaaccccagacaacgccatctatttctccaaaaaggaactttttttttttttaacaaacgcctcnnnnnnnnnnnnnnnnnnnnnnnnnnnnnnnnnnnnnnnnnnnnnnnnnnnnnnnnnnnnnnnnnnnnnnnnnnnnnnnnnnnnnnnnnnnnnnnnnnnnnnnnnnnnnnnnnnnnnnnnnnnnnnnnnnnnnnnnnnnnnnnnnnnnnnnnnnnnnnnnnnnnnnnnnnnnnnnnnnnnnnnnnnnnnnnnnnnnnnnnnnnnnnnnnnnnnnnnnnnnnnnnnnnnnnnnnnnnnnnnnnnnnnnnnnnnnnnnnnnnnnnnnnnnnnnnnnnnnnnnnnnnnnnnnnnnnnnnnnnnnnnnnnnnnnnnnnnnnnnnnnnnnnnnnnnnnnnnnnnnnnnnnnnnnnnnnnnnnnnnnnnnnnnnnnnnnnnnnnnnnnnnnnnnnnnnnnnnnnnnnnnnnnnnnnnnnnnnnnnnnnnnnnnnnnnnnnnnnnnnnnnnnnnnnnnnnnnnnnnnnnnnnnnnnnnnnnnnnnnnnnnnnnnnnnnnnnnnnnnnnnnnnnnnnnnnnnnnnnnnnnnnnnnnnnnnnnnnnnnnnnnnnnnnnnnnnnnnnnnnnnnnnnnnnnnnnnnnnnnnnnnnnnnnnnnnnnnnnnnnnnnnnnnnnnnnnnnnnnnnnnnnnnnnnnnnnnnnnnnnnnnnnnnnnnnnnnnnnnnnnnnnnnnnnnnnnnnnnnnnnnnnnnnnnnnnnnnnnnnnnnnnnnnnnnnnnnnnnnnnnnnnnnnnnnnnnnnnnnnnnnnnnnnnnnnnnnnnnnnnnnnnnnnnnnnnnnnnnnnnnnnnnnnnnnnnnnnnnnnnnnnnnnnnnnnnnnnnnnnnnnnnnnnnnnnnnnnnnnnnnnnnnnnnnnnnnnnnnnnnnnnnnnnnnnnnnnnnnnnnnnnnnnnnnnnnnnnnnnnnnnnnnnnnnnnnnnnnnnnnnnnnnnnnnnnnnnnnnnnnnnnnnnnnnnnnnnnnnnnnnnnnnnnnnnnnnnnnnnnnnnnnnnnnnnnnnnnnnnnnnnnnnnnnnnnnnnnnnnnnnnnnnnnnnnnnnnnnnnnnnnnnnnnnnnnnnnnnnnnnnnnnnnnnnnnnnnnnnnnnnnnnnnnnnnnnnnnnnnnnnnnnnnnnnnnnnnnnnnnnnnnnnnnnnnnnnnnnnnnnnnnnnnnnnnnnnnnnnnnnnnnnnnnnnnnnnnnnnnnnnnnnnnnnnnnnnnnnnnnnnnnnnnnnnnnnnnnnnnnnnnnnnnnnnnnnnnnnnnnnnnnnnnnnnnnnnnnnnnnnnnnnnnnnnnnnnnnnnnnnnnnngatttttcgcttaaccgatgctttgacagacgatgtgacgtttgtaatagttaaagttaaatggtgcaacgcacccttagtgtagtacgtgaaaataagttatgcactaattgcctacggttcggtcataatatagattcatgtaggttcgggccgtgtaaaataatgttcgaaaaaacataactcattaattcacagcgacgaatcagatgattgctccgtgaacttgaactccgtcgttgttcaggaaccggttcaacgcgccgccgccgccgccgccctgtcggtgcctgaaaataatgtgacgtcaccggccagtcccgctagtccatctataatcgtaaacaaagcacacatgcaagattttcacgcgcacacgaacaccatgtcttcacaacaggttctcttatctactgcgttagttgaaattattgacaaaaattgcgaaaggcaaaagtggcagccagcgatgttttgttactaaacaattatgcgattcattaaacgctataactatacagtccggtaggtaattcggtgactcaatgttcagaaacgtgtgacattgagttaaaatcgcgcatcaataagtacctaattacctacaccacgcgcatcaattgttatgtgctaccgcagataacatccaccatgccgcgtgtcttatgtaaacaaagcgtacataactacattccagacggcatcgtattagcagatcctgatttcttagactttaataggcgcagataagttttgggatctccttaacgacggtaaatttagactaaaaagcggttgttccttattttaaacaccagaaatataggacaaattcaatacgcaaattaggccgctacatgctctggtccttcgaactaaaaaccggtccttatttacagagtacaaaattaggttggataatttcaggccccatctacaattcgcacagtagtggcagaatacaatgtaattttactcaatcaatcgataggcaactaagacagttctgggagtttgaggagctgcccagagagcgacacgcgcacggacgaggagcgcgcgtgcgaggaacatttcgtcaacactacgacgagcaatagtgacggaaggttctggttctggtacgcatccctatgaaaaaaccggctacgaccttgggagacacgtattttcaggctgaacgtagatttttagcgctagaaaagcgattgcagcgctcgcctcaacataaagcgttatatagcgattttttacacgagtatgaaaggttaggtcatatgactcgcgtaaatgactacggatatccgaattacttccttacacgccacggtgtgtttcgcgagcacagcactagtacgcgattaagggtagttttcgaggctaatcaaccatcttcaactggtgcatcaataaatgatttgcagatggtcggctctacagggtgatctattctcgattttgttgcgcttcagacagcacaaatacgcgtcggtattatgaaatttaactttttcattgctcgcgtcgtcgacagctccaaactaagctactacactgctgcatactatgtcggtgagtctggtaaagaagcaataccgtaaaaaatgaacttaaatacgccatgtaagggtatgacttgacggtggtgggttgtcccccgatgatcctgttggcggggggcgcggggggtgcggggggctccctcacagtcaccgtatcctcacagcaccctgaaaacataattatatactaacctatacgtagtccatattttttatgagaacttcctgatcgcatgaaatgtatggatcgtaaattataaggttaaaattgacattaagtcaggtaaggtaatacagtatatatgtcgcaggcatctggtttaatctcctgtttgattgaaccgctagcccgttcattggatgacgctactcagttgaatgactaaagaacaactcgtcaagtggttgactgtaacgtccaacgtcttgactgaacgttattcagcgaagtcgttaaatgggatatagtatagcaactctataatgtctggttaggatgaacatgaccagacaagagtcaacaaaaagactatgtcacaaagctctcacctcacaaattaactaaacaataacaataaatgtaccttgatattgttgttcataattatccagtttcagcacatttttttctttgaaactatccgcctgcggtgtaataataggtaaatccatgttgtcacactattttaacataaataacgcactttaaagctaatttatttgcaaaaaataacaatacaagtgctttttgtgtcagctgttcgctgttagacgccatatttgttttattcaccacctgactgattttaagtccgctaactagttggacgttttgtgacgcttgtacaatcaccgttcggccttgtcatacaactgaatagcgtcatccaatgaacgggctagcggttcaatcaaacaggagattaaaccagatgcctgcgacatatatatataatgttgaagaaaaaattctcacccttttactaggggttgaccgtaccctataggtaataaagaaatagcgattcttatactttttacatagtttttgataaagtgtatacctgcctatagaaataaaaacgggcaaggttacattttttccctttaaaaaatgaagggggctaagtataaagtaccacaaagacacatatagataggtatagatatctacccaattttactttaccatacttaactaccgtaaataataaagcttaccatagtaaaatagcacagtcataattagtaacttcatactgaaaaccatcactttcctgtttatttcctgtctcaaaagtaagttaaaattgggatggccaagccatggccatcgcaattttatttattgcagctttttaacttgtctacggcgaagcaatgaggatggatataacagtacaaggtgttgcaatagtggtaaataattatagtaaaggtgaaaatctacaactctttgtgtcttatctatcatttttaacacactatattttcctacgctttgtaagttgctagttgctaggaattgtaacataagtaagtactgaactgatacagatacatcgtcgaatatgccagtaggtaaaaatatataactgtaccgtcttgctcgtttattgttaatctaaggtctgtacagtaaaatatgggaaattttattatgatttatattatcctaacttaatattataaatgcgaaattactgtgtctgtctgttactctttcacgccaaaactactgaacggatttgaatgaaatttagtatacataggtaaggtctagactctagaccctgagaaagaactaggctactttttatcccggaattcccacgggataactttttaaggcgaagcgaagctcgcgggtatagctagtacttaatataacaatgtttttttacaacaccgctgtgtaaattttatttaaagtaaatgtagctattaatggtccccttaagacccttagctttgcaagtgaactctagggcacaacaaatatgtaaaaagtctcgcatatttctacatacgtcttttaatataccttcttatgatttctatacgtaccgacatagtattaatttacaatagtgggcaaaggaaagatataaaaaatcataagttgttaaaaatacatttaatttcaataaataatgtcataatttcgaagtcatcatcaagttaaactacctgacaacagttgcacgcaatgagtctgagtcaccccttttcaggtaactatatacctaccactccggcaacatcctatatgtacctacataataataagaaaagaaaaacattataaacagaaatgtaaaacttttgtaagtacctaaaaaatcactttttaataaaaaattataaaaatatgttaaaaaactttaaattcgactgtgagaccggccattgtgccgccatctggatatatggtgccagataatgcgtctgtcgtcgctattggctgggggaggactgttgtgagtatatttttatatactttcagtcagctcaagagtagtttttatgtatgcataaatttatctttagtcgtaaaagtagtcagtaaaagtagacctttacatcagcttataggtagagccaagtagttacgtaaacagaaccaccgaccctgatctgctcttctctcttctcaggaataatttgggataaagccaatgagttcaaaaggatttagtaataagtatataagtcaatggataaagctaacattcatgtcaacctgtgtccatgtgggcatgatattgacaatatcgtgcctatccatgtccgatgctctttaatcaatgaatacctacatattcgtagcacatttgtacacacgagataggttgcgaaccatatcgccgtttttggaataagtacaatgcactttggatatgtcgcaggcaactggtttaatctcctgtttgattgaaccactagcccgttcattggatggcgctgttcagttgtatgactaggccgaacgttgattgtacaagcgtcacaaaacgtccaactagttagctgacttaaaatcagtcaggtggggaattaaacaaacatggcgtctaacagctaacagctgacacaaaaagcaccaatattgtaagttttttgcaaataaattagctttaaagtgcgttatttgtgttaaaatagtgtgacaacatggatttacttattattacgccgcgggtggatagtttcaaagaaaaaattgtggcgaaactggataattatgaacaacaatatgaaggtacgtttattgttattgtttagttcatttgtgagataagagctttgtaacatagtctttttgttgactcttgtctagtcatgttcaccctaaccagactttacaaacttgctatactaataatgtcctcctagccgaatttcgactacggcggccaatctcatttgagatcagccatctacgcaggagtagattatagtgcccaagtgtgtgcgcagtacacaggagcactctctgttccatcactctcatagcccaatgggacggattgaccgacacgactggagagagctaggcgcaggaccgactgctttacatgcccatccgacagcatggatcgtttcactgtttcggacaacaggtgatcagccttctatgtcctaaccaaacttagaaccacaatttagaaacacaaattgatggtcccacccgggaatcgaacccgggaccactgggtcatgaagcgaagcttctaccactagaccacagaggcagaccacacaaacttgctatactatatcgcattcaacgacttcgctgaatgacgttcagtcaagacgtcgaacgttacaatcaacgacttgacgagttgtcctttagtcatacaactgaatagcgccatccaatgaacggcctagtggttcaatcaaacaggagattaaaccagatgcctgcgacagatacacatctagaatctacatgtgcaggtttcctcacgatgttttccatcaccgtaagagcacgtggtattatgtgtgtacttaaactccttaattgaaaatacaattgaaagaattcattggtacaggccaggattcgaaaccacgccctctcgattgcgtggacgaggccttatccattacgccaccaccggcctattctttgatcaagttacgtatatacctaagtacctacctacctacccaccctacacccatcaagagcttaacaattccactataactttatccttatctccaggagaacatagcttcgtcagtgtcgccgagcctccgccacgtgagcgtgcgtaaagtgagccgctcagagtgcgccgctcgctacagcgcac

SEQ ID NO: 39 - DNA, 12633 bp, unidentified
  misc_feature 1..12633: note = Fanzor polypeptide
  variation 10767: note = n is any nucleotide
  variation 11054: note = n is any nucleotide
  source 1..12633: mol_type = other DNA
gcggttctttagcccgttcggcatggtcgacaaaggtgacagcaatccactcaccacaggcagagtcatacacgacctctctcatccagaagacggctccgtgaacacacatacaatccaggacgaagtctccaagacatcgttcgaacattgcttcagtatcgcgtgagaagtgtgtcatgccgttgcgcctaccccaggcacgacgtcaaactcacgtccagcgacgttgtcacagcatatcgcaacgcgtgcacacacagtggatgcgtctacatgtccgccagccacactctagaagataaaggacgccgcccaccgttgacaccgtgagtgctatcaccactgcacaaccgcgtgacgcttccccgtcccctagagcgcaaccaacatactttaaccgcgggaagcctggtcatatcaaacgctactgtaagcagccatcgaaggaggaagtaattgttgctctaccttttagaacgacaccaaatggagtgagtctgagaaagtggaaacttgacagcggctctagccgtcatgttatcgtgaaccgcaacatactgagagatgcagtcatgtgtgacgatggtcaatgtgctgtacccaataacagcactctggttatgacttggaaaggcacgacgacgctgacaactttggttaatggtgtaccttgagacgtgaatctaactaacgtgtattacgcataccctagaatgtgatatcatttcggaaactcgatcgccttggctgcgaacttcgttatcgccgcggcgcccgcgtcatggttcgcgtctcggatggtttggaaattttcgaagctgatctcgaatcgaataactttcttgttgtccgtggttcaccaggcagcaaagaacaggctctacttggtgcaatcactgcggcatactctacgcctcctgatgaaccacaacgcggatcgttgacgcactttcacgaacgttttgaccacctcgattttcgcactatcctgcccatggcggccagccccgagtccggtattgtgcttgcggaccgccaccaggaggcgtgtagaacttgagcggaaaccaaacaaactcggaatcctcagcctcaacgcgactccggccttcacgctccgattgatcgtgttagcgccgtcatctgcagtgacattaaatgccacatcacacctcgtgatcgtcgaggaacccgatacatcatcgatttcattgatcatcaatcaaacaactgtcgcattttcgttgctaaaacgaaggatgctgccgcccgcatgtttaagacttttatcctctggtttgataaccgctttgattgtcacgtgtattacttacggaccgacggtggttgtgaatattgcacagttgacatcctctgccagaataatggcgtcgctcgacagatcagtgaagccgacaaccaggcttcgaatgaaaaggcagagagattacatcaaaccgtgatgaatatggtgcgagctatgatttttggttctggtttgcccttttacttctggggaatgctgtcgaaaacgcatcctatgttttgaatcgcagccacacgaaaagcaacccgaaccgtgcgtctcctctcgaagtgctcactggcacgaagccgacctttacggacattatcgtgtttcggtccgcgtgcacagtttctgcagcccaaagaaaaactcgctgaagctcgcgctgaatcaggcaagattattggcaagtccgaggagactaaagactaccccattttctttccgaagtcgctcgccgtgtaaacgatccaacacgtccagaacatcacgactctctcttcgtctgccagtgatgcctttctcgaccgccgtcgctccgagactgatagtgcgtcgccatgtaccccctgcgacggcaccaatgtgcaacaggagccgtctgccctacggagaccgctgctctggaggcgacttaatttcgagaggaaactagcgctcggaaggagcctgaagtctgtgtcacaccgctcacacgtgcatcacccaacccctccgatgcggttgattcacagccttcgcctccttcaacacgtcgcacccgtctcagccgccgtggtcgtcgcggactgaagcccaatcgcacaacagggggaggtgatcatagcgacgctaatagtgaagtgttattgccagccaacccgctcactaccagaatggtgacccagtacggcggaaagaagattccacctcgacaaatagtggcccttctatacgaagcagatcctcgaaactgccgcgaggctatgcgcagtagcaaacgcgaagattggcgtatagcgacgaacaaagagctcgcgacactagaatacaatgaaacctgggaagtcgtcttgaagacccccgatatgaagcctttacagaccaagtgggtgtacaagacgaagaaggatgccaacggtgacaatgaacgtggcaagacacgggtggtcgcgtgtggaaacgagcaagagcaaggtatcaactacacattaaccttctccgccgtgatagatatgaccactggcaaggcgattctcgttctagctcgcatctgggacgtacccgcacgtcacggggacgtaccaaatgcgtacgtcgaggcagccactgaaaacgacctagaaatctgccaatacgttcctcaaggaatgcatattgattcttcaatcctgttacaactgggagctcgcagtccacgcgaagttgttcttcggcttaagaaaagcttgtacgccctcaagcaggccggtcgcttgtgtaataaacggttacacacaacactgctcaagaaaggcttccagcaatgcctcaccgactcgtgtctctattgctgccgtgatagcaatggcatgacggtgattggcgtgtacgtagacgacctactggttactgctactagcacagagcgggttgatcgtgttttcaacatgctggggtgtctatctatcaaatatttgggcctcgtcagcaagttcctcgggatgcgggtccaatacgacgaagcagacaggtatcatctagaccaagcccctacaattgaggtgctacttcataagcacggattacatgacgcacaccctacacgcactccgatcgaaaccaactacgacgaccaagacgaagacgatgatgaatcctacctacatgggataacgaaggcaccccatcgcaacctacagtccgacgtttctagtcactagttagtagcttgctattgcttgctcgttgcactcgcccggacatcggttacgcagttcacaaagcatctcaacgcacgcatgcacccacattacgagattggcgagtagcaaaacgaattgccaagtatcttaaaggatctgcggatgtcaaactgaaggggagtcctgcagcacacacggtccccttagagctttgcagctacagtgacgctgactatgctggcgataacaaggacagaaaatcgattacaggagcaaccttcttggtcaacggcatgacagtcgggtgcgtatgcaaaaacaaacggtagtagtgctctctacaatggaagcggagtttctggcagcctcccaccccggccaagaactgctagggcttcgagatctctttggggagctgggattgaatgttaaacacctcatcacgatgttaatggacaactaggcagccatcaaacagcatcaaagcgaggagagctccggccgggccaggcatatcgacgtgaagctcaagtttggcattgactacgcgaagaagggcctgttgctgccgagctacgtgtcaacgttgatgatgcaagccgacattttgacgaaagcctttcctgcaccgcgcctcaacgagttacgagagctgtgtcgcctcgccaacgatcatggcgatgcgcgcacgtgaggaaggagtgtcggaacggcaagtgtctgttgtagatactgacgtcactgtgcgcaacgtcgcatgtgcgatgtttaccatatcatatgtgtgctgtgcgcaacatcacatttgacggtaacgaccgaagaatcctcagggagcaggctgcatcttaatgcacttctctttattcctcttatcgctaaacatcgttctaacgtcattgatttggccgccgcgttcgggtggacaggaagtgccggaacttacggaattatcggaagtgcagtcgcatttttacacggttcttccaccaacgccgaccacgccgacgatttttataactaccactgggttgacgaccatatcaccgtgacctccgacagaggcacgaagtgcgcggacgtcgctcgatcattacggtgggcgatggctaccgtaatgggccccgctgccaccagttcacataatggagaacacgcctgaaagttctcggtttgatctttgacacccaatgctgaacggttgctatgccccctaccagaatcgcaaaagccaaactacttgtagagcatgccttcaaggcactctgccgcaaagagtaccgttccctcctgggatccctttgccacgtggccacaagcatatgggatatccacacattccaccagcgcctgcgatcctctgagctcaccatccccagagtccgacgaatcgaagtatcgctggacatgtgcgatgatcttctttggtggcggcgcattctagaatcacgcgcccttaccggagtgtcactcgaacatttcgaagccaggcctgagcacgacatcgccgtctttacagacgcatccgacgaagtcatctgcgctgtcgttccatcgtcacaactgtgcatcacttactgattatttgctccctcagaataggagcttatcgaggcgtaccaccgaggcgcgcccaacgagttcgacatcaactaccgggagctgttggcatgcgcgttcgcaagtcaggtgtgggaccacctgtggtaccagctccgacaccaggcaagtcctatccatgttcacttccgcattgacaacaccactgcggtatcctggcaatccacaatgtcattgtgcaactccggggcccagctactgatacggctcctcagcacgtgggaagtcgagttcggcctgcggttctcctcatcccacatacctggcgccgagaacatcctcgctgacacattgtcccggcggtgggggaaagaacagcacgggcattcattcacgaaactaataaacggttggtcacaggcaacgactccggcatcgatcgcaaacctcgaggatgtatggcacaacgtctccacgagccttctgttgcagtctcctccttcaagacatacaaacgagcgttcgacttcagtaaaggatggaccgcccgccaaggaatctgctggcacctcaacaccacgctagccgaacaattacaacatgtctcagacgtcatcatccatggtcatcaacgcggattcggctccaacctgcccatacagatccccacgatcagaatcgcgctacacggcatcctccacatcctacaagcagtgggctacgatttccattccattcatccacgtattcgcatggtcgtacgcggggttggacgactggatagaccaccccgacaaacggatccagtctccgtctccctcatagaagaatgcttcaattccctcgaccttcatgaccccgtcgaccaagctctctggggggttctgcgtctggccttcttcttcatgctacggaggtccgaaatcatgtcaacaacggcttcattattgcgttgattcgccctcaaggccaccgacatcatactaatcgacgcagtgggagatccgaccacatacccatgccgcattgtcgccgcatgcctcctcatccgttccaaaacagaccagagaggtgctccgaccacccggatgttgtcccgctcaggacacccattcgtgtgcccgttttcggggaattgctgctccaacactcgcgaggaaccctgccggcagaagtaccagtcgctgtattactcgacacccgaggcgttccaagaagtgtatcctccgtttgagtcgcaagtgcaatccagctcgcagcgcgcgtagcaggaatggacccacgcggatacagcacacagtcgcgcagagcaggcggcgccaccaacgtgtaccgcgcgggagttgacgctctgaccatccaatcccacggccggtgggcatcagacgtgtttaagctgtacactaggctgtataccgagtctgtcggcagcgacgcggtaaagatggtcagcgaggcagcgaacacaacagcactgcagtaacgtgctactaccacccgaacaaggggcacagcccgatctcacggtcaagctgtggcgcgatagctacacgttccataatctgtaactatgtctaatttgtccccaactctgtgcaaatttaaggaggaaatcgaggggttattgtcggcggtgagagtgctcgacagcacatctgtcgtagcgtggttactcacagcacctattccatgtttacggtgcgcgcggacgaggtcccgagctttttccgaagtgacattagaaaactgaaaaaccgaatatgtgggatccccacacttgaaaacttttctgtccggcggcgagttcgtggcaagtttcttggattattcaagtaatttgggagtaaactacgattgtggccgcggtagtggtggcgagttcttctgatgtcctccccgaggcttagcccctgtttgttctgaggtcgatctgtaattccctgcgtatccattaccactgccaccctatggactcggtttctgagggtaaaactgcttcaaagtaacagaagacctgcaccttgggtgtcagccaattgagaaagtttgaacaggcttgtttctggtcttcttcaactcagtgaagatggttgatttcagagctggggtctaagtccaatacagaggacttcactgaggtcttaggctcgtcaaacgggaagtcgtccatgccttccgcgtccagttccaaatgcaagtcggccaccaaccgggtcacacgagattcagcaaccaacagagtcgtatccatcgcgagactcttcatagcagtcgcaagacgggcgtaatccttggtattactgcgtctgacattaagaaagtaggtcttccacaactcctgagtcacctcgtgctccggtcgttgtagctggtaatcgcaaatgcgcataagtatcttgtgctcgtatattaacgccaggtccgtgccctaaacgacggtagtcgcggtattgggcagctcagaatgatgcctctcagctcgtgaattgagatagatagctgtccatgaaggccttcgtctcctgacgggaactgctgcgatagggcgggggagtgggcatgtatgcacccatatccaaggtcagacgaggcatgctgttttcgctggcctcagagtcatccacccgacagctgagccatcgcttcaacttggcgatcccgctcttcttgcagctgccggttttcttgaagagattgttgcagcgaaaaagttgatgtccgacgtgacagcgtcagctgttgctcaattaccgcatcctgcgccttctacccgatggacgagcgccgactcctcataagagaggccatcctgcagcacgactcctactaaagtattatttgttgtgtcgaacctgtgactcagactcccaaatgaaaaacactttaatcaaagaagtgagaagcataaaatctgcctgcttgctcagacggcctccctgtcgctgttctccacgacccgagtcaaatggaatcctagcagcgaatccgcaatcttccagtcttatcacgaggcagcagcacccattcaccaggcgccacgtgcttctaatcgccttgtcaccctcgtcaacggctagaagatgatggatgtcgtcagcagtttctgccacatgtacgacacgtagtttccttcagcgctggtcgccaactttcgcatctcacaccctcagtgtgtgaccagcatgatggtggtatgcaccaccctcgacagggatgaaccgaataccccacaggagcgcgagcttcgtgagtagctgggcgtggttcctagggagtgggcagtgcgtcagaacctcccacacgttatcatgaaggtgtacgacatgctttgctggatggagacatttgtggagacgcacccgaagacgaagggagctcgattatactctctcctaccgttctccagctcgttcgttactacacacatcacgattaatatgacatcactctttcatgtcttccaacggatctacaaagtcccagaagtaaataagtacgtggacgacgagctgcagacgggatgccgtacatcagaccgacaaatgttgacacagaatcgagactcaagtttttgcaagttgttcaagtagacgggatggagaccgctccctgattcgcactccaaataacgatagacgggtatgcggcttcagtgatgttgtggcgaagcgcgtggacaaattcgtggcgtcccacgtggcgtcccaagtcgtgtcgcaagtgtaatatttacggcgagcgtgatcattctggtgagcgcaatcattccgatgagccgatcccgatcaggtcgacatgtggtgcaatcattttgatatccctgcgtgtgaatgtcgatcccagcgaccgctgattagatcgacagtgagcaatcatttcggtacgcgatctacacccgattgacgcggtatcatcattatggcacggggcgatcgcatatattgtgggtacagcggagcgatcttttcgctacgggtaccacgatcttggtacaagggatcctgttcgagctacggtgtgatgcgcaatcgggatagggagagatctttagggcctttaccttttgggttaaatagattctgatttaccttgcaagacacaagtggcgtccatactttccggggaaggaactacattggcctacccgacgaaggactcaccaggtcaaccaaggacacgaatagcttggccggggtgcgatcgcatactctcatctcaactcaagatcccgccaagaggaggcggcaagcaacggaaagggccataacagcacaccccaacgacaaccccacgcgatcgacttgtcctaaggcccgatcgcagaccaccgatgaatacccgcgtggccgtcacccacccgctcccctgaaggagcagtccagctccatatttagtcttggtcaccaccgcacgtcttcccgtgaacatcggaagagcggaacccgccccgccgtagggtacacaaggtgactacaaggttacgatcacgcctgatcaacggagtaccccctccgatagtcggcagtccgggcgtaccgctggcaagcttgggtcgcatcatcgatttttgtgatcccactccgccacactgttgcgtcgtcaatttcttgacgtggcagacaccgtccatgaagacacggaaacggccccaaggtggaagaaacataagaacaacgcagggacagccgtcgacccaccagcctccgtgacaaagtgcgtcttcgacttggcatttgaaaagctgctcagtggatacgctcccgtgatcatgatcggtaccgaccctcgcatgatgaacctgtgcactgcggcgtgtgtcagccatctttcaactcgccggcagcaccggcaacacaaccgacaccgcaagtactacaacaagggcaagcataagcgcaagagtcgtcacggccaactgattgtggagattacaacgagagaatactaccatctggtcaagttagacaaacaacgattctggagccgcaagttgagaaagcgcgagaccaggtaccgcgagctgcttacagcgataccatccttcaaaaccgcggactacgacgtctacgtggatcgcttgctgtgctttctgcagtcctcgggcttcctgctattcattatggaccaacactcgttctgcaagtggcaattccttacgtacggcatgaagatgacgaccctgagtgtattggccaagcgtatcgtaccgacttgaagagcacaagttttgtgttgcgattagagattgaagctgccaagaggtctccggggaaatccgcacgggccgtataaggcgttcaggaaggaacttgagcggcgaggtatggtcctgtccatggatgagtttcggacgagtaagttgagctcctgcagtcatgagcgcctctaccaagcacagctgctgacgaaggtgaacgacaaggactccgagggggtcaagttcgtcatgaaggggaatagaaacgttttgcgctgtttgaacagtcattgcaatgccaacttctggaaccgggacgtcaacgccgcaagaaatattctggagcttttgaagtgcaaattactcagactggagaggctggcagcattcaagtggtggcaacccggtcggaaatgtgattgggaaggctgttgcactggcgtacgcagcgggcgtatcgcggtgcaacggggacccatacccaatcacacggtgtgaaggagcaaaattccgaggacagatgtaacgggatacacggatgtgtacccatgttacataaagagtgacgagatgtccctctttagtgtccatggtacgtggtaccggttggctgcgagccaaccattggacacttctatagcttttactatagttgacttagagtttgtatgattcaagcttggctcacctataaaatatattcagtctttaacctaccgtctacgtcgtagtctgttcccttaggccgggaactgtgaactagttgttcaccgagagcttccgctctctagcacttcctctgtgcaaggtgctgnattggacacttgtttatcttttactatagttgacttagagtttgtatgattcaagtttggctcacctataaaatatattcagtctttaacctaccgtctacgtcgtagtctgttcccttaggccgggaactgtgaactagttgttcaccgagagcttccgctctctagcacttcctctgtgcaaggtgctgtgtgccccatcacacttggtagcactcgtagtcaatctcgcgcctacgcgggtagattgaactacctgaatcctctgtggtctcaaagactgagcngtttgtatgattcaagcttggctcacctataaaatatattcagtctttaacctaccgtctacgtcgtagtctgttcccttaggccgggaactgtgaactagttgttcaccgagagcttccgctctctagcacttcctctgtgcaaggtgctgtgtgccccgtcacatatgcggtggcacgaagtgctacgcaacacacggctgagcgcgtggctaccttcttaatggaggatgtagttttgaagttcggtgcttttcgcgagctgctcacagatggagcacctgaaatgacagggcgagtgattgagcagttagtgacaacgttgcaagcaaagcagatgaaccctgtaccgtatcgcccgcagatgatcgggctggcagaacgttttcaccgttcctggaaggattgcgtaacaactttcatgagcgatgaacaacagaatgactggaccgaatgggtgcagcgtgcggtgtactcgtacaactccgcgcagcattccacggctgctttaagcccgaacgaattgatgatgggacggcgcttgcgtcctcctaacgaattgctgaggaggacttaacaaacagaagccggtgagctgatggagtaccatcgaagattgctgtctgcaatgaaacgaagccatgaatgtgccgagcgcgctcgcaagaaggagcaagccaggcaagctcggtattacaaccgaaaagtacgacaacgacgaacgtttggggctggtgataaagtatgggtgcacaacccaccgcgtggaccaaaagccaccaaattcgttcaccagtggatggggccgatgcgggtgattgagtctgccggttatgaaaattttgtactaaagcgagagggcaagaacgaacagctggagacgatgatagttcatgtctcatttatggtgagatatcagtcctcaacctccttgctgcaacaagcagccaacgacattaacaagcagttagaatatgaagatgcaagctaatcggcggacgatgtcgagacgacaagagcgactgcatacgcagcggcggctgttgatgacaagagcgacagcaagctctagaaaacgaggtcgcaatgcaatggcaggtacggacaacaagcgtgaagcccaccctgagctggtggagcttcaacgaagaagacgtcgcaaccgagttggccagtacatattgcaacacgaactctgaccaactggcgccggatggacacgtacggcggatggagaacggtggacgacgaaggacggacgatgggtcacgcgctgggtggacaataacgagtacgagcagctgtacgagggcggtagggtcgtggaagacccctgctttaaggaagtcgtgtaacatgatggctaacatgccaggccaccatgcggtacacgatggacggacggaggagagtgagcgagacgatcggacacgacaacgcgtcgaggcagaccaatagggccacggatggaaagatctcgactcagataaagggaacaggggacgaaaacgaagactgactgcagggttagctctagaatggatcatatacggaacggatcaggtttctgaacagacac

SEQ ID NO: 40 - DNA, 10692 bp, Phytophthora sp.
  variation 9194..9219: note = n is any nucleotide
  source 1..10692: mol_type = other DNA
ccgttcggcatggtcgacaaaggtgacagcaatccactcaccacaggcagagtcatacacgacctctctcatccagaagacggctccgtgaacacacatacaatccaggacgaagtctccaagacatcgttcgaacattgcttcagtatcgcgtgagaagtgtgtcatgccgttgcgcctaccccaggcacgacgtcaaactcacgtccagcgacgttgtcacagcatatcgcaacgcgtgcacacacagtggatgcgtctacatgtccgccagccacactctagaagataaaggacgccgcccaccgttgacaccgtgagtgctatcaccactgcacaaccgcgtgacgcttccccgtcccctagagcgcaaccaacatactttaaccgcgggaagcctggtcatatcaaacgctactgtaagcagccatcgaaggaggaagtaattgttgctctaccttttagaacgacaccaaatggagtgagtctgagaaagtggaaacttgacagcggctctagccgtcatgttatcgtgaaccgcaacatactgagagatgcagtcatgtgtgacgatggtcaatgtgctgtacccaataacagcactctggttatgacttggaaaggcacgacgacgctgacaactttggttaatggtgtaccttgagacgtgaatctaactaacgtgtattacgcataccctagaatgtgatatcatttcggaaactcgatcgccttggctgcgaacttcgttatcgccgcggcgcccgcgtcatggttcgcgtctcggatggtttggaaattttcgaagctgatctcgaatcgaataactttcttgttgtccgtggttcaccaggcagcaaagaacaggctctacttggtgcaatcactgcggcatactctacgcctcctgatgaaccacaacgcggatcgttgacgcactttcacgaacgttttgaccacctcgattttcgcactatcctgcccatggcggccagccccgagtccggtattgtgcttgcggaccgccaccaggaggcgtgtagaacttgagcggaaaccaaacaaactcggaatcctcagcctcaacgcgactccggccttcacgctccgattgatcgtgttagcgccgtcatctgcagtgacattaaatgccacatcacacctcgtgatcgtcgaggaacccgatacatcatcgatttcattgatcatcaatcaaacaactgtcgcattttcgttgctaaaacgaaggatgctgccgcccgcatgtttaagacttttatcctctggtttgataaccgctttgattgtcacgtgtattacttacggaccgacggtggttgtgaatattgcacagttgacatcctctgccagaataatggcgtcgctcgacagatcagtgaagccgacaaccaggcttcgaatgaaaaggcagagagattacatcaaaccgtgatgaatatggtgcgagctatgatttttggttctggtttgcccttttacttctggggaatgctgtcgaaaacgcatcctatgttttgaatcgcagccacacgaaaagcaacccgaaccgtgcgtctcctctcgaagtgctcactggcacgaagccgacctttacggacattatcgtgtttcggtccgcgtgcacagtttctgcagcccaaagaaaaactcgctgaagctcgcgctgaatcaggcaagattattggcaagtccgaggagactaaagactaccccattttctttccgaagtcgctcgccgtgtaaacgatccaacacgtccagaacatcacgactctctcttcgtctgccagtgatgcctttctcgaccgccgtcgctccgagactgatagtgcgtcgccatgtaccccctgcgacggcaccaatgtgcaacaggagccgtctgccctacggagaccgctgctctggaggcgacttaatttcgagaggaaactagcgctcggaaggagcctgaagtctgtgtcacaccgctcacacgtgcatcacccaacccctccgacgcggttgattcacagccttcgcctccttcaacacgtcgcacccgtctcagccgccgtggtcgtcgcggactgaagcccaatcgcacaacagggggaggtgatcatagcgacgctaatagtgaagtgttattgccagccaacccgctcactaccagaatggtgacccagtacggcggaaagaagattccacctcgacaaatagtggcccttctatacgaagcagatcctcgaaactgccgcgaggctatgcgcagtagcaaacgcgaagattggcgtatagcgacgaacaaagagctcgcgacactagaatacaatgaaacctgggaagtcgtcttgaagacccccgatatgaagcctttacagaccaagtgggtgtacaagacgaagaaggatgccaacggtgacaatgaacgtggcaagacacgggtggtcgcgtgtggaaacgagcaagagcaaggtatcaactacacattaaccttctccgccgtgatagatatgaccactggcaaggcgattctcgttctagctcgcatctgggacgtacccgcacgtcacggggacgtaccaaatgcgtacgtcgaggcagccactgaaaacgacctagaaatctgccaatacgttcctcaaggaatgcatattgattcttcaatcctgttacaactgggagctcgcagtacacgccaagttgttcttcggcttaagaaaagcttatacggcctcaagcaggccggtcgcttgtggaataaactgttacacacaacactgctcaagaaaggcttccagcaatgcctcaccgactcgtgtctctattgctgccgtgatagcaatggcatgacggtgattggcgtgtacgtagacgacctactggttactgctactagcacagagcgggttgatcgtgttttcaacatgctggggtgtctatctatcaaatatttgggcctcgtcagcaagttcctcgggatgcgggtccaatacgacgaagcagacaggtatcatctagaccaagcccctacaattgaggtgctacttcataagcacggattacatgacgcacaccctacacgcactccgatcgaaaccaactacgacgaccaagacgaagacgatgatgaatcctacctacatgggataacgaaggcaccccatcgcaacctacagtccgacgtttctagtcactagttagtagcttgctattgcttgctcgttgcactcgcccggacatcggttacgcagttcacaaagcatctcaacgcacgcatgcacccacattacgagattggcgagtagcaaaacgaattgccaagtatcttaaaggatctgcggatgtcaaactgaaggggagtcctgcagcacacacggtccccttagagctttgcagctacagtgacgctgactatgctggcgataacaaggacagaaaatcgattacaggagcaaccttcttggtcaacggcatgacagtcgggtgcgtatgcaaaaacaaacggtagtagtgctctctacaatggaagcggagtttctggcagcctcccaccccggccaagaactgctagggcttcgagatctctttggggagctgggattgaatgttaaacacctcatcacgatgttaatggacaactaggcagccatcaaacagcatcaaagcgaggagagctccggccgggccaggcatatcgacgtgaagctcaagtttggcattgactacgcgaagaagggcctgttgctgccgagctacgtgtcaacgttgatgatgcaagccgacattttgacgaaagcctttcctgcaccgcgcctcaacgagttacgagagctgtgtcgcctcgccaacgatcatggcgatgcgcgcacgtgaggaaggagtgtcggaacggcaagtgtctgttgtagatactgacgtcactgtgcgcaacgtcgcatgtgcgatgtttaccatatcatatgtgtgctgtgcgcaacatcacatttgacggtaacgaccgaagaatcctcagggagcaggctgcatcttaatgcacttctctttattcctcttatcgctaaacatcgttctaacgtcattgatttggccgccgcgttcgggtggacaggaagtgccggaacttacggaattatcggaagtgcagtcgcatttttacacggttcttccaccaacgccgaccacgccgacgatttttataactaccactgggttgacgaccatatcaccgtgacctccgacagaggcacgaagtgcgcggacgtcgctcgatcattacggtgggcgatggctaccgtaatgggccccgctgccaccagttcacataatggagaacacgcctgaaagttctcggtttgatctttgacacccaatgctgaacggttgctatgccccctaccagaatcgcaaaagccaaactacttgtagagcatgccttcaaggcactctgccgcaaagagtaccgttccctcctgggatccctttgccacgtggccacaagcatatgggatatccacacattccaccagcgcctgcgatcctctgagctcaccatccccagagtccgacgaatcgaagtatcgctggacatgtgcgatgatcttctttggtggcggcgcattctagaatcacgcgcccttaccggagtgtcactcgaacatttcgaagccaggcctgagcacgacatcgccgtctttacagacgcatccgacgaagtcatctgcgctgtcgttccatcgtcacaactgtgcatcacttactgattatttgctccctcagaataggagcttatcgaggcgtaccaccgaggcgcgcccaacgagttcgacatcaactaccgggagctgttggcatgcgcgttcgcaagtcaggtgtgggaccacctgtggtaccagctccgacaccaggcaagtcctatccatgttcacttccgcattgacaacaccactgcggtatcctggcaatccacaatgtcattgtgcaactccggggcccagctactgatacggctcctcagcacgtgggaagtcgagttcggcctgcggttctcctcatcccacatacctggcgccgagaacatcgtcgctgacacattgtcccggcggtgggggaaagaacagcacgggcattcattcacgaaactaataaacggttggtcacaggcaacgactccggcatcgatcgcaaacctcgaggatgtatggcacaacgtctccacgagccttctgttgcagtctcctccttcaagacatacaaacgagcgttcgacttcagtaaaggatggaccgcccgccaaggaatctgctggcacctcaacaccacgctagccgaacaattacaacatgtctcagacgtcatcatccatggtcatcaacgcggattcggctccaacctgcccatacagatccccacgatcagaatcgcgctacacggcatcctccacatcctacaagcagtgggctacgatttccattccattcatccacgtattcgcatggtcgtacgcggggttggacgactggatagaccaccccgacaaacggatccagtctccgtctccctcatagaagaatgcttcaattccctcgaccttcatgaccccgtcgaccaagctctctggggggttctgcgtctggccttcttcttcatgctacggaggtccgaaatcatgtcaacaacggcttcattattgcgttgattcgccctcaaggccaccgacatcatactaatcgacgcagtgggagatccgaccacatacccatgccgcattgtcgccgcatgcctcctcatccgttccaaaacagaccagagaggtgctccgaccacccggatgttgtcccgctcaggacacccattcgtgtgcccgttttcggggaattgctgctccaacactcgcgaggaaccctgccggcagaagtaccagtcgctgtattactcgacacccgaggcgttccaagaagtgtatcctccgtttgagtcgcaagtgcaatccagctcgcagcgcgcgtagcaggaatggacccacgcggatacagcacacagtcgcgcagagcaggcggcgccaccaacgtgtaccgcgcgggagttgacgctctgaccatccaatcccacggccggtgggcatcagacgtgtttaagctgtacactaggctgtataccgagtctgtcggcagcgacgcggtaaagatggtcagcgaggcagcgaacacaacagcactgcagtaacgtgctactaccacccgaacaaggggcacagcccgatctcacggtcaagctgtggcgcgatagctacacgttccataatctgtaactatgtctaatttgtccccaactctgtgcaaatttaaggaggaaatcgaggggttattgtcggcggtgagagtgctcgacagcacatctgtcgtagcgtggttactcacagcacctattccatgtttacggtgcgcgcggacgaggtcccgagctttttccgaagtgacattagaaaactgaaaaaccgaatatgtgggatccccacacttgaaaacttttctgtccggcggcgagttcgtggcaagtttcttggattattcaagtaatttgggagtaaactacgattgtggccgcggtagtggtggcgagttcttctgatgtcctccccgaggcttagcccctgtttgttctgaggtcgatctgtaattccctgcgtatccattaccactgccaccctatggactcggtttctgagggtaaaactgcttcaaagtaacagaagacctgcaccttgggtgtcagccaattgagaaagtttgaacaggcttgtttctggtcttcttcaactcagtgaagatggttgatttcagagctggggtctaagtccaatacagaggacttcactgaggtcttaggctcgtcaaacgggaagtcgtccatgccttccgcgtccagttccaaatgcaagtcggccaccaaccgggtcacacgagattcagcaaccaacagagtcgtatccatcgcgagactcttcatagcagtcgcaagacgggcgtaatccttggtattactgcgtctgacattaagaaagtaggtcttccacaactcctgagtcacctcgtgctccggtcgttgtagctggtaatcgcaaatgcgcataagtatcttgtgctcgtatattaacgccaggtccgtgccctaaacgacggtagtcgcggtattgggcagctcagaatgatgcctctcagctcgtgaattgagatagatagctgtccatgaaggccttcgtctcctgacgggaactgctgcgatagggcgggggagtgggcatgtatgcacccatatccaaggtcagacgaggcatgctgttttcgctggcctcagagtcatccacccgacagctgagccatcgcttcaacttggcgatcccgctcttcttgcagctgccggttttcttgaagagattgttgcagcgaaaaagttgatgtccgacgtgacagcgtcagctgttgctcaattaccgcatcctgcgccttctacccgatggacgagcgccgactcctcataagagaggccatcctgcagcacgactcctactaaagtattatttgttgtgtcgaacctgtgactcagactcccaaatgaaaaacactttaatcaaagaagtgagaagcataaaatctgcctgcttgctcagacggcctccctgtcgctgttctccacgacccgagtcaaatggaatcctagcagcgaatccgcaatcttccagtcttatcacgaggcagcagcacccattcaccaggcgccacgtgcttctaatcgccttgtcaccctcgtcaacggctagaagatgatggatgtcgtcagcagtttctgccacatgtacgacacgtagtttccttcagcgctggtcgccaactttcgcatctcacaccctcagtgtgtgaccagcatgatggtggtatgcaccaccctcgacagggatgaaccgaataccccacaggagcgcgagcttcgtgagtagctgggcgtggttcctagggagtgggcagtgcgtcagaacctcccacacgttatcatgaaggtgtacgacatgctttgctggatggagacatttgtggagacgcacccgaagacgaagggagctcgattatactctctcctaccgttctccagctcgttcgttactacacacatcacgattaatatgacatcactctttcatgtcttccaacggatctacaaagtcccagaagtaaataagtacgtggacgacgagctgcagacgggatgccgtacatcagaccgacaaatgttgacacagaatcgagactcaagtttttgcaagttgttcaagtagacgggatggagaccgctccctgattcgcactccaaataacgatagacgggtatgcggcttcagtgatgttgtggcgaagcgcgtggacaaattcgtggcgtcccacgtggcgtcccaagtcgtgtcgcaagtgtaatatttacggcgagcgtgatcattctggtgagcgcaatcattccgatgagccgatcccgatcaggtcgacatgtggtgcaatcattttgatatccctgcgtgtgaatgtcgatcccagcgaccgctgattagatcgacagtgagcaatcatttcggtacgcgatctacacccgattgacgcggtatcatcattatggcacggggcgatcgcatatattgtgggtacagcggagcgatcttttcgctacgggtaccacgatcttggtacaagggatcctgttcgagctacggtgtgatgcgcaatcgggatagggagagatctttagggcctttaccttttgggttaaatagattctgatttgccttgcaagacacaagtggcgtccatactttccggggaaggaactacattggcctacccgacgaaggactcaccaagtcaaccaaggacacgaatagcttggccggggtgcgatcgcatactctcatctcaactcaagatcccgccaagaggaggcggcaagcaacggaaagggccataacagcacaccccaacgacaaccccacgcgatcgacttgtcctaaggcccgatcgcagaccaccgatgaatacccgcgtggccgtcacccacccgctcccctgaaggagcagtccagctccatatttagtcttggtcaccaccgcacgtcttcccgtgaacatcggaagagcgtaacccgccccgcnnnnnnnnnnnnnnnnnnnnnnnnnnacaaggtgactacaaggttccgatcacgcctgatcaacggagtaccccctccgatagtcggcagtccgggcgtaccgctggcaagcttgggtcgcatcatcgatttttgtgatcccactccgccacactgttgcgtcgtcaatttcttgacgtggcagacaccgtccatgaagacacggaaacggccccaaggtggaagaaacataagaacaacgcagggacagccgtcgacccaccagcctccgtgacaaagtgcgtcttcgacttggcatttgaaaagctgctcagtggatacgctcccgtgatcatgatcggtaccgaccctcgcatgatgaacctgtgcactgcggcgtgtgtcagccatctttcaactcgccggcagcaccggcaacacaaccgacaccgcaagtactacaacaagggcaagcataagcgcaagagtcgtcacggccaactgattgtggagattacaacgagagaatactaccatctggtcaagttagacaaacaacgattctggagccgcaagttgagaaagcgcgagaccaggtaccgcgagctgcttacagcgataccatccttcaaaaccgcggactacgacgtctacgtggatcgcttgctgtgctttctgcagtcctcgggcttcctgctattcattatggaccaacactcgttctgcaagtggcaattccttacgtacggcatgaagatgacgaccctgagtgtattggccaagcgtatcgtaccgacttgaagagcacaagttttgtgttgcgattagagattgaagctgccaagaggtctccggggaaatccgcacgggccgtataaggcgttcaggaaggaacttgagcggcgaggtatggtcctgtccatggatgagtttcggacgagtaagttgagctcctgcagtcatgagcgcctctaccaagcacagctgctgacgaaggtgaacgacaaggactccgagggggtcaagttcgtcatgaaggggaatagaaacgttttgcgctgtttgaacagtcattgcaatgccaacttctggaaccgggacgtcaacgccgcaagaaatattctggagcttttgaagtgcaaattactcagactggagaggctggcagcattcaagtggtggcaacccggtcggaaatgtgattgggaaggctgttgcactggcgtacgcagcgggcgtatcgcggtgcaacggggacccatacccaatcacacggtgtgaaggagcaaaattccgaggacagatgtaacgggatacacggatgtgtacccatgttacataaagagtgacgagatgtccctctttagtgtccatggtacgtggtaccggttggctgcgagccaaccattggacacttctatagcttttactatagttgacttagagtttgtatgattcaagcttggctcacctataaaatatattcagtctttaacctaccgtctacgtcgtagtctgtt

SEQ ID NO: 41 - DNA, 21221 bp, unidentified
  misc_feature 1..21221: note = Fanzor polypeptide
  variation 10007: note = n is any nucleotide
  variation 20956: note = n is any nucleotide
  source 1..21221: mol_type = other DNA
tcacaatcaatgacgtgacacaaatcaatttgatccaccaatcacgtttcgagcagttgatcaatgactgcaagtcgacagaagaacttgacgaggtctacacaaaaatgacgagtcgcttgtaccgctagtagtcagacagactcgacatccgggtccgggtttgcttgggtacctgcttggagttttgttgttcgccgcgttcatcaaaataaatgacgccaactgtagacacggtgctcagattatattatttacaggttcgagtcttgctgctccgcttcgcatccctcatcccccccatcctcgtcaggtagcttcggtgccaggtagtacctcaacaccgagcccgatgaggtaatgttaaactcgatgcacagcggcatgttttcttcgaatttcaacgtgacctcctctgcaaggcagcaggccctcgtcatcgagaccaggtgcttcagagagtaccctgtgttgacatgcgtcaacgtcgcatcatgcgtcaacgtcgtggagcgagcacttttgaagcgcatgctgccacgtccaatgctcccctcgcacgacatcgtgagctgcagcatgtcctccagctcctgaacctcaaacatgacgctgtcccccaagctggcgaaatctttcatcgcttttgaaaaaagggtgctggccattcgaaagtccaccgtgttgccgctgtctggtacaaccatcctgtccgtgtcgatgagcatgagcttcaactcgaagtcggcgcttcttgcggccccagcatcttccgtgctggtgaagcggacggacatgatatcgccttccgttgtgaggagcgcgcggtcatctggccccgaacatttcatcacacggatgagattcgggatgttgaccccgagcgttgcacatgtcgcatcttgacacgcatacttgtcaaacatggcctggtcacttgagggcagggccagcgacaccaagcatacatgactggggtccatggactgcacgtagatgccgtccgatgtcgcgtcgatgttcacctcctgcaggatctccccgagggcctctacaagcgacctcagctgctttgcgctcgcaaatgtaaacatggttcggttatgaagtcatcttcttggagtttatttatattgtcgttgaatttgtatctcccgccgagtcaactgtttttaaaaaagacgggctgcaagtttgggtatgggacttgatgacaaaccagccacggtatcggaccggtcctccctcccaagacaaaaatgaatccactataaaggtacaaatgtcaattctacaaatcatcatcatcctcatcatcattatcatgagtactttgataatcggtaccttgtacgtgatccggtcgagagcgagtccagatcaatttacgtccatggcccaggataagtacgatgtcctctcggttctgcatgtgcgcccatctagctccaccccactctgcatgactggcatccccgatgaactcctggccaccatcagggccctgcagccctccgggattgacctcgtaagctgtgactcagattcagagacttcagatgcgatccatattcgtaattcgatggacttgcaagctccgagttcaaaaccgtatcaggtcatcttcaccacctccaagccacggatgttcgtgatggtgggtcgatcggatcgattcggatcggttcggatgaaggatcttctcgttaaaaaaagattcgtgtgcacatcgtatggtgcgtacgtaatgctagggttggttgcgtcggcccatggtgtggacatgcggtctgtacagttcatcatgagcgacaaaccagaagaggatgatgtccagtgcagcataacacgtcctcctttacaagggcggagtgcgactcgagatatcctgtacaagtatagcacccctgcattgaaagatcttctcacgatcaaggcaccctatgcacgggccaagggagtccttattcgggacatcctacccgaatatccttcgcaccagtccatcctggaattggttgtcgcaaacgacctcctggtatccccgtcagggttagccaagcagccgttggtctccatgctaggtgaacgtctcatcggtgatgcagataatgaaagcatcgcccgcaacacgatgtactcgctttactttccatacacacgggcatcaatgacagcccttaaagccgcatcgacacggatccggatccggacatcaactccagagtcctatgtcaactctacggaagacgacacggtttcacagttgcacgtcgagcatgctattgaggggacgtttgacctggatcatggcggtagggttcgcaaattcacgctttcgcctggtcatatcgacggcattccgctccatgtcggcgaccgcgtgcatctctccaagcagcagaggttggctgaaaatggtctgtacatcgtgagtacccgagggttgaatcaaaatgacgaaatcacgatgacttcccctcccatcgtggactttgtgggtaaacaagcggccgtgcgactcctcccagacgctgagtgcaagatagtccaggcgaagccgggcacaacttttaccgatgttacagatcaacatctgaaagccggggatatcgtgtacatgccccccctggacttgttcggcaccctctggtcctcaagtcgtatccttacccattgtagggatcctcaattgcaaaaggatgtcacgaaatttcacgagaaggcgatgtgcatgacggacccattggtgcccatcaaggagctctgcgaatccgcacgtgatttcgcgggtcaacccaagccggttggcgtgtgggacaggccgtgtgaggcagactcggagtgcccatttttcaagacgaacaggaggtatgacaacatccgcggggggtgcatggactccgggtactgcgaaatgccgctgggcgttcaacaggtgtcctaccggaagttcacaggaaagccatggtgtcacggctgccctcaagactacagcgcggattgctgtaccgaacaagccgtgcccaactacgcattccgattcgaccaattcaacgtactgtcgtgatctcgaacctcaaacagacatgtgcgctcgtatcgaggggtggtgcatgtatccgatgagctcgaagtcggcttcgttgagctcggcccaatctttatccttgacgacagggcttacccgaaccatgggaggcggcagaggtgggcgggagagctgcagcgtcacctgttccacatggtttgaatacacgtgggtgtcaccggtgctaataatgagttccttgggcagcagcccacactttgtcgcaaggatgttggtcaacagagcgtacgatggtatgttggcggccaagcccaggaaacaatccacggaacgctggtacatgtgacacgacaggtgcccttggtccacgtagaactgaatgaagcacgaatggcagggcgggagagccatgcgaccgagcgccgcggggttccatcccgtcatgcaaatgcggcgagaatgcggatcttccttgatcaaccgtaccacctcgttgagctgatccactccgtggcctgtgtaatcatcgtgacatgttccataggtggcaccgaaatgtcgccattggaaaccgtagcctgcacccatgtcgccggtgggcaggtcggtgagccccctcgcgtcaaggaagtctcgggtggtgtttccatcccaaatcttgatgccctgtaccgacagctccctcgtatccgtggagcctttcatgaaccacaacaactcgaggaggaccattcgaaaagacgtgaaccgcgttgtgaccatcggcagcttgccattggtcaaatcaaacttgagctgtcgaccgaagaccgcgagtgtgcccatcgttgtccggtcatctctcgagtgtccggtggtcaggatgtcttgcatcaggttcaggtacatccgctcgtcgctctcactcgtgatccgcgtgtagtccacaaatctatacgacatgccgctcgtcgtgtcggacatgagtgccgatgcacgtgtgatctcaaagtgggacagaaactgatgcgggaagaaggtatcgcattcgagtgatccttccacgaacgtcacgtacatggacgtcacactgcgcttttccaagaaatgctggtacacggagacaccaccgatgacgtgccaagaaagatgatcatgctgtccaacgacggcatccagctcgtcaaaggatgagacaaagatgatgtttgggtccggtgttgcagacatgaggtccgctgacgatctggtcaataccacgttgagcctacccttcagcggtcggtgctcctccggaatcgaatcgaacgtcgttcgccccatgatcaccccacctccagccgtaatgcttctgaaccgctgcatgtcagcttggagtggtgaccatggaagcacaccgttacggcctattacggcctatcccaaagcgcttgcacatggccaccacgatggccaccattttgttttctattcaccttcaagagcaccacttcactttatgtgccaaccaaactgacttaaaggtctggaggcttgactcagcatcatggctctcgattggatacgttacaaacgtggcgactacatggtcctgtatgcctccaagcttgccgcatgtgccggcatgcatcgatacacaccgcaggtccaactcaagaatgagtttctgcggatgatggggtgcaccaccggatacatcacgcccgccgaacaaggttgcaaggacatcgctagccttcctgaagttgagaagaagaaagtcatggaggtcatgcaatcatcctattcaaatgcaaccgaagtccaaacggcactgacatccattttaagtgacgcaacattgactccagcagcagcggatgcggttcgaagcactctctacacgcagcatggcaaggagcaggaagacagtgtgcggcgctccgtctccgccaaaataaaccgtcgcatcgagaccagtgatacattcaagatctccgccgaacccctcatgaccatccaagggatcgaagtctacgtgggtgggcgccacgacggcaccatcaactcgaaaatcgtggagatcaaaactcgccaacgacggtttctcgggaccccattgtacgagctggtgcagctgcacgcgtatatgcacatgcacaacacacgcaacggctgcatcgtcgaaagtttcaatggcttggaggagatccacgacatcgaattcgatgatgccctatgggggcgtgtccagtcggccatcgcggaattcgtcgatgacatcctgacctcctcccaacatcagccccttttcatttgattttgatgtaaatttatgcaccatgcagtccgacgaggcgttgcaccggtcgttgcatcctcgcttggatctgatatctctccaagctggggcgctggtcaagttcatgaatgaaggaacgcttcggagcacacatcatgggcaccaccatcgccgatgagatcgatgagactacttggagtcgttctgtgtcagtaggactcaatgcgctgcgcttcacaatgtagaggtgattgggtagcgctaatgtgccaatgttgtccgccatgtctgccgtggttgaaaacgagagcttgtactgaacagacttgtcggatacccggtagccaaagacatcgacgatcaatcggtttcgaatttcgttccagtcccatggccccgggctatccaagcgaagcaccctccgctgcttctcacagcggatccggtagtagaagttgcaggattgcatattttgttgcagaaatcctaaaccctaaatcctctcacagatggaaagaaagaggactagaagacaagtcctatgaacggataaaggacaccggataaacgccttatatgccaggagtactgcagtcgtaccaagagtattttagtattttttgcagctttttaaaggaaatatcactttaaaaaggatgtctccggtatggtggtgggtcatcgttgtctccacgatcttcgtcccggtcttaattttcctttgggttcgagcaaagggggatgccattgtgtcttcgatcatgacatcgacatggtccgttcacctcttcctggttagcatgctcttcatcgtgatcttgatcttgatctggttgaaatctctcaaatcagagttccttgcacggcgttcacgcatgtttcagcaagatggaacaaccattccgagccggagcacgtttccgttgcacgccatccatgcgtaccacctcatcatcgacatgtcaaaaagctcttctcttgacaacacatgtgcgtccatccatgtgttcctgaacaagggggacggcagagacttctacggtcggctgtcgagcatgaagaattcgctcatgcaagatcaacaggtgtacatcatcctgttgaactcggtgtcggttgtcaggtcaatctcacgatcatcggacggcgagtatgttgtcgtgggcattgatgatccagggcaggtgaccatgcctggcgtgagacccctcgcagggggctcatcggcatgtgcaatgttcgggggtcgcacgaatgtcgtcattgccggcgcaatgtcgtggtgttatgtggcatgatttggtcaatatagatgtggataaattcatacgtcaaaggtaagaacatgggccacttccaggcgttggtggtcagcagcaaagaccagtacgctcgcacgccggagaccttgctgcgcatactccacgagctctacggagtcccggtattcttcgacccgtgtcccgtgaaccccacaaaagatggactgctcatcccctggaaaccacacaactatgtaaatcctccgttcaatgacattctgagctgggccaccaaagccatccacgaagccgttgcgcgtcaggcacataccatcctcctcgttccattccgttccgcgacgcgctacacccacaatataatcttgccaaaagccaagtccatcaccatctggctcaaccgtgtgaagtttgtcccctacccgaaagcgttccctgggcccctcgtgacttacgaattcggagttgccagcgcactgaacgcccggaaacgtagcagcgatctgcgtctctttccggtttccgttcgcagttgggtgctgagccccaagcagtcttccaaaatcgacttttacacgactgtcctgttgccgcgactgcaaatggcgtttggacccctgaagtccgactcataccaatgctctctccaaaccctgactcgtgatattcccaggataccacacctgagcccccgaggccggcactttgtgtgcgtcacgcagggtccggacatcacgcttcgccacatcgcccaatactgcgacacgaacccagaatgtaccgtggtcgcaatgatcatccccctgaacttcccaacggcctacatgcgcgcggtggcgcattgcatccgtgatgtcatactgatctgccctcccctaacatttggagatgatggtcatgcatcgttctggggctccgtgctgctcatcatggggaaatccatcaaggatgaaacggggtctcctcgacgacgtggttacttggcatgctggagggacggcgctttcattggcgatgctccaaggcaatcctgaaatcgttgcttgctcaacatgtttattccttgtttcagagtttgctgaagtcggtcccctggtgatgtcctaccaacgcagctcaaaggttcttgatgtatgcgtgccagaatatcgccaccaccccagccgcagtggcaagcgatacggcctcgtacgggtgcaatacacacgccttgaaaaagcaatacaccaggaatggcaccattgcaaaaaacaggatgatgatgatcatggtcacgaggatgcgcatccagcccgggaacgcttcgaagatctgtttgatcgtggcatacttgaagttgatcatttcatgcggggcatacgtgaggattgcgcggtgactttgcaggaactgtcgctgttcgaccgtgtcagcctggaaaacaatcgggtccaccaattcaggagtgctgagagtggtgaggagcttgatctgctcatctgttacatggacgggaagcgttggcgggatgtatccgttcaggtttgcaatcgaggacatgtcgtcggtctgggttttcttctcatcgaggtgccatcgcaccgcctcgtcatcgagcttccgtatggtttcatcatccgcacgtttgatggcatcctcctcacgcctgagctgctcgtttccagcttgctgacgacgcagctcgtcctggtatttcttctcacgttctcgctgtgtgtcgtccatgtactttgttcgatcagcattcgcgatctggagttcgttgagagcctcacgttggggctgttcacctaagagtttaatccgttcggcctccgcgagttcaacttccgcaagtctaatccgttcggcctccgcaagtcgaatccgttcagcctctgcctgacaattttttttctgaaattcctgccacttcagatcctcagcctcctcaacgcactgattggcatgatacgctgtccactttttgttttgttcttctgcatacttggctctggcaggggcattttgttcgttctctagttgcatataatcctgaattccgttgttgaatattcttgccatagccttttgagcatccgaatactctatcggaaccccgtctgggtcctgttttgctttgacgctctgtctcaagcttgtagataattcctgtagtgactttgatgctgacttcacaccctgctttgcaagtcgtgaaagggacttgacaagggttctcatgatagtgacttaacgagaatgccaaataaaagatggtattcataacgtggtgtgaacgctgtcattcggtgcaaagttaaacaacatacagttggtgccaaattaaaatgggacactggaattagactggaaatgaccatcgctcttgaaacccgacaccgttccgtgattcactacaagtattacctcaagagcgttcgaaaagtgagtaagctgtacggcatctcgaaatcatccttgcaccgctggctgaagctcgccaatattgccgttaaaccaaaacgcaggaagacgtcagtggtgtccgccattcgcgggtgcatccaggaggtcctcatacgcaaccctttttgtacagtcgcggagctggcagccatggtctccaagagctgcaacctctccatttccccccgcagcatgaatcgacacgtcaaggcggcccgctttacctataaaaaagcctatcgccacgtgattccgttgcggtccgctgacacccttcggtcattctgctcagagtacttgtcaacccccgatgagcgcatcgtctgcgtggacgaggtcgggttctatctcgatgattacccgcgtcgggggtgggcacctcgtgggaaacgagtggctctctcgggggccccaaccttgcgacgctctcggatctcggtcatcgttgccatcggaaccaccggggtcctgcattacacgatactggaggggaattgccacaaacacgagttcattcagttcgtgcaagagctggcgcagcttgtccctcctgattcgacgcttcttctcgacaacatcagtttccaccattgtgcagaggtccgctcaatttgcgccaagcacaacctgcggctactgtttacacccccgtattccccaaaactcaactcaattgagctcttcttcggggtcttgaaggcacgctaccggcgagcgtgcattgctgaactcccccgccagcacgagaagcacacggctcgttccttcgaggacttgtacattgaactcttcgaaaccgtactggcaagcatgggtctcctcgacacgggcgctttcttgcgcaaaacgcgggtggaagtcgcggcgtcgtcggcgagcatcgagtcggggacgttctgcgggtacgatgcatgatacgaaagggacctaaggaactgactcgcggtgtattcagtgagatgcatgnttgaccattcccttgtacatcaagatgctccaagagatcgaggaggcgcgagcagcagcagcagccaccaatctcaccgcgggaaagacggtgcgaggacgcgtgttgcccggaacgaagctcttcacgctgctcccacagaaagcgggcttcacgatctcgcacattccgatctcgtccatgacgctgttggatctcctgaagcgcgcaagcctctcgagtcaccgcggagatgggcgcgacgaggatcatggggccctctggcgaaagcacttcgcggtgaaccgggtggaaacccggcggcgcctctttggaaaccgcatcgtcacggacgggtgcgcggtgtcggtgatgatgcaggagatggtgcccctcatcgcctcgtaccgtcagccgctatcggacgccgagctggcccgcgcgcgggccacgtccggtgggaccgtggtcggggttgatcccggggtcaccgacgtcgcaacggtcgcgaccctcgaaggcgagaccaggcggtacagctcggctcgatactacgagcggagcaagatcaacctcagcaaccaccgcacgcgcaagtggaacgccgaaaaacgggaacgcgtggagggccttccgagcgcaaggaccgcctcgatcgcggagtacgccgacttcgtgcagcggtacctggtcctcctgccggagctcctccagcatcgggccacgaagggctaccgcaacatgcggttccttcgatacgtccaccgtcaagagtcgatccacgagatctgtgaggtcatcgcgccgcgggagggaggcctggttgtggtgggcttcggggactggcggggcgtcgggaccacccccatccgccggcgctgttccggcccgctgcaggacatcaagaagcacctccagaagcaggcccatgtccggctcgtgatcatcgacgaatacctgacctcccggggctgccacgggtgtctgaaccggctgacgaacatgagagccgcgccccacacccacgggccggggaaagaaagggtgcagggggcgacgacccaggtacacaaggtactccactgccgaccaagcagtcaggcagctgctcgcagctgttgcggaaccacgtggaaccgggacgtcaacgcctccaaaaacatcctcttgctgacgatgcttcgcttgaaggggtaccaacgtcccccggaactgagcagaggtcaccagcaatgatgcaaccattctcgaagaggcccgatcgaacaagcggagcgggaggtgtcctgagttcaagatgccgccctgttgatgttcgatactgccgaaaagtaggtcaccttcgaagcgggtgacgggttatcccgagagccctctcccacccacggacactggtggggagaggaaatgcagtccgtcaatccaattgatccgaggtgtcccaaaataattggcaacggctgtagcaaggggaaaaaacctcgcatgccaaatatacacccccaaatgtcatgcttatggaattcggcaggaaaaatggtgtactctagaggcccttctgtagtggagccattcgaggacagtgtccaaccacgactgacatccgccaactcggaggaaaactatttatcgccaggcgagtcactgtacagctttaaccagaagtacatgttgacataccaggaggatggcaaccttgttgtgcatccagttgtgtgggcatcgaattcccctaatgaaaacccaggcaaggcaattctgcaaggtgatggtaactttgtgatggtggatgccactggtgctccttacacagcatcacattctggtgcgccatatcgaaagtcttgtcaccaaaaatgggacccaacgacccaaaaatatgagtacaccagtagtaaccttgacccctacactccaggtgtccaatgtaggtatgacgatgttcgggcaagtcgcattccgataacagtcgcaaattatccgggaaatgcgggccccccaccatacacgatggtcatgcaagatgatggtaacctgctcatatatgacggaagtaaattaccgatttggtcatcaggatgggatcaaaactgggctgggattggaacttccggatacatagataccggaggtgagtagatatatcacaacgtatcagtaaatggggatgcaattgtgcatatgggcagcgaatggaacattggcgtgtcccgagacatcacgagttgtggaaggttttggggaacctctcaatggaagagtaaccgacactcttgatagcgcgcatgacttcttattaccaggtgaggcattggtcagcaagaatgggaatttcatggccaccttcaaggcatctggcaacttagttgtgcagcgtagagtcccaatatgggatgctgggacatccagtaccaaacccttgaaagttgagatactcgctgatggcaatctggtggcttacaacacgtcaaacattgcatactggtcaagcaaatctgccggtagaggagcaggaccgtacaatgtcatcatggcggatgatgggtttgtgaaggtcattgatggtggcgggaaatggatttggacggctagtaaaccagtttgtcctccttaaatcatttgaaaccctggattgcgctttcattggcgatgcactcctgaaatgaagatctgcgtatttttatccagaaaacaggcctctctcattattagtttgcaacgacgacatgaccgccgatagctacttcatctccatacctggtaaaacctccagggtcatccgttcgcatgcaccgatcgcacatgtccaaaccgtgtactcctccatccataaaaagaacgtatcggtgtgcaataacgtgatacccagatgcatgctaagaaatgccgccatgcaaccttgtgtgtggtatcagtgctgttatcaatatatcgcgtcaaatacccttgttcaaataccatgtttgtttgtagcgtcaacacatgatgtgatacgtgggcttaccaagcgaacgaaaaccaacctcataatattacaccaacgataccgaaacctcgtacgagcaatcaacgtcaataacgagaacgtagcgggaaaacatgaggttccatcaggagatccatgtagacttgaagatccatgtagacttgaagatccatctagacgtgaagaacctttgggtgaagatccaccaggagcgaaacttgaagatcatttgggtaactatcctttagaagcaaaacttgaagatccaggcgatgctccattgggcgaagattcattgggtcacgatatattagcagctaaacttgaagaggatacgctgatcaacgctgatacgctgatcaacgctgatacgctgatcaaccgcttggtaaaaaaaggtgtatttcgtttggaaaccggcccatctgcagttttttacgatcggtgggcggacgaagaaccgcgcgtgacgatgcgatcagagatcgcaagagcgtggcaaggagtggaggaatgcgtggtggttttttattatatgggtgaccgacatgacatcactgtgctggataaagaatttacggacatcgtgctggatttgccatgcattgggatgcacgatgatgaggtcagggtcactgggattgcgatggcgccccgagcatcgttccatgaccttgacaacttggcgaactacatgcaggcaatgcggcacattcgagccagtatccctgtgtcagcatcttttagcgacaagcacagctcgaagctttggagtatcatggagtttttgtattccaattatgagttttcaggagcaacaatgcaaaaacagatcatgcctttattcggacaggccgtagctgaatccaaggtagacttgatgatgatgggatccataaggagatctttcattacagcccctactggaactcccactagaactcccacttttcctgcggtgacattggagacatcaaagctttatgaggtgcgagatggtgtgagcctcgaagacctgtatcgtcactacacgcaatgtaacatctcgaagtattacttcacgatgaacatcatggtcgatcatgagatgttccttacatgcatggagtacctgtgcatcccatctctacacggtcgattcatgctcaaagccaaggatgttgtcaacttcaaatgggaatgctcagaaaaggtggaatgcaaaaaaggtggagcgcacaccgggtgtcgctctgaaccacccatccctctggcgatcactggcccgtcctacctgaactcaaacttggagaagcaggtattgagcgcttgaccattgacagattgaccgcttggtcattgagtagtacacatcacgtcacacaggaattggctgagtgagtaccaacaacgtaaatcgtatacctatatccacgataaacatgtcactgtacgaagtatagtacaacatggtcatcaaatcgaaactaaaactaaaactaaaatcgaaatcgaaatcgaaatcgaaactaaaatcaaaagcgaaagcgaaatcaaaacgaggaaaaaagacagctgtcacatctcggaagtcaaagatggtgctttgtcagcgcgtgcgccgtacacccgcgctcatccggtcgcgacgtcctgtgcaaagaccgtcgggggcaaaaaagaagacccatgctgttagatctcgtctcgtgcttcgtacgcgcgtggtccgggcacccatgcgcaacagggcgcgacgtcctactgtgcaacgacagtcaggtggggaaaagaagtcgattcgtgagcgattgtcgcctactatcaaggccataaagggtttcttcaccaggacaccacgcccctcaacagtcgcaatgacaaacaaattgacacagctcccccccacacagtcatcttctactacatcttctactacatcttctactacatcttctatcatatctccaaatccaggacttaactcacttactcaacatggtacttacgagactggctctcagggttcctttaccaggaacacacgtgatggaaccacaaaacgcccctcaacatttgtcacgacacggctgccaaccatacaggcatcatctattgtatcttctactacacctactacactttctaccatatctccaaatccagggcttcactcacttactcaacatgctactaaggatgctggctcgcagggtttatttactaggaacgatgtaaccacaaatttgggcacgacaaacaactggacacggttgccaatgaatgatgcgccccccatagggcgaaacaaaggacaaacagatgaatggtctgtcgggtctgtcacgtctgtcgaagtggtacagaatcccgtaatgggacaactatgggaggaaagtggtgatcaggtgctggaagaagtcaacaatatcattatcaagcgtaacatggatttgaaaatggatgcaagcaaatgcgaaattctgtgtatagacttggcaaaattgagtcttgatgtgcagacagcgtacaagaacttgcgcgaaagtaaaggtaccaccttgaaaccacgcgataaggtccccatcccaagggacctgtcgatatattgcttcttcaacacggactgtcacattgaacctacaagagttggcacctacaggagttttgctgagctggtgctggttcaggtcatgctgtgctcaacgtgctcgacagtggaagatctcttcatcaaaaaatatgtgtatattaaactgcacgaatctgaggggtttgacaagatgctcgcgcgacttaagagcgttccgtatcatagtgatcgtacgtacatcagggcagtgatcgacaacagaaacaaagaaaaccccatcgaatctttcgatatgaagatccgtgattttaaacccagtccattgcctaagctttataaggagacttttgaagttgtgaagtctagattcgaagcttatttgaacaactccgacggcacgatacaaaataggagtagcatagatgaaaatatccgtcagaacatggagggcgtcttacaaattgtccaaacatttcctttcaaacagatcctttatttcgctgtcacgattggaatcatcaacgatgaatcggacgcgggcaagaaagtgggcaagaataccaacagcagcaacgaagactcgaaagtatacaagcatgccaacatcatcaggtttaaaaaagtaaatgacaacaagatcgatgtctatgcttttgatccccatggtggacgtcaagatcttatgagccattaccttgagctgttctccttgtacgcatctcacagatccgaactaaaaatcaacgttatacccttgacttgtcctaaaatgcagaacgaattgcccttctgcacagcatacacgtattactggacaatcctccaactctttcttcccccaaaaaaattatataaccgagctggctcgtgttctacgggacaaaatgattcagagacaaaggattacacgattctgaatgttgtgcagaatggatcacatcgggagctcgtagatcacatgtgtttgtttgacattgtgtcgctgattttcatcatggcatacggggtggtgacggtgcaggagagcaacgagaacccaaataccgatcagccaaaaactcgtacgggtacatggttatgaggcgcgatgtgcgaggacaactcaaacttgaagctcaacgtcggtcatcagatgttggcccgacaatatttccagcgacaactgccaaaacgacagatgcgaccgccgatgcgactgtttctcctgcgaccagccaggcggttgtcgaatcccgtttacgccatcgatccaccgggaagaagacccgttgcttcacatcgatgtccatctcacttccctttcttcaatagtatatagaaagatactcataatactttatgtattgcaagcttgcaaaaaagcttgacaaaacgagactcctggaattgtactatacattgacgggatctacgcccattgcacagaccggacgatgatggggatcagcgtccggcggaccatggccaggcgtcgagcgcggcatcgctgtttgtaagcaagccacgcccacttgatggtgtctgcagccttatccttcgtctttagatcgaatgttacgcacttcagcagcctgaagcagtccacagcgaccggaaatatcatgtcatttgttttgtcatagatatagtatgagttgtcatcctgggcgatgacgaccaacaatctgccaacgtcgtcatcgtagccccagaagccgtcgcaatcgaagattaatgagcatgttgactctttgatacctgctgattgtttgaacttcgcatacttctcataacaccacattggcaggtgacaccctgtcgcgcaatcccctaggaccttgtagtcactgccccaatcactatgtttagtgttgaggtgcttgaccacttccgcatactcgtcatgagacatgatagatgatagatgatagatgaatgtccaggtgacggcgtgaaaccctcaatcgtggaaatcgtgtatgcctgtacgtaaatcagataagagcattcaattttatgtcaatttgacatttaagtagggtttagggcttgcatcggtcggctatcttgtttggatttgcatgaaagtggtgaaagggggcccattacacagtgaaaaaggaccagtccacgcaacatttctcattcgttcttctgtctgtcagtcaccgcgtcacgttcacctaattgattccaggtgcagattagtagtagatggagcattcatcaaagctattgcggctcattgccaaggcgctgtggatgccacctgacgctgtggaacatgctttggcaacactgggcatcatggtcatggtgccgtcgaacgccaagcgcgtccctgtccacggatggcaccgcgagctgcgacacggcgaccacatcattgtgcgttcggcgggcagttccaccatgccatttacatcgggccgtacgtcccacccggccaggacgaggaaaaggactacgtggtggacatgttgggtgacggccagctgagtctgcggctaaggacaatgtcgaagttcctcgatacgttcgtcgatacacggggtcgatatgagcttgcggtgctggagtacagcaaagacacgcaagcagctcgggatttcactgcgcgcctggcgctgctggcccaagcgcgactcgatgacgtcgaggacctctacaaccttctgggctgcaactgtgaccactttgcatcctggtgccgcactctgaggtttgattctgaattgcttgccgccgccatcacaagcatgcctcctcttcctcgctctcccgaacgtacatggaaatagtaatagatcacgtggacgtgggtttatgagaatgcaacgaaaatgtatcactgatgtccattgatttgtcgaggagcatcctgcaagcgagcccgttgttaggcaccactttcttgccaccctcctttgattcagcccagcaactagatgggatcttcatgccgttgtatggatcgaacggcaatgcctcgacatccgcattcaatgctgcttcagtttttaccttgacactctccatgaacgagtaaaatttttcatacgagaagcgacggtgatgatcatgcgattcagggtcgagagtcgcgacatctgcaaatttgtcttgcgattggctatgagcaagctgcatcgtacgccacacaacttgagtgtcggtgtccccaaacgtgatgcacggaacatggagcgtcgaggtgtagacatcccatttcgtgttgcccgcgttttgcaggttgtccaccagcaggatttgtaatcctttctgggtacccacgaggtttcgctcgtacatggagccgttcactttgttgtgacccatcaccacatgtgtgatcccggcggatgccagccggtcattgacctccttgtaatagccgtcatacgtcagtggcgccaccctacacgatctgccggcttgaaaacccgcgaccatacagttggtgccaaattaaaatgggacactggaattagactgggaatgaccatcgctcttgaaacccgacaccgttccgtgattcactacaagtattacctcaagagcgttcgaaaagtgagtaagctgtacggcatctcgaaatcatccttgcaccgctggctgaagctcgccaatattgccgtcaaaccaaaacgcaggaagacgtcagtggtgtccgccattcgcgggtgcatccaggaggtcctcatacgcaaccctttttgtacagtcgcggagctggcagccaatggtctccaagagctgcaacctctccatttccccccgcagcatgaatcgacacgtcaaggcggcccgctttacctataaaaaagcctatcgccacgtgattccgttgcggtccgctgacacccttcggtcattctgctcagagtacttgtcaacccccgatgagcgcatcgtctgcgtggacgaggtcgggttctatctcgatgattacccgcgtcgggggtgggcacctcgtgggaaacgagtggctctctcgggggccccaaccttgcgacgctctcggatctcggtcatcgttgccatcggaaccaccggggtcctgcattacacgatactggaggggaattgccacaaacacgagttcattcagttcgtgcaagagctggcgcagcttgtccctcctgattcgacgcttcttctcgacaacatcagtttccaccattgtgcagaggtccgctcaatttgcgccaagcacaacctgcggctactgtttacacccccgtattccccaaaactcaactcaattgagctcttcttcggggtcctgaaggcacgctaccggcgagcgtgcattgctgtactcccctgccagcacgagaagcatacagctcgttcttttgaggacttgtacatcgaactcttcgaatccgtactggcgagcatgggtctccttgacactggcgcttttttgcgcaaaacgcgggcggaagtcgcggcatcgtcggcgagcatcgagttggggacgttttgcgggtacgattcatgacacgaaaaccggcctaaggaaatgacttgtggtgtattcaaggagatgcgggcgggggccaccggcgccaaagaggccgagcaggaggccttggaggagctggagttcgaactgctggcggcggccgccagcaccacgacggttgcggacgatgccacaatcaccgccgtgaagatgaaactgaacagcttctgcaaggacagcccccggcttcgctctcagatccaggcattggtcctgagcatgaaccgcctcctcggcgaggcgtacgcgttcgctacgttccacatcctccacttgcacgactgcggcatgtaccccgccatcgaccgcaacttcttctaccgctgcctcgtcgccgtcagcgccaataacagtcgcccggccacgcttggtcccgaactcgtcaattctcgcgatgtatatcacgcgcttcgccccctgcaaggctccggcagccagccggtcaacacagtcgggtacgctcaggtcctggcggacctctccatcgtcatggcaacgatggccgggaaccacctctgggaaaacctggagaagcgtatcttcaactacttgaaaatgaagtaccccggccagctgatgggggaccccctgcgcaagaaggtcgtcgaagcattggtacgaaaacccctggtgtgcacggcggacctcttccagctctctccgtcggttcccccggactcagcggcggccgagcggctcaggcacgctcgggccgttgcagacgagttgcgcgtcctcctgccgctccccagcggggaccactaccagacccgggcgcacttgaccattcccttgtacatcaagatgctccaagagatcgaggaggcgcgagcagcagcagcagcagcagcagcagccgccaccaatctcaccgcgggaaagacggtgcgaggacgcgtgtngatgatgcaggagatggtgcccctcatcgcctcgtaccgtcagccgctatcggacgccgagctggcccgcgcgcgagccacgtccggtgggaccgtggtcggggttgatcccggggtcaccgacgtcgcaacggtcgcgaccctcgaaggcgagaccaggcggtacagctcggctcgatactacgagcggagcaagatcaacctcagcaaccaccgcacgcgcaagtggaacgccgaaacgcgggaacgcgtggagggccttccg

SEQ ID NO: 42 - DNA, 22016 bp, unidentified
  misc_feature 1..22016: note = Fanzor polypeptide
  source 1..22016: mol_type = other DNA
gataatctcgaggacttcccagaccttgcggacgtgcagggcagcatgcaacgcaccatggcacgaggctgttgtccaggcagcgtggaggtctacctgcagagcggctcgctaagggatcgccaggacttgcggtaagagtctaggatcgagctaggatcgtaatgaatcgcataattttgccctctatcgtggacagggatgtgctgtttcgcgaaattggcaagattccacgtgagcggcggccgagcaacatcactatgagtggctcgctgctcagtcgcaacatcattgatgcgcttcccaacctcaccggactcacgctcaacttacagcggggagacgcagtgcacgaggacctgcagcactgcatgcgtgcgttgtcaaggctgacacggctggaactcagttacgatggaagaagaacagggtgtcctgatacaggatcagttaatggaggatcagggtatacgattaccacgtcatgccttgcggccatgacccggctacaggacctaaccctggagaatcttgagcttggggcctaaaccctaaaatctagggccctgacgggcctgagggagctagacgtattttgtgaaggattcgatgacgaggtggataatgagtacggcaacgatgacgatgacgaggtggataacgagtacgggaaggagttgagacctctggccccatcaaacatgctgaccgacctagtatcgctgcggcgcctgaagctgagcacgctgacgatgaaggaggatgatctatgcaagctgactagcctgacaagccttcacctgttgggcatcatctctgggcgcgatgatcaacagccatggcgactaccaccgctgttgaaggacgtgacgctggggacaaccgtttaccggaacatcggaaaatgaggataaatataagctgtaaaatatctaatcatgatgtatgaacatgaacatgaacatcatcattctcgacacgggtgacaactacatcctggcgacccggacctacgcgtacgatgttgcattgtcattgtacgcgatgatgtccatcaccatcaacacgatcacaacggacatccaagtgcaacaggaggaggcagactttttggtgaccaacttgggccgcatattttcttacggattcaacgacaccgatgccatcacgcgtcttgacatccctgctaaacttgttaaagatgtgaggagcatgcttgagttctacaggatcaaaaagttctgggcggggatcgtgctcaaatcccgcgcaactgtcgttgatgatgagaaatcggacaccgcaaaaatgctcaatgaaattaaaaaattagataacaagatttgcgacctgaaatggcagcaggatgccttcaacacgcacattcagacacctcgcgagatggaccctcccaaacgcacgttcctcctcttcaataccgtttacgagttggccctggtggccagcatcccgcaaattgaagaggtgacctcgtccttccccgagtttgtcatgatccatgatctggataagttagatgaggccattctgacaaagctgcgatcgcatttcaacatgatctccttcacaggcgtaccagatgttcgtaagaaattggaggccttcaaagagctgtacaacattgagaaaaccgaacattccgagaaaatgatggtccgagcatgcatggatacgcacttcatcatctccagtgatcaggacaagcgcatcaaggcgaacgacgtgtacaatgaactcatcaatcacctgcgcatcccgatgcatgatgtttcgatcttcaagaagcggctggcgggctacctgaacgaattccacctgcagaagaagcgcttcagcgatgcctactattaccacggcattgtaaaaaaagaggttgacatcgcagcaatcgagcagcagcgagatgccctgcgaaatgactggtacaatggcaaagacatcattcgaacgttcgaggaggtacacggacttgtcaaatgacttcaaatgaattcaaatgaaatgatttattttgccgtctaatgctatctaatgctacctgatgctgggtgtggtcgtctccatcagcagcaacgaaggacagttccttcaaccacagcttcaagagctgttaaaatgcgcggatcatgtcgtgttcagcgttgggtcgcatctgtacgacacgcgcccagaggatgccatcggtattcgaatgaagttgcaagctctgctccaagatgtgcatctaccaaaggtacaactggtgcaatacgatgttcacgaggatgtcaggaccgacccacggaagtatcacaacctcgctcgggcggcaggttgcgcagcgctgcctgatggcatccagtgggttctgctgctcgatgcagatgagatccccgagggccttcgattcaggagctggtacatggacagcatcaaattcttaaagcctacgctagcgtacaagctatcttgcttttggtattttctgaaacccacctggcgggccaatgtcattgaagacagcatcgtccttgtgcacaagagccggctgagcaaggatgccctgacggatgccagcgagcgtgatgggatcgtgcggcattgtccaggaggctgcatgcggtcgttggtgcaccgtgatggggaaccgatgttccatcacttctcgtgggttcgaagcaaggctcaaatccttcacaaagttcaaacttgggggcaccgcgacgatcgtgactggacagcgctggtcgaggagatgtggagtcacgcacatccaccgccccgggattttgtgcatgggtacgagtacgtgctcgtggagaacacgtttgacattgagtaaaaattgaatccaacccatgaattcgtcatcaatgctcgatcggaccatcatgtacgccttcaacgcacagaggagaccggtaacccgcgacattcaagcggtgctgcggtgctttggaagttgcatcgaagatgccacggagttgatgctcgcggtggctcagggtgacatcctcactgtccagctcatccttgacacgatgtcgcaatgcaaaacatgctctagttcgacgatcaacatgaccacctcgaaaggctttacagcgctgcggatcgcaatcatattgggtgaaactcaaatcgctcggttgctcatcttgggcggcaacaaatgctgctgctgcaagtttaccaattctacaggcactcaaacggacaagtctctgacaagtacgaagatcatgcctcctccccaggccactatgcgctcatacaaagatgatgatgtatttacactgccatgcccccccgcatctagcagacccttgaaacacccttgaaagcctttgcagagctttgatttttatgtggtctaaatttatatcgttttgagtagaaatgctgaatagtgtacttggagagaccctcgggagttttttcttcgtgtctgtcgtgttggcaaccaccaccaaaggaaacatcgagaccttggcaccctttctgatcggtttggcgctgtcgatgtccatctatttctgttcaaaggcctgcctcggtgcgctgaacccaatcgtggcgttggtcttgtttttgagaggcgatatacgcttgcagacgatgttctggtacattcttgcggaatgcataggggcactcctggcattcgcttggtggaaagcaactctgggcatagccacatctaacagttacacgacaccggtatgataggaatcaatcaaagaaaaggatgggttcagaaactgctctcggttcacaaacgtactctgcacatttgcgtgccagggtcatcatgtcctcgtctacgaggcggatgctgtggaacgatgcgaggcgcacgctgtccagatgcatgccctcgagccacatgtgtccacttgtaccggcgacgggtaggagcactgcactttcatcgacgttgtagtatgtgaaccttagctgctcatgggtgcccactttcgtcagcgcccggagcgcatcgtgcaggagggatgcggtggcggcgaggagttcatgtgtttccggattcgtgtgaaccgggtagatctcgaatacgaccttcacgtccatggaacggagccctggcggcatccgccacaacgcgaagtcctggaaggggatcgtgttccacaaggtgattttttgcaactttggaggcagcatccagggtgatgaacggcatggtggtcggatgtcgtccaggttgaggcgggtcaggtgggtcagtttcgcgagggcatccatgtcaattgaatcctttgtcagggtcaagtgccgcagcgacgagaggtggctcagccaggaggatgtcgtcacatcggtgccgcggtcaatgtcgatgtcgaggtccaggtgcgtcaggcgggtcaggccgccgatcgcgcggtagagctgcgatgtcaggtcgggggtccagtactcggagccgcttcccagggtgagcgtgtcgagttgcgtgaggtggcccaggtgctccgttccaaaacccggctccacgttccagagctgtaggttgcgtagccggtcgatgcccgcgatggaatcaagaaacgtcgcggtgaaggtcgacaccgactccaggtcataccagagggggggtacgtgggcgcgttggaataccagggaattccttggactgccggtgtcgaaggtcaggatgagcttggtcagatctgatgccgtgttgaagtggctcatgtctcgagcattagcgacatcatcgaggctccgtgaaacgatcaaggtgaggacgtcgaggttcgggagcgtgtcgatgatggtcgtgtccagcatggagccgttcaggaccaggtggaacggtcgatgctcttgcgggatcttccggatttcgtgatacaccgcatcccgcaaggcacggcgctcctccagcgatccgcgccgcaggtccaccttcaacagggccggtcggcagccgttgttcaaggcgcgctgcatgcttgcccttcagggcgttctttggatcttgggcatgatcttgttcttgatcttgagaaactcgttcgtgatcttggatgatgaggcgcctcatgtgctgatcgtagaccttgcacacgactgagtttatcgaccgtgcggatcgcctcgttgctgaatcaaggaaggaaagcacatgtgcaaggagctcctgcgattcgaacgggctcatcgtttttttagttgggctagggtttagggtttacagctggtcctgcattgcgtctaccatctacacatttatgtgcagacatctccatcatttgaaggacatttttcgacacttctcatactccttcttggttcgattacaaatagcaggcctggaccggcgtccataaataaacccacaaagtagcctctcacaatcatcgggcccagaaagctgccgtatatatagtacgaaaaggtaccatgaaaaagtattcggaaaaaattgattgttgtgacaagataaagcttcagctcatccagacctacatttacaaccggaccagaccatcaagcatggacgcaaccaagcaggttatcaagctgatgacatcggattcacagatgtttgaggtggacgaggaggtggcgttcctttcccagaccgtgaggaacctggtggaggatgctggcagcgatggcgtcattccactcccaaatgtctccgggaagattttggcatccgtgattgaatactgcaagtaccacgctcaagccgagaagaagggcgaggatggccagcctatccctaagaacgaggccgatgtgaagctgtgggacgacgagtttgccaaagtggaccaggagacgctgtttggcatcatcctggccgccaactacatgaacatcaaggggttgttggacctgacttgcaagacggtggcaaacatgatcaagggaaaggatgtcgaggagatccgcaagatcttcaacatcaagaatgacttcacacccgaggaggaggaggaagtccgtcgcgagaaccagtgggcattcgaatgaattatttctttgaaatcatgtaacaaaccacataaggccttcttgagttgaatactataacgaaatatgggtatctacacagatcatggtgtggaatacatgctggagcatgatggtaagcgccataccatcgctcacacaaaggacacagatgatcgcctggttgcaagtcattactataaagtaagggaggacacttggcttgattggaggggggatcacattacagccatcactgatgatgttgatatcgccttgaataacgtagaaaaaagtcggctcaacattttactaatggactaccccaccgcaaaccacggatggtatgatgttgtactgaccagttgcacgcattgaaactcttcacagacacgacaagacttctgtgagggcccgaaaataagataataggagacaatacgcttcgacagagaatcgaactctggttgatcggttaacagccgatttttctaccattgaaataccgaagcagtttttgttttaccccttctccccccaatctatgtggacaaaaaaaactccggatccaaacgcgatctcctgaatcaagcagataccacgcaactgtctgggtacggatagaagatcgcaccccacgcccgctccatgtagtggccggcttccggattagaatggctgtccacgtactggattaactgttgatagtaagccagcggatgctgcacgatgtgctcccgcgcaactgcgaagatcgcttggtagcaaataatgtttatagggggcaggttggggaaattcgtgtcgtaccagaccccgaacggacgaagcgggcacggcagcaatttgctctcaccattcgttgctttgtttttgtcgttcgtcgcgacccacttgtcaagctgaaacccgtactgttccccccggacggatttagtgaggtgaccttggaggacggtgttcctcgtcgagagcgctcgtttcaggaggttgtacgtgttcatgattttgtgcgggtccatgcatgagcctggaaggaacacagtcacatctgccaaattgtcgtaattgttcacgatgtggtagaggtacgtgtggtcgcacctgcccacatttggcacgttctcgaccgtgcaatggcttcgattgtaggtgatgtttttaggacctttgttataacatgttatgctgagaccagaccatggtccaaaatcaaaccactcaacgttctcggcatagcgtgccaccacgatctcgacactccgctgtgacaacaagacacgatcgatgtccgattggtgcacgtgataggcatacgtggtcgccagtagaaggacggtgaccgcgatgaccacgtatgctaacgtggtggacaacagcgggacggtggtcattttgtattcagtttattgattgagctcaaaaaaacgtgatgtcgtgtctagactacgaagtcctagagactagacttgatgcaatcaaatgtcgcggagtccatctcgatgagcgcccgctccgcaccacgtattttgatgatcgggggtagtagagaggaggtagagagtagagatgcgcagaggctttggagagcgcctgagctgttccacccatggtccgcgagatgcttgaacggcccatcctcagccttgaggaggcagatgctgttgaaggtatccggatcgatcctatgctgaagcacaaactgcgcggccacatggatcgccaggtaggtggggctatcaatacgttgaaggtccgtgaattgaacatcttcgacccagcgaacatactcagcgacggtgtcgaagttgtccatggccatgaatgcctcacaccattgatgaacaaagacattgtttgcagtgcacgcaaagaaccaactctcgatgacaggatacctcatgttggtcgtgaatccgtcgaggtaatagcccaagaacgtgcactttgacaaccgcatatgatccagcagccagtccaagctttgcgtcatgaagatggaagcgtccgaccacacacctccgtactttgccaggatgttcaagcggatgtaatcggacacgcgctgttggctgtcagtatgcctgaatgcatcgacatcgacgaatttgttgaggttttccttgtgcaagaaattaatcgtccagtccgggttgtatcgtttccacgtctccaaggcaaagtacacaacgcgaggcacctcaaggctgttgtcccaatacgtccaaaggatccgggggatgacagcatacacaggatccttcggaggaaggacgacgaacccttcttcagtcgaacatcgacaacggggcagcagcaacaggactgtcacgatcaacagtgtgatcacgaggatgatgccgcaaacaatgtagtaaatctggacatttgacatttgacatttgacagttgacatttacagcttgtctagaatattgatttgtatctaagggtactccataatgatcacttcacatatcaaatgttccctgtgccgccgacctatgatgtggtggtatacctcgcgcaagtgcactcaggatactacccctccaagtatatgtgtcacctatgcatcgatagacctaatccacaacatacgcttgcgcgcggaaggtacaccgggctaggacgtacagcagaggatgcgatcgcagactggcagcagcgcacgagagagtggctagaggagaacccggactgcaccacctggccagaaccggttcctctgagtcccgagggcgacgcccaaattttgaaacggttcacatggcatccccatccgcaatcaagaaacagtttggtttgatctgatatcaccctcagggtccttttgcaatttgcaaaggcccactttcatacaaatccaaacttggataactttatgaatgcctaaatcctatctaaatgatgaccttacataaaaagttgaacgttattttctgatattctctgacatacagttggtgccaaattaaaatgggacactggaattagactggaaatgaccatcgctcttgaaacccgacaccgttccgtgattcactacaagtattacctcaagagcgttcgaaaagtgagtaagctgtacggcatctcgaaatcatccttgcaccgctggctgaagctcgccaatattgccgttaaaccaaaacgcaggaagacgtcagtggtgtccgccattcgcgggtgcatccaggaggtcctcatacgcaaccctttttgtacagtcgcggagctggcagccaatggtctccaagagctgcaacctctccatttccccccgcagcatgaatcgacacgtcaaggcggcccgctttacctataaaaaagcctatcgccacgtgattccgttgcggtccgctgacacccttcggtcattctgctcagagtacttgtcaacccccgatgagcgcatcgtctgcgtggacgaggtcgggttctatctcgatgattacccgcgtcgggggtgggcacctcgtgggaaacgagtggctctctcgggggccccaaccttgcgacgctctcggatctcggtcatcgttgccatcggaaccaccggggtcctgcattacacgatactggaggggaattgccacaaacacgagttcattcagttcgtgcaagagctggcgcagcttgtccctcctgattcgacgcttcttctcgacaacatcagtttccaccattgtgcagaggtccgctcaatttgcgccaagcacaacctgcggctactgtttacacccccgtattccccaaaactcaactcaattgagctcttcttcggggtcctgaaggcacgctaccggcgagcgtgcattgctgtactcccctgccagcacgagaagcatacagctcgttcttttgaggacttgtacatcgaactcttcgaatccgtactggcgagcatgggtctccttgacactggcgcttttttgcgcaaaacgcgggcggaagtcgcggcatcgtcggcgagcatcgagttggggacgttttgcgggtacgattcatgacacgaaaaccggcctaaggaaatgacttgtggtgtattcaaggagatgcgggcgggggccaccggcgccaaagaggccgagcaggaggccttggaggagctggagttcgaactgctggcggcggccgccagcaccacgacggttgcggacgatgccacaatcaccgccgtgaagatgaaactgaacagcttctgcaaggacagcccccggcttcgctctcagatccaggcattggtcctgagcatgaaccgcctcctcggcgaggcgtacgcgttcgctacgttccacatcctccacttgcacgactgcggcatgtaccccgccatcgaccgcaacttcttctaccgctgcctcgtcgccgtcagcgccaataacagtcgcccggccacgcttggtcccgaactcgtcaattctcgcgatgtatatcacgcgcttcgccccctgcaaggccccggcagccagccggtcaacacagtcgggtacgctcaggtcctggcggacctctccatcgtcatggcaacgatggccgggaaccacctctgggaaaacctggagaagcgtatcttcaactacttgaaaatgaagtaccccggccagctgatgggggaccccctgcgcaagaaggtcgtcgaagcattggtacgaaaacccctggtgtgcacggcggacctcttccagctctctccgtcggttcccccggactcagcggcggccgagcggctcaggcacgctcgggccgttgcagacgagttgcgcgtcctcctgccgctccccagcggggaccactaccagacccgggcgcacttgatcattcccttgtacatcaagatgctccaagagatcgaggaggcgcgagcagcagcagcagccaccaatctcaccgcgggaaagacggtgcgaggacgcgtgttgcccggaacgaagctcttcacgctgctcccacagaaagcgggcttcacgatctcgcacattccgatctcgtccatgacgctgttggatctcctgaagcgcgcaagcctctcgagtcaccgcggagatgggcgcgacgaggatcatggggccctctggcgaaagcacttcgcggtgaaccgggtggaaacccggcggcgcctctttggaaaccgcatcgtcacggacgggtgcgcggtgtcggtgatgatgcaggagatggtgcccctcatcgcctcgtaccgtcagccgctatcggacgccgagctggcccgcgcgcgagccacgtccggtgggaccgtggtcggggttgatcccggggtcaccgacgtcgcaacggtcgcgaccctcgaaggcgagaccaggcggtacagctcggctcgatactacgagcggagcaagatcaacctcagcaaccaccgcacgcgcaagtggaacgccgaaacgcgggaacgcgtggagggccttccgagcgcaaggaccgcctcggtcgcggagtacgccgactttgtgcagcggtacctggtcgtcctgccggagctcctccagcatcgggccgcgaagggctaccgcaacatgcggttccttcgatacgtccaccgccaagagtcgatccacgagatctgtgaggtcatcgcgccgcgggagggaggcctggttgtggtgggcttcggggactggcggggcgtcgggaccacccccatccgccggcgctgttccggcccgctgcaggacatcaagaagcacctccagaagcaggcccatgtccggctcgtgatcatcgacgaatacctgacctcccggggctgccacgggtgtctgaaccggctgacgaacatgagagccgcgccccacacccacgggccggggaaagaaagggtgcagggggcgacgacccaggtacacaaggtactccactgccgaccaagcagtcaggcagctgctcgcagctgttgcggaaccacgtggaaccgggacgtcaacgcctccaaaaacatcctcttgctgacgatgcttcgcttgaaggggtaccaacgtcccccggaactgagcagaggtcaccagcaatgatgcaaccattctcgaagaggcccgatcgaacaagcggagcgggaggtgtcctgagttcaagatgccgccctgttgatgttcgatactgccgaaaagtaggtcaccttcgaagcgggtgacgggttatcccgagagccctctcccacccacggacactggtggggagaggaaatgcagtccgtcaagccaattgatccgaggtgtcccaaaataattggcaacggctgtatgtcacaggcacacgcgatcattccatcgccgtcacctgcacattcatctatcatgtctcatgatgagtatgccgacgtggtaaagcacctcaacactgcacctaaacatgcctataactgggattacaaggtcttgggggattgcgcgacagggtgtcacctgccaatgtggtgttacgagaagtatgcgaagtccaaacaaccagcatatatcaaagagtcaacctgccaatttgtcttcgattgcttaagctttcacatgggctgtgactatgaagacgccgtaagcttgttggtcgtcatcgcccaggatgacaactcttaccatatctataacaaaacatctgacttgctatttccggtcgctaaggactgtttcaggctgcggaagtgcgtaacttttgatcgaaagatgaaggataaggctgcagacaccatcaagcgggcgtggcttgcttacaagcggcggtgccgcgctcgacgcctggccatggtccgcctgacgctgatccccatcatcgtccggtctgtgcaatgggcgtagataccattgcaatttttttcgcagtacaattccagggtagagctttacttcttgatcacctgcaggatgagcctcttgaagcaactggaatcttgcccacgttcctcctgtctcgtggccaacatctggcaatgcccgatcaactgcacccagctacgagaggcgactctgattggcattcatggtactgggtactcgtgggcattccccgatcattttgtttcaaaaactttattcgaagtaatttaacatttacaagttacgcgcgcaggacacacctgcatactgggcaagtcggtcgctcctgggcggcctggcagttctggatccatgtgagcacgcatcctgtgcagatcgcgtgtgcgcagccctttacgtaataggtgctgttgaacgccatttcatcgtagcaaatgggacacgacttgtggtcctcatcaagttgagcaaatcggactttcttgaagatgcattcgacgatgccgtggacctccgtttccatgtttgcatccataattgccttttttggggcaaacactcctgctatatccgcatcttgcgccccggcagcgtatattgcgtacatgagatcggtcgggttcaggttcaggtaacgggttcgaactaatgcagtgatccggatgccatcggcgacatcaggtgtcaggagcttctcaaggttgtcaacgcgtccgtgactggccgcaaagtagattgcgttctctttgacgtgatcaggaaggcgcttgtaccccatgagcaagtcaaacgtcatctgagtgtgtcgtgactggttgtcgttggatatggccaccacagcgtccaggaccaactgcaaatcacgcgaatggatgggtttatccgctttgagaagtgcgaccacgaagtccgtcaagccatgattgaacgcgtagacgaaggccgtggagtgtttcggcatctggtcggggtggcagaggaggaggatcgcctttacgatctccagctttccttcgatggtcgcgcgaagcagagcgaaggacacgtcgaagaggggtccataacgcatgatatccatgaccttagccaggttatcttcctcaatcgctttgcacagtgtgctttccctgttatcatcaacatcgtcatcttcatcacgcttcctcttcttggagacatggtctgccatcatcaagtctgagtcgctcatctaattgaatatatatagtgttcactcgacagcgtaattcaatttttattctctctatatgcatgctctctgacccggtacattcttataccatccaccacctttgatgagcgttgtacgtgaggatgttttctttggggatagttgtttgcttgcatgggttctcatcaagtcttcggcgaaacaatcgtcacacccttaaatccatttgcaatttgtaaggcccccttataccactttttcatgaactcttgatcgtcacgatcatcttataaagctcctgatcgtcacgatcatctcatgaacctccttgatcgtcacgatcatctcataaagctcctgatcagcaagatcatctcataaagctccttgatcgtcacgatcagcaagatcatctcataaagctccttgatcgtcacgatcagcaagatcatctcataaagctccttgatcgtcacaatcagcaagatcatcccatgaacctccttgatcgtcacgatcattccatgaactcttgatcattctgatgatcatctcttgatcatctcatgaacttcctgatcgtcacgatcatctcatgaactcttgatcatcctgatgatcatctcataaacctcctgatcgtcacgatcgtctcaggacaagatctactcgcggtccagcaacggccccgtcgtcctgctcacacgccagccggcggaggggcgcgcccgggacggcagcctccggctgggcgagatggagatggagtgccagtggagccacggcatgctgcactttttgaaggagcgcttcatggagtgcagcgacagctacaacgtcttcacgtgccgcaagtgcggcatgatcgccgtctgcaaccccgacaagaagatcttttcgtgccgcatctgcaagaacatcacctcgttcgccgaggtccggctgccctacgcctgcaaactcctcctccaggagatccagaccatgggcacaaaatgtaggtacccttctcgtctggggtgactcttgttcattctgatgatcatctcataaacctcctgatcgtcacgatcctcccatgaactcttgatcatctcatgaactcttgatcatctcatgaactcttgatcatctcataaacctcctgacaaaaaatacgtatagcgttctcatacccgatgtactcattccttccaggcgatcttgcgggccttgatgaaccggtgtatggcgatgccagtccatggggtgactgacattcggagtgcagaggggcgccagatgcacgcgctggggacgtcccagtttacgtaccactggggtctgaagtctgctccgggagagggcacatggcacacaaacagccctgcccagtgtctccggacgtcatcccagcggatggtgcactgttctgtactgtactcacggtgaaacatcatcgcatgcgctcggctggtcaggaccagtatgcgtgtcccgttcctggtaggtcgtcccctcgggtcgtccagtgcagtcaggtcggaatctcggagagtcacggtgtgaatcttgacgtgaccgaagcctgcagatccagtgtaggatgcgcgtgctttgggtttgaagcggtgcacaaggtcgatccacgatgccccgaccgcgaaccagaacccatgaggcttttgtgttgcgctgtcatccgcatggatatccatcaagttggcactcgacggaagtacgcggtcagagcagtgcaggaaaagggtgcgagaagtcggcatcaggttcgtgcagtgagacgtgctagatttcaattttttgaaacagctatctttggcaccttttgcaaaatatccctctcatttcttcaaagcagccagtccaaccacaaaagttgccacactccagacggcggtgaagttcatctctgcagtatcgattgcagtaagatgttatacgtatattctcgtacatgctcgtacatttttaaaatataaataccatacaaggctgcctcgtttacctcgtttaccttgtttaccttgtttaccttgtttacctcgatacctcatacctcatttattacgagaatggagcaggacggtagcacggcggtccggcgtggccccatggatgagatgcgccagcttgtccgcatcttgaccaggctcatgcccgcttcaagcagtttcattgggaagctggggcacggcagccggataaacgaagcggacatccggtcctacctcgcacaagtcttgggggagtgcgaccagacctcagacgatgcccctccccacccggaatggggcctacccagcggatggtcggtctacatcagcagtgagttcgtttcatcatttttcgcgatatttgtaacattttgtcgattcttggtcgcagccctcttctcgtgggcctgctgcacccccatcaccttggagcagaccctcctgtgcgcccagcgactgcccgggcggagttgggagacgtacgacggggagctggcgaagctaggtaagaattggttgagattgggttagaatgtatggatctcgattttgtcattgatatctatcgaccttcaacacacacagggctgttcccccaaaagtgggcgctccccctgcgcaaggctgaggtgcgagccgtccaggcacggtttgcggccgagggccccacgtacaagcacggtgcgaaacagtggtgccagccggttgtgacggcgcagcggaaaaggcacctagctgaagactttggctccaaaagcgagctggagctgtggcacatcgcgaggaacgcgcttcaggtcgcgctcaacaagcgcggcacaacgcccgccaacaaaatggaggacctgcaggtgaggttgagttgagatttaggtatcttcgcgttagattgagttttttcgcatcaagtcatcgcatcctcgtttccacagatcacgcagggcacggtgcagaacctggtgctcaactgcatgcagtcgacagctcagcagctcagggacaactcggggggtcaggtcactatccagcaaccgctcgccttccagcagcaatacgctctccagctccagctccaacagcagtacgctctccagttccagctccagcagcagtacgctctccagttccaactccagcagcagtacgcactcgagcagcagtatgctctccagttccagctccagccccagaactcgatgacaggtaaagttcttcttcttattattattattattattcgcaagttcatgttcatgttcaaatcgtttgtcttcaggacaaagcagcggattggattcgctggcggctgcagcggtcatcgtcgagaactcctgccccgtagttccgtaccccacaatgttccaggtgtacaacatgtagatctacaaggtcaaaaatcagatcagcccgatgacttcgctgaccaccccgtactgcaagcagtcggctggggtcaggacaaacttttctttttcgatgttgtcgatcatggacgctgggagggacgtccttgcgcgaaggatcgttttgatcatacgcaccaccagcatggtgttgtcatacatgtcctgcagcgagggtccgtactgcgtatcatagacgatgttcatgatcagtgttgcgttgtcgtacatgatacgtttggtgcaaaagaggagagggatgatcgagtacaggtctagataggtgtcgatgacagcgatggtcggaacatggatcgagttgattcgggccacgagcggaaagcaaaacgttgggctcgagcagtggtaggtgctggtacggaagatgatgggtttgacctccagcgcatcagccgtgaagagcatggaatccattcgcttcatcacttccggagagtagggcgcggtcggagggagcccgcactcaatgttgatttggttgatgtttgtcttctggagcataactttcgttgtaaggttcagctcgggatggcgtgcagcgtgtttggagggattcaccttgatgtttaggatgcgatcaaaaatcccaaactccttgcattgtgccgccccaagaagaacgtcccgtttcatgaggcgtgcgacatcacccttcgtgagttttgtcctcttttcatagaggtcgtacatgtacttgctgatgtacgcaagtgactcgatgctgaatttgaggtcctcctcttttccccattggtaattcgaatattggtggatcaaacatgtcgagaacgtgtttgcaatgcggtaaggtgcgcctatggacagaaatgtcgcagccgatgcggaaataccatccaccatcaccgcgatgggcacacgtgattcctgcaagatgctcatggaggataacccggcttccagacttccacctggcgagttgatgtgaaccaggatcggcttggggctgtgacgcacgcctttgacgtccggggctggtgcgcatgccgcggcgacatctgctttcagctgtcgtacgctctctatgctcacatccccgtagtagtagatgtgggtcaccttgtcagagaagaggtcgtcatctgtcatgtcatggaagatgctgcgttttttatgagtagacttgtcaatggacttttttgatttccgtcgtggcgtagccatgtcctgctgatctatccatatgttttacaatagtgctgatgacaaatgcgccgatcagacccagcaccatgcctaccaggacctgtaacaacgtgtggcacccacggtaatagcgggacgcgcacatgaggaggacgaggatgatggccacaatgcctggaagcaaccgctgtccgcccgtgagccacagagttgccaatacatacgtcgttatcaagacgtgacccgacggcataccgatgcgaccttcataggatcccccacggttgaacaggtcgcaatttcgcgcacctgccggccttaactgcaacgggtgccaaaccggcagcatgcgagtgattttgagaaatagctggaggatcacccctcccagaatgatgatgatgtaagaatgccgagaccgtacgttgtccaccctgtatggatgtgccacccacaagaccaccggaagcgcgcaaaaaacaaggaggaggagggagatgacatcccatacgaccatgatagtcatcgttcctgtatataggaaccactagaagattgtatttttttgatatcccgaataaaattgaggacaagctgtaaacaaaaaaagggcgagcatgtcgcgtgtcgcaagtcgaagagagtaccgtttcacgacggactggttctccaacaacctgacacgatggaacaccattgtggcaccgtacttgcggaaattgcggcaccccattaaaagcttggaggtgggtgtgtacgaaggacgaagcgccctatggactctcgagaacttgttgcgtcacccgcaaagccaaatatggctggtcgatgattggtcacggcttgagaactacaaagcaagccagcagtggaagaacttgctgcacaacctcaccgtctacaagcgaaagtttcctgatgctccctacgataaaatcatgatcgcggatggggcgattgataaagtcctcaagagcatcgaactgacatcggtagcgtttgacttcatgtacattgatgtgaccggtgactcaaaagatctcatcgaacaaacaatcctggcatggtccttgctgaagcccggcggaatgatggtcatcgatgactacaccagcaatcgagagcatgacgggtcctgtaacaagcaggggatcgacgctttcatggaattattcgccccagatctccaagtgctgcacatcagctggcaggtcatccttttaaaacgcaaggttccgctcaaaacacgtcgactctgtaaaagcgagtattacacggtgtagatcggcgggaacatgatgtcgatatcgaaggatcatctcgtgtcgccaaggcgcgatccaggatgttgaggttcccccccattccaccgtgtcatttcaaactgttccaggaaggaatagagttgtccctgtcaactttttgcaacattttctgtcctaagtacaaaagtcatgcggggcatcagcttccttagcaagtgcatgatgacagcgtggggcggggtggagtgcgatgatagtagcgaacatttcacggatgggcggagcggtggaggcggacggggaggcggtggaggcggacggggaggcggtggaggcggacggggaggcgggggaagggggcgggcaagggggcgagcaagggggcagggacaagacgggggcgggcaatggggtgatgatggtagcgaatatttcgcggtgcgcgcgacgacctagttgacggtcaagttcaccagccgattaattacatacggtgctgcggggctttagtagagtagacctcctctcttgcgatgtacattgtacaaaaaaagtatatttaaatctatgtagatgatcatcacgcaactcaagttcaagcatccttgatcttcttgatctcccccgcaatggccctcatgagctcatccttggatgattcatcgacctcatcatccagcatcgacaggagcaggtccttgaattctttaaggagatcctccttgcttgccgtatccatctcctccttagctgtctcatctgggttgttggtcttgaagcatgtaaagtatgacaagtatcggttcgagaggaagacttgactcaagaccaggattgagaggaggagttgactcaagaccatgatgtcgatgccaagacccaggtgccaagacccagtgcgttggtacaccgtgtaccgcaagttcaacaggtagggtcggtcacacacgatccatgtgagcaagatgcagcagttgatgctcacgtgactcgagagcaggagatagatgcgaagttgtgacattgcgctgtagagacgggacaagtatagagctatgaggacgtacgtgaatgagatgctgccggcgaggacccacattatcggctgcgggtacacaaaggattgcatgtccatagcgatgatctagggatgtgatgatccttttcaatttttttatgtatttatctatatctttgatctagaggatcccccctctaccactcatcgccagagttggcttgcttggacgatccacggtagtcaccgcttgtcccgatgggtttgtttttcccatcccttttctcgccgcgtattgataccccacatgcaaggtttcgaaagagtccgcgtagcacgtcatgaagccgtcgatgccaagtttgggatagtccggggatgttggatctcctcccatgtaatcatcaaaaatgacgaccccaccaggcttcagcagtctgtacgtaagaaccgcatcctccattgcgctgcgcgactgatggtcaccgtcgatgtacacgatgtcgaagtgctcctccttttgggtggcccatggttgctgcttcagcatgtcgtacgagaaacctttgaggaggttgactttgcttgcatgctcgcggatgttgaacatgaaacgggagtggagatcctcgacctgggactctgagtgctcccccggtgtgccggcaaaggtgtcgcagcaccatatctcggattccgggtgcgtgagcacgttttgcagcgcccacagcgcactgcggccttggaaggacccaatctccaacatgctggtgcggatccctttgtacggcgcgagtaacttttcccaaaccgggatgttgacagagaaccaatcttcggtgaacttgtatgcctgcatttgactctttacattagtctaacacttaggttggttcggatcgatcggcgatgatgatcacagtttgaatgccagtttgaacgatccttaaaaagttatttgcattcagtgattcatacacggggcctgaaggctatcatgaacccaaccaccatgtaggtggggtgccgtgacccaggcagggtgaccgtggcgccacccaacactcgggtcgctgcctgcgcccactccagggtcatgtggtgggcaatggtggccgcacgctcattggacactgacggcccacacgaaaatgctgccagattcagctctgccagctctgtctcgcca

SEQ ID NO: 43 - DNA, 20783 bp, unidentified
  misc_feature 1..20783: note = Fanzor polypeptide
  variation 5583..5719: note = n is any nucleotide
  variation 10106: note = n is any nucleotide
  source 1..20783: mol_type = other DNA
ctcgggctcgcttgcctacccacctcgtccacgttcttgcttccttgacggactgcagcgcctgctgcgccaacaccttataagccctttcggaaccctccctcccacccaccccgcttacctccagtgcctcaccgctcgccaccgaccgtgctgactgctgacccccctccccccccgccttctcccgaccgcgcctccagcgccagcacctctgctgcgttgccccgcaccacgtcgggccgccaccgggcggtggtccgcaccggcacagcactgcaacccaccgcgttcagccagggtagccccagctccacagcctgcgcccggcgcggggtgggggggtgggggggtcgaaggcccggtgccacaagagcagggtcagtagctgaggggtagggcggggtgaggcgcgcagagcgtgcgcgctgaatgtgtgcgcgaaggaatatgcgtggcaagccgcatgaatgaggggccatgggcgaaagccgcaagcaaagcggggcggggaacgctgggggggggcggcggggtcgttggggaaggagcgtttgcgcaagcacatcagttcttgggactgggcaagcagtgccgggaaagctggacgaggacccccagcagtcgcggttgctcctccgggaagcgctggtccccgcacacatgaacggctggtccccccacacatgaacggcactggacaggcgagtgcagaaaacccctgcgaccgggtgccgccgctgcacggttcccccttcgcttcccgcctccctttccacgccccgccggcccccgcccgccttgcttcaaacgggcttttgagtcatacgcagctgtctttgttctttacccacccccccttttctccctcgccccgcaccatggctggcgagcagcccgccgctagcagcacgttggccatgacgcccatggacacgaagttggtgatgcggcggacgagcgggcgcttggcgcgcacggccatgccacaccgcgccgagcatgaggccgatgtcgttttgagctggagctcgccaaggagcagcctgatgagtgggggtctgcggaggcgggaccctgccagcgcttgggggagggggaaaagtataaaaagcaggggggggacgcaatcgaacgaaccatgccctcctgaccccagcccccacgccttccacgccctaccagccagcctctcccgcagaagtgcagctccagggccccagagctgcccgcagcggggtctcaacacccgacctgtcgcggtcccgacgagcagacgtcgtaccacgtctggagaaccctaaagccctgccatgcacaaagcccgccatgcaagcccactcatgcccactcacgcctgttcgcccaagtatgcatgtgctagctaacggcaaattgtcatttgcgttgtgtagttcggtagttcagacctaggacagcagacataggtagatgagcaatttaggcgtagcctgcctacaagcggcgtacgaggtatggtgggagggacgacggcgaaagaaggctaggcgagctcggaatgccgctgccagctgcgctgccggccatcaatgagctagaaaccctgatttgccaagtgtctcccatgcgtcacccccctccccccccccatcacgcccgcttccgggcacgccccttcacactctctccctccctcgtgccacgccatgatctctgcctgcagcccagcggcgctcttgaccccatgtggtccccgctggccattgtgcggggacgtcccagctgccctgcaggacaagggtcccagcaggaaccgcagccagcctcgtccccgtcacccgatccctcgagcatctggctgccggagatagtgcagcgctttgccgactcactaccgcccaacgaggtgccattcggcttgcgcctggtcaacaaggccgctgccgcgcagttccgcgggccgcaacacagcaccatgcgcctgtcgcagcccgtgccgcaccacgcgtttgtgtggcgctgggccggccctggtgcaatgcggcgcctgacagcgagggaccggagggccctgccgcagctgacggcatgcagcggcagcatcgccaacctggaggtgctgcttgcgcgggatgacctgagcttggacccgcgcaacaagcgagactcgcttttcgaatccgctgcggaagtggggcagctggacgtgtgcgtgtggctccggcagcggggctctcccgtgggaatgtacctgctggatgcggcagccatcggtgggcagcaggcggtgtatgagtggctgcttgccaacggctgcccaaagggagacgaggtggaggcagctcacttagctggaacggaggggcatgtgggcatgatggactggctcctgctgggcgccaccgccccggaggagacgtcccttgatgagtcggcgaccctcctgagagccgcggcggccagctgcgacctgcccacgctgcagcgcctgcaccacacctacctcgatcgcctcggcagggagctgccggatgcactgcggcagggggtggtggccaatgcggccagatgtcccacagcggactggcgggccaaggtggagtggctggaggcgcggggctaccctcaggacgtacgagcttgctggcaggcagcagcaaagcctgacgcgcttccccggctgcaatggctgcggcagcggggctaccccttcagccaggaagtggctcacagcgctgccggggggggcaacatggaggcgctgcagtacgtgctggtgcagggcggggtcaactatgctgacgggggcttgatggacagtgccgcccagggcggccacgtggccatcatggaggtgctgcacgcgcgtggcgtccctgcaggcagccgtgcgattgagagagcagtgggcggaggtcacctgccggcggtggcctggctggtggagaggctgggcgctgacacagccctgacagtgggtgtgtttaaagatgcggttgaggcgggtagcatggcgctaatggtgtggctgcgggagcgcggctgcccgtgggatgcggccgtctttgccgcagctgctcggcatggcagcgaggagcagctggagtggctggcagagcagggctgccctatgggggtaagctcgggtgcacaccactgtgtcgctgatggagggcggggccgccaattgccttttcgatctcggcttagtgccgtacgtctccatgtggtcctcacggatgtccttctggagctgctgttgtacgtttaatcgtgaatggggtaggctttcagcacccctgctggcccgtcctcgtgtttcgcaaccataccctcatcgctacctctccttaaacttctgtaaatgcctgcctgcaggacaatggcctgccgtacggggaggccgtctgtgctggggacctagccatcctgcgttgcctgcgacgcctgggctgcccgtggagaactgacggaagcaccttcacatcgatactcaagtggctgaattacgacctggaggaccatgtgaagtgcgcgctgtgctggctgctggaccagggctgcccggtggactgggaccaggtagaggcaacagcagcagagggccaaagaattgacaagcagctggagtggctgcgaaggcagaggcaagagcgggcctctcctggagccctggagtagcacaatcacacatgcctgtaggtctggcgttgggcagcatgttacgcgcgcgctgtgctggctgcgggaccagggctgctggctgggacgaggttggcagaggcggccgcagcaggttcgagtgtaggaagcagctgtgcacatacaactgcagcaaggatgctgggtccgcggcagtgggcggccattgcgcatggggattggggaaagggcaggggggcgcgagcacggagagtgggcactgggttgtgcgcggctgttgaacgcctattcgtttatgtggtgacggggaatgtcggctgctcggacggtgtcggctgccggggtggcggcgccggcgtgctaaattgcgctaaaccctaaatgcaaaaccacaatgcgcctgcggctgttgtgcactcggacgccgcgccagaaccagcatcactggctggcgaggtccgctcgagcgtgtcgcgtgtgttcactggcgggttggtacggccggggccggaggatgaagatggaggaggtgacggagcggtggggtgtggcggcagcggtggccgtggtgctggttacggtgccagtgccaggaggggcagcccctctttgggtggaaagcagcagcagcattgaggacgcgcggcatgcgatggcggcagcctcgctgcgcgctgcgcctcggactcggacgggagcctcatcagcagctcagccgagggcgccacgcgcgccgccaccaccgccgccaccaccaccatatgccccctcatgggatctgggctggcagcggctgcctggagtgcccagcccagcaggtgggtggtctggcggtggcgggcgagcattgcggtggctgagttgggggcagcagccgctgcagcgtcccccggggggcacacccggcaggggtggcgcccgcaacggcggcgacggcagaagctactgacgagctgcccagcgggggcgtcggcggtggggctggcggcagcagcggcagcggctgcgggcagtgcggcgaagagcgcagacttcgggtgctggtggagtacgtgttcgagctgtggcagctggtgccactgggtgagtggctgggcgctgggcgcggttggacgagcatgcaggcagggccggaggcagcgggcaggggggccgggcggggcgggggctggaggattttgcgaggtcaggtcatgtacccagctcccaccccaactcaccccccacggcgcttgtcgcgcttgcacgctgtgccttcacccgtccacaccttcccccgcaccccgcacccctttcctcgttcgcggccttgttttcaacgggctcttgcatttgcgcagctgtctgtgtcttttagccccgcaccccacaacccgcagacccccgcacccgctgcacggctggctggtgaacctggccgtgctgctgctggcacccgatcggccagccttacacgctggcagcggccctgccaccggcaccgcagcctgcaccgcggacccctccaccagcagttgcggtggcgcgggcagctgcccgccacggcggcgcagccgcaccgcgacaggcagcagcatgggtgcgggcgggtgcttggccgctgcggcggcggcagggtcggcagcggcggcatctgccgggggcggcgagggcggccgcgaggcggctctggaggtcaatgcggcggatgagaagcaggcgctgatgcggtgagcagggctggcaggcggtgcggtacaggtgcgctgttcgggcctccagcctgcatagtgccgcgtttgcggccccgtttccaaaagcttttgcgcttgcccaactgtctacgtcttctttctagcccccatacacatgctcctcagttgccgcgttctgggcgagtcttgtgccctgggcttgctcctcttgttcgtctgtatgcgccccccccccctcctcggnnnnnnnnnnnnnnnnnnnnnnnnnnnnnnnnnnnnnnnnnnnnnnnnnnnnnnnnnnnnnnnnnnnnnnnnnnnnnnnnnnnnnnnnnnnnnnnnnnnnnnnnnnnnnnnnnnnnnnnnnnnnnnnnnnnnnnnnncctcggtcccccccccctttccccttcaggcagtgccgcgcacacacgcaatcccgcgcgagagctcgtgctgcgtcaaaggcttgtgcaccgcgcttgcgtttactgtcctcctacccaccccactcacccataccagccacactcatccacacacactcccacctgcccccaggtatggattatggttgcccagcgccccgtttgcgttcttgtcgcccaaatggactggtgcgctttcgcccaggtctttgttctaggaatcttcccccactccgcacgcccaggtggctgctgggcagcggcagcatcgtgcagccgcttgctgctgctggcagcctggacaccgagctgacggacgaggactacctcgaagcggcggtggcggtggtggcggccagggtggtggcgggcgcgggctgcggaggctgaggaggcgggggacggcgggggaggggggtcggcaagggtgggccgatgacggctgcggcagcagcagcggcgctgttggatcttggccccgcgccgggcttcttgccggggatgctggcgttactgttcgggcaggtgggccgggggagagagtgggggcggttttgaggttgttggatggctggggtggtgagggacgaggatgaggcgatggcggcggtgagggggagggggagcacgcccacacaagcatgcgggtctggtgttgggcagcatgtgacacgtgtgatgtgctggctgctggagcaaggctgccggtgacggatgagacggagacggccgcagcagcaggatcgggtagtggaagcagcgcgtgaacagccgcagcaaggaggctaggcccgcagtggtgggcggcctcggcgcctggggaagggacaggagggcgcgagcacggggagtgggcgctaggctgcgcgctgctgttgaacgtgctttgatatgcggtgacgggaaatgcgtccgcgcaagtgtttcaagtcccaagggccccgggcaccagctgcgaggacgaagggatggatgatcatccccttccttgttgtgccctgccgctctcagcgcgcaaggcaaggggcggagtgcaggcggcgacctgcaaattgaagagggttgggggctgtgccagtggtggtgtaaacaggctagatagcgcgtgggcagggtagctgttctgcagggccctgggggacggggaggaggatgcacgccatcacggatagctggagatggtggggccagcaacagcgcgctcacgtcggtggccccagatctagtcggcggctccagatctagttgcggccccagcagcttcgtacggtcacaggggacgcgtggcacgtggctaggacagcgcctctgcggggtcctgcctctagtggtgtgttggacgaaacctcccggccatgcgggctgccggccctgcaatgaaggggcgcgtgctttcaatgcctaaccgcgtactgcaccagattgtaacgctgtggagggcccgggttcatcctgtgcgccaactgcgggggcgtggggcacatttaccgggtctgcaactacccgatctgctctttcggggtgatctgttgcaggttgacatacgacaccaccgcctgcatgctggtgcccgagtacctcatggtgcagcggaaggattcgttgtgctacgtggagttcatacacgccaagtggtcgccacagaatcgacagtacgtcctgaagctcttcgcgtcgatgacgccggtggagcgggaccgcatcgcctccgccccggacttcgacacactctggtacggcttctggcataacgacacgtatcggagctacatgcgcgagtaccagcaggcgcgggaccagttcaaccagctcaaggcgggcttcaacttgcgctgcgcggtcatcgccttctcgctcgcgtacatcctggcgaacaccaaggccgagtacgacgaggcggagtgggggtggcccaagggacggcgcaacatcaacgagacggacgtgcgatgcgccatgcgcgagttttccgaagagaccggggtgtcccctaaggacatctcgatgttgacaaacatgaaacccgcaggtgaccgccaggtcgctgcaggcgcaggaaatcggccaggtctcgtggtgcaactacggcacggtcttgtcgaacatccgcgaccacaacgtggagcgacgcgagcttttcaagcgcgtgcaccagctcgtcaagaacaacctcttcaacatcatgctcatcgcaggcaagtaaggtaaaatacgtcttgagccctccttgaggtccagcgagcaccttgtttagaaacaggaaaaacgatccttacttgctaatgcgcgtcgtgtccttggaggcggcgacacgggtacagcgcatcccgacgacctcctttgctgctcgcttttgctgcaggctcggtacacatacagttggtgccaaattaaaatgggacgctggaattagactggaaatgaccatcgcccttgaaacccggcaccgttccgtgattcactaaaagtattacctcaagagcgttcgaaaagtgagtaagctgtacggcatctcgaaatcatccttgcaccgctggctgaagctcgccaatattgccgtaaaaccaaaacgcagaaggacgtcggttgtgtccgccattcgcgggtgcatccaggaggttcctcatacgcaatcctttttgtacagtcgcggagctggcagccatggtctccaagagctgcaacctctccatttccccccgcagcatgaatcgacacgtcaaggcggcccgctttacctataaaaaagcctatcgccacgtggttctgttgcggtccgctgacacccttcggtcattctgctcagagtacttgtcaacccccgatgagcgcatcgtctgcgtggacgaggtcgggttctatctcgatgattacccgcgtcgggggtgggcacctcgtgggaaacgagtggctctctcgggggccccaaccttacgacgctctcggatctcggtcatcgttgccatcggcaccaccggggtcctgcattacacgattctggaggggaattgccacaaacacgagttcatccagttcgtgcaagagctggcgcagcttgtccctcctgattcgacgcttcttctcgacaacatcagtttccaccattgtgcagaggtccgctcaatttgtgccaagcacaacctacggctactgtttacacccccgtattccccaaaactcaactcaattgagctcttcttcggggtcttgaaggcacgctaccggcgagcgtgtattgctgtactcccctgccagcacgagaagcatacggctcgttcctttgaggacttgtacatcgaactcttcgaatccgtactggcaagcatgggcctccttgacacgggcgctttcttgcgcaaaacgcgggcggaagtcgcgtcgtcgtcagcgagcatcgagttggggacgttttgcgggtaagattcatgacacgaaaaccgacctaaggaaatgacccgcggtgtattcagtgagatgcgggcgggggccaccggcgcagaagaggccgggcaggatgccttggaggagctggagttcgaactgctggcggcggccgccagcaccacgacggttgcggacgatgccacaatcaccgccgtgaagatgaaactgaacagcttctgcaaggacagcccccggcttcgctctcagatccaggcattggtgctgagcatgaaccggctcctcggcgaggcgtacgcgttcgccacgttccacattctcaacttgcacgactgcggcacgtaccccgccatcgaccgcaacttcttctaccgctgcctcgtcgccgtcagcgccaataacagtcgcccggccacgcttggtcccgaactcgtcaattctcgcgatgtatatcacgcgcttcgccccctgcaaggccccggcagccagccggtcaacacagtcgggtacgctcaggtcctggcggacctctccatcgtcatggcaacgatggccgggaaccacctctgggaaaacctggagaagcgtatcttcaactacttgaaaatgaagtaccccggccagctgatgggggaccccctgcgcaagaaggtcgtcgaagcattggtacgaaaacccctggtgtgcacggcggacctcttccagctctctccgtcggttcccccggactcagcggcggccgagcggctcaggcacgctcgggccgttgcagacgagttgcgcgtcgtcctgccgctccccagcggggaccactaccagacccgggcgcacttgaccattcccttgtacatcaagatgctccaagagatcgaggaggcgcgagcagcagcagcagccaccaatctcaccgcgggaaagacggtgcgaggacgcgtgttgcccncggagcaagatcaacctcagcaaccaccgcacgcgcaagtggaacgccgaaacgcgggaacgcgtggagggccttccgagcgcaaggaccgcctcgatcgcggagtacgccgacttcgtgcagcggtacctggtcctcctgccggagctcctccagcatcgggccgcgaagggctaccgcaacatgcggttccttcgatacgtccaccgccaagagtcgatccacgagatctgcgaggtcatcgcgccgcgggagggaggcctggttgtggtgggcttcggggactggcggggcgtcgggaccacccccatccgccggcgctgttccggcccgctgcaggacatcaagaagcacctccagaagcaggcccatgtccggctcgtgatcatcgacgaatacctgacctcccggggctgccacgggtgtctgaaccggctgaccaacatgagagccgcgccccacacccacgggccggggaaagaaagggtgcagggggcgacgacccaggtacacaaggtactccactgccgaccaagcagtcaggcagctgctcgcagctgttgcggaaccacgtggaaccgggacgtcaacgcctccaaaaacatcctcttgctgacgatgcttcgcttgaaggggtaccaacgtcccccggaactgagcagaggtcaccagcaatgatgcaaccattctctaagaggcccgatcaaacaagcggagcgggaggtgtcctgagttcaagatgccgccctggtgatgttcgatactgccgaaaagcaggtcaccttcgaagcgggtgacgggttatcccgagagccctctcccacccacggacactggtggggagaggaaatgcagtccgtcaagccaattgatccgaggtgtcccaaaataattggcaacggctgtaccaccggacccgtactcctactattatccgagccgtacacgttgcactacgaaccccgtcctcgcccaggttcttctcggaagatgtacgtcgtcgcacatggtcgaaagaaggagctgcgcaaggaggattacgtcgccctcatgcgtcgcgttgggaagcagcgtgggttcgcgccgttgaagagcaaagtcctggtcccccgtctttgaatctcgtaaatttaactattctctcttatgaaatgacagcacgtgacctcgagaaaaagtaccccaagctggccaagaattacgacatctgtggccattttgggacgcttcaagggcccgacggcttgccgttcatcaacgacaggtgggaggtgtggtgcgacgtcagcggtgtcgtcctcgatcgaaaacccgtcagcatttgcgacttcttgacgcagacggatgaccgacgctccaggtactggatgaagatcgcgaccaacgcggcagcctctgaggatgtgcgcttcatcaagatgtcatctttcgatcccagacgtcccggacaagcctatgtcctgttcaagagaaggaacttcttggcggctgtcttgatcggctacatgcactggttggaccgagacacgctgggccttggaattccatcggacggtgccgttcaaaattacgtcatcggtcgtgcgttcggttatccggtcaaagacatccgcattatgagcttggcccaggcgttgctgggtgttgggtggggtaagatgagcaaggtcgctcagcggaggggcttggacaagtccagccaaccttacaaagtcgcagtcgccgcgttccacagagtgcaacgggaaggggacgccgtttggaagcgtttggaagcgtttggcgagcacagaattcaagagcttcgccgccggcatgttgaagcacgtccaaaaagtcgagcgggctccatgactaattccaacctccgccgcctctggcggtggactttggcgcgctgctagactcggccggcgccaccgcggacccgcgcaccgagctgtactgtccgcgcggtgcgcgttcttccacacggtcttctacggcggcatcggtgcgcccgtcgagctcaacggggaggttgctgtgggcgacagcgacagcgcagcctttggggtctccgggatgtctccgagtatgcgcgactcttgtacgtttggtttacatacaattcatcgagttacgcgggtcgtgtcgccatcatcacggatagctcttcaaccacatggtggtggagaccggcatgtctccgcgagtataccttcaacacacctgagacaaccaacaccgggtcgtacacgaccaagggcgggtgtgagccgagccccatcgacgtgaacgtgcggtacctcgtgtccgatccgacggtgaacgcgccacaatccgagtacgacgcgcacctgatgctcatgacctgcggtgtattgacgtggttcttcgcgacgttcgttcattttttgaactaccgcgcaacgcgcattgatcgtggtagtgcgtggtcatcgcaaatgtaacggtcaaataataaaagtataatgtgagaaaagaggggatgggtagacgatcgagcaagtccccggcaactcgcaccgtaactcgcaaatccacggagcagccgcgcctccgtgccgcgagtgcatcggcgcaggcccggctgaaccggaagctagagaagaaaggcagggtgatcaagactgtcacggccaacggcgggcatccgtacacagtcatcgtcaccccagtcgaagacacgggactcctcgacgtggtcgttgtgaccgtcgcaaactacgacaccgaggagtgggtgttcggcaagacactggtactcaagggcgtcgatgcggtctggatggggtgcgggacttacgataacctcaacgacagggcagttggcaacaccgtattgatcgtcaaagggcggcagtgtgtgtctgttgcatcgcgtgtcgacacaatgacgcttcaaccgaatgagaaagtcacgcgatacgtgtctacgattcagaacagctcggtgccgtacggctggctggagaccgaccgaggcatctacgcgtttccgggatgcaattgcgtcgataaggtctctttcatccctaaagcagccgccaaggatatcgaccaacgagattgctgggacaaggaaaaaggcagcgtcactgtgaccaacgcccggcgcctcatgtacaagtgagaagaggccttcctcaggcgcgactctcgtgtctttgagtttacatgcttgtctcacatcctcaaatacagccgttgccaattattttgggacacctcggatcaattggcttgacggactgcatttcctcttcccaccagtgtccgtgggtgggagagggctctcgtcacccgcttcgaaggtgacctgcctttcggcagtatcgaacatcaccagggcggcatcttgaactcaggaacctctgagagaatggtgacctcggctcagttccggggacggtggtaccccttcaagcgaagcatcgtcagcattccgtggaggcctaaggacggggcttatcgaccagccaaccttacacgtccttccactcgtccgcccctcgacctcttcctttgtcgacgcgaggggtccagcggatacatgaaaattgatttccgtatctaggtgtaacacaattcatttggcggactgtaactccctgacctctcctcgagacgacgacgacgacgcaggtgtccccaaaagtctattttatggtaactcccctgactctcctcgagacgacgacgacgccgtcgatgtccacaaaagtaatttggtatgtcccctgatttctcctcaggacgacgccgccggtgtcctcaacagtaatttggtactctcacatctcctttggtactctcacaagatcctctcgctagattttctcgcaacatcatcccgagtgatcgtaatgccgcagttgtcccaaacgacgataccgctccccgaccagtgacccaccggggtcacatcgagtttgatcgtcccggggatgttgattccattccaaaagctcgacatcgcgtcgtccaggtggatgtcatcaaagaacatgacacctcggaacccagcattcacaaacgcgtccaacatctcacgctcctgcacgccatcatggggatccacgtcgatcatgaggaacttgctcccgtccgcgatctccttagcatcattcatacagttcccgatgcggaactcgaggttgggtgcttccttccggaacacctgcatcgcagaatccgggatgcacttggcgatgtcgtacgttatgacgctgacgtctgggttgtatgtcatcgccaggctgctgaacccccgatacgttccgatgtcgtacatacgcgagccagcgggcatcttgctcgcgatgtatgccaacaaacgatagtgctcctgcccagcaggtttattaaagtactgcgtgcctgcctcgtgccagtggaccgcccgcatgtgcgccaggctgcactggtcaatcgcatctttggatagatcgatgttgaggatggggaccatcctataataagacctagtcgtatcacatgtgaacgactcttaagtcacttagtagtcaaaatctacgtgaaagtacctccttgcttggctaaaaaacgagaagtcaaaatctacgtgaaagtaccctccttgcttggctcgattttacggcggtacgctgcagcggcggcggactcggaggctgagccaccgggcttggtcgtgctggagctcacagcctcgggttcgctgcttggggcagcaaagggtacccgaatattacagtactttccggaggtccaggacgaagtccacgttctcctcgcagccgctgcgcgccacgatcgcgccgggcgcgccgaacttctttgcgaactccggaggtggcacatattgtgagaggtgaatgatccgctgctggaccttaacctcaatcggactgagcagccgccactaaacccatcacctcctcgctgatctcgtggcgctgtgcgaacagcgcccagtcaaggcccggcagcggctccgccttgtggtcaagaatccatttgacggcatccagcttgtcgggagaccgcagctgtcgagcacggctgcggctgtccagcacggccataacggtgtgcatgtccacgaggatgccggtgtcgtacaggagctccatcatgtcggggtggtccaacgcgcctaagtagtactgcgatgcagagcattggctgtgaacgcccttgccggccagccaccggacctgctgcaggctccccgtccgcacggctcgcacgaagtcatcgttgccgaacgggtaccccctggcttccaggacgagcagcggctccatgcggccgcacgggatgccgtcgaggccgtagcggtggtttggccgacgagcctgattggacagtagaaactccaccatccgctcatccccaacgtccagcgcgtgcctcaggtactccgccttgaagtgtcgcttcccgaggctcctgagggtcgtgaggacctcgacgctgcccgcccattcggtgtcactaagagggtcgaacgggtagcaggccgccgtgtaccgcagcgcggcgtcgttgccctgtcggaccgcccgcttcagcaccttgtcgtcgatcgggtactccagcgagcgcaggatgtcgagccgcgccttccagtcaggcgtttccaccgcgccggcgcaggggtccgaggttttgactccatcacctccaccggaggagaaggcgtctcggtcggaagtgaaggacttgaccttgtccagccagtcggtggtggggctggagcccgccgcgaggaggagattgccgcggtaggtcgacggtacccacgatccgatgagccgcgtcattaggggcaggtcgcagcccttcgcagcggcgcacgcgaaccctagagacttgaaccgagactggcccgtctctttcccgcggtacatgaggatttcgtccaggagttcggggtggccacaagcgacggcgacaatggcggccccgcgtaagtcgtacgtatcgtacgcatcgtcgtctcggtttagcagctccctgcagagctccgcgctccctccccgtgcagcggcgtaaaggatgctgtcgaccgcgtccagtggaggctgcatgagcttccgggcgagcgccacgtggcccgcctccaaggcacccttgaggatctcctccttcgtgatgcccggcgcgtgcttccggagggacagaacgacgtccacgttctcctcgcagccgctgcgcgccacgaggcgggcgaatttggactgctgacgtcgggaatagacgtccatcgcgctgggcgcgccaaacttcttggcgaactccgtcggtggcacgtattgtgagaggcgaatgatccgagagctgaaggcgagacttgcagccttgcagtatagccgcgcgcaggcgatgaagttgggcgcgagcttgccgatgaccaggagctgtacgtccaagtccatcgtcgccatgagatcgtccgccatgatgtcactcatgtcactcaaaaatgtcactcatgatgtgggtcatgagcctttacagccgttctcacaacgcttccggacaggccgggtgacttgacaataccttctgttttgtttgtttatcacaagaatgtgcaagaaatatgagtcgtacgacagtagtacgagttacaacttagccttagtcacggctcaatactgacttctacttcttctccgcgcgccgcatccgcttcgcgagcttgtcgtggagccgtttcttcacagtctgcaagtccttgcgatcgaggcctccatcatcggcattctccatgaacctctgcaggatggagttgcactgctggcacacgtagaacccgtcctccaagagcacggacgcggtcttgcatgtgctgcaaacgtcctctcctacctcaccttcagactccggccccacgacgtcctcatgccctcccctgacagcgatgcatgccccgacgacgtccgtttcaaacgcatcaggggcttcgaattccaggtcaatatctgccatttctttgattctcgatttttaactttttttatgttgaacgttcaatgttcagatggacctcaccgccgtgctcaacatcgtcctgggcgtgttctacgtgctcctgaccctttggctgctcttgtacttgaaccggctggaatcgatgggctgcgaatgcgccgcggatccacggcgccccttcatcatggcgtggctcttgggctccatgctgctcgcgatcgcgtcggtcttcggcttccaggtgcccttcatcgcgaccgtcatcgtcgtcctgccgctgcagtccctgtccgcggtgctcacgttgcagtacgtccagcggctgcgcaaatcaaagtgcgcctgctcgcaagccctggctcgcgacgtcctcctcatcgtggcggcggtggacctgcttgtgacatgcctctttgccgtgatggccctgtggatcgcgctccggctgtccagttacgtactgcgataattagaaagagactcctctcgggggaacaccaggcggaacgcgttggggtccgctccaaacatgcttgcatgcgccatgcgctcctggactggctccgtgatgaagtgctgcactgactccaccgtgttgacgacgaccaagtccgctggcggtcgtgtcagcgtttcccgcatccgcgcagtcaggaactcgtccgtatccttttcgatgtccatgtcgtcgaagtatgtgagggctaccaggaccgtcatcttggtgaccgagcagcggtacttgccgtagtcgacgaggtcgtcgacgcgccacggtttgcccaacagcacgggtgttgtcaaggtgaggggctgcgccgactcttcgatgaagctatagtttcgtgtcgggcagtttttcaagcgcatcaatgcattctccatgaccgcccacttcacagcgcccttcacgcccttgacccccttgacgtagaacagcccgttgacgtgcaccatcttgaactcaaacttcaagacgttgatgcacacgatactggctcggtccgtcggcggaagctccttgaggacgtccttcatgatgccgttgaatatcggcagcagcacctcctccatgaacaggttcgaataggaccatggccggtacgtcgggtcctccttgattttttcaacggtcctgacgtaggagtccacgggcttgacttcgatcttccgcatcatgtccccgcattcccagttcagcgtcccaaccttggtctcgacgctgtgcgcgacgacgctgaaatcgaggaagatgtccatgttgcgaagactcgcgaagactcgtgacatttgaggacccccttatttcgttacaaaatctgaatccaacgctgaatccaaagctgaatccaacgacagctcagagcctccgtccgaccgacggacatcattttttgtccggccgacatcaaccgacccgccaagtgtggctgcacgagatgcacgtgatgatgatggtggcgggctcgtccgcggagcgcagctgcagctcctggtagacgcactctcgcttcttgcaccgcttgcaccggtactggtcggtcatcgccacgggtttgaccgtggtggcgtactcgtccttctggaccttgagctcgacgacctcgcgccaacgctccgggaagatctcctgcggcttcatgaagggcagctcgtgcggcttgacctcgtccgcgaggacgcgcccgatgagctccgtgttgcccacataggacgccgggtccaggttgttcagcatcgcacaggtcttggcgcagtagatgtccgtgaactttgcgttcgtccacgctttggggatgcggaacgcgtcggcttgctgaatggcccagttgaagatcccgacttcgaggtccttggcatgcgagtcatccagcccggtcgtgtctttgaccaactgaaccgcccgctcgcgcaacgagccctccgacgtcgacatcgacatcgacatcgaatcacgtttgaagtcgctaacgtcactttaagttgaaatgacggatctcgttgaacaatgaaggatctcgttggagcaatggaggatctcgttgtacaaagtacgcatcacaaaaaagctagaccagactgtaactcacgcaatgaacgtaaaaccactgaacgccgttgatctctttgcaggaatcggaggcttctcactggcactgcggcccatgtcaaggacagttgcctattgcgagagcaatccccagtgtcaggttgtgctccgcgccaacatggcacggggatggttggacgaggcgccaatctttgacgacatcacgcgccttcacggggcctcgtctggcatatcgtgcgcttggtgcgcgagctccccagcgtgcgctacgtcctcttggagaactcgccacagatcttgcgtcggggtgtctatgcgctgctgagggttttcgaggccgagggcttcgcatgggcctggagcacatttgaagctcaggaggtgggagcaccgcatgtgaggcgccgttggatttgtctcctctggcgccgagatggcccgctgcctcccgttcatccactcatacagttgccatacacaccgaactggtcgcgggaccctcctatcacccgccggacaacgcctgtcaaggccggcatctacattcggcacgctctacttggcaacagtgtcatgccgcaggtggtgcacgtcgctgtgcgcaccctggctgtcgcagcacgccttgaagcaaccactgcatcaatcgtcaagcaaaaaacacccagcctgcacagctacattcacctgaccgctgatcggctactgtccaaggcagacatcgcacaccattcggttgttgcgtacgtgccggccagaccgcgccggcttgtgttcccatcggcgacgggccccgtcatacggactcgttgggcgacacccctgcacgggcgggttgacttttaccacaacctggcggaggccagcggcgtgaagcacaagcgcatgctacagtcgctcgtcacacagatcatgagcgaggaggttacccgccgctcgacaactgcccgtctcaccgcaagccctcgatttgtcgaatggctcatggggtaccctccaacatggacgatggcctagcttacatcatgccagctgtttccgggcagcggccacggccaccatcctggcggcgtcctctttgaccttccagcccttgctctgaatggcctgctcaatgagcgagtcattgccgttcttgaagttgttctccttcctggtcttgaccatctgcgcccacgcccctcgagcacccgggatgtccaagtcgtccaacaggtcaccaaacttcaccttcgaaggcgcgactgcccccggcttcatgcacgcccacaatccgagcaccaactgcgtaaagatggacgagctcttcgatttggttgcgacaagctgcgatagcgccgcctgcatcagctggatgtcagcctccagcgagtgttctgccgcatcggcatcctccatctcctcctccatcgccgccgcctccatcgccgcctgggccgcgtcctggaaccgggcgctgctcaaagactcgcggatgcccttgccgatgcgccccgtggcgtgcggccgcgtcgtctgcaggatgccggcgaagtgcgccgcgtacgtcttggacttccatgcgtccacgtccttgacgtcgcccgtcgccgacgccttcagcgcgtcgctcgtgaagtcgt

SEQ ID NO: 44 - DNA, 21746 bp, Spodoptera sp.
  source 1..21746: mol_type = other DNA
acaactcgagccttcgaacaaacctgcagcaccagatcgagtggaataataactttgttacatgtagcagcaactgagcaacttattgtagattatttaaagagttttttgattgtcgataccgcaaatataatattatggcatactctaaaaaattttaattaaacaccttgtgacatgttgcggcaatttattgtagattatttaaagagtttcttgattgtcgataccgcagatataatattatggcatactctaaaaaatattaattaatcaacttgtgacatgtcgcggcaatttattgtagattatttaaagagtttcttgaatggctcttgtgcgccttcaatgtaataatatttgatggtgatggttttgcaataaaattacttttacataatatgtgtagtatcattttcaaacaacgtcacaccttttatatccgaagggctaggcagatctctgtctttacctgtgcatctgcacattacaccatgtaatgccgctatacaatgctcacttttcaccgtaatagggggtgagccaattgccatatactggacattttctagatcattgccggcagtcgcacttgcgaccactcgatcaacgaggcagtcgttcagtttcgcctttggcgaaatgaggataaataaatagattttgatatggaattaaaaataaaactttattataagtaattttattagtaaatcaataaaacctacggctgaacattaaacgagaaacttcgcattcgagaaccggagtaggcccgaaagtagtagtatcgaaacttccgtgtccgataagcacctgcgtcaggcggtaggtgacgtagcactcgtctagctacgacgtagcactcgtctagctacgaagtagcactcgtcttgctacgactttgtacgaatctagctgcggtgtcattactgtctgactgacacttgaatatagaatcatttcataattcatccagaatctggcaatcgatctatgagcttagtatctacttggcaaaaatatacactcatcatgcgttgcgtatgtcctcatatcttactaggtaacatttgccgcgcaagcaacacgtgaaattcactcacaaattagcacagatagtaatttccaaccttcaaatgttcggcatcatcgcccaccagccaggatcatctggcctgatcgaaggattttcacttttctaatcttggttcaataaccagttaatccaataagatatataagaataagttaacccaataatagggtgtgccattgtcagttttaactgtaaatcgataaaaagatcaattgattgtgttagaaaactgtgttgctcggcggatatagtagccctacaagagacctggctatttccctatgacataccgatattgggcacaatcgaccaggactttgcgtacacaggcacatcagcggtggatctttcaaccggtgtttttaaaggacgaccttacggcggtgtggcaatattgtggcgtaaaagtgtgttcaaagaggtaactgttattgagtgcaataatccgcgtatcagtgcaataaaagtgtctttaggagatcgtgcattccttgtgtttagtatttacatgccgacaaatggaatagacaatttggaggagtttacgacatgttttggcgaggtatgtgcgatagttgaccattactctatagaatctgtgtacttactaggagattttaatgctcatccgggagaattgttcggtaacgaattaattaatttatgtatggatcaacaatggtcctgtgtggatatagatgtactaggaagtgtagcaaataattatacatttataagcgaggctcacgggtgtgtgaggtggctcgatcactgtgttactagtcaatctgccaaacaaactgttaagaatgtatatgttaattatgatatgttttggtcagatcatttgcccatagtcattgagtgtgagttaagtgcaattatatgtaaaaataaccattgtagtattaatagaataaataaagctgtatggggctatagaactaaggagcagataaaaagttataccaaattgtgcaatagtaaacttaaattaatagattttcctgtagagttaaggcaatgtagttgtgatatttgtaattgtaaggaacatagaatatatttagataaactatataaggatataataagggcaataacagactcagctattatcacctgtaatactcagtctcataagcgtaagaaaaagcatgtgataggctggaataagtatgtatgtgaagctcacagggaagctagaagtaaatttttatactgggtttctcaaaataggccacaatctggtactgtatatgaggaaatgtgtgaaagtcgcaaattgtttaaaaagagattaaagtggtgttacaacaataaagaacagttaaaaatggaaataatttcagaatgtcgtgcctctaaaaactttagtgatttttggaaagcaacaaatagtttaaaccataagactggccttccagtgagtgtggggggtgcgagtgatagcagagatatagctgaactctttagagaacattttaccaccaagtctcctctggggccgtgttctgcagatcctgggtctagcgtgaccggtgaattgtataacgtgtctgctaaacaagttcgtcaaattgtgagcagcatgtctaggggaaagtcgccgggtcatgatggactcagtatcgagcatttaaaatacgctggtgttcatttaccacgcgtgctcgcgatgttttataccttatgtctgaatcactcgtacttgcctccagatcttatgaaaacaatcatagtaccaattgttaaaaataaaactggcgatttgtccgataagaacaactaccggccgatttcgacagtgtgctcgactcagaacttgataaacatcttaatatcgtcatcatgacgcacagttcggttttcgagcaggactttccactgaaagcgcaattctgagcctgaagcacacggttcaatattacacgaaaagaaatacacctgtgtatgcatgctttcttgacctctccaaagcattcgaccttgtgtcgtatgacttgttatgggagaaactcaggaaaactggcgtgcctacacaggtgcaacgtatttttcatttctggtaccgaaaccagaataattatgtaagatgggcaaacaccttctcagacacgtacaggttgaagtgcggagtgagacaaggtggtttgagttctcctaagctcttcaacctgtacgttaacgagcttatagttgggctcagcagcactcgagtaggatgctggatcgacaacgtttgtatgaacaactttagttacgcggacgacatggtgctgctgaccccaactgtaaatgctatgagacagttgctcacaatatgtcaaacatatagccttcagcatggtttaaaatacaacgctgacaagagtgtgtatatggtcttcagggcccctggtaagtgtagattaaatgtgcccgcaataaagctaagtggcattgaactcaagcgggtagaaaagtttaaatatctaggacactacgttactgaggaccttgaagacaacgttgacattgagagggaacggagggcactggcggttagaagcaatatgctggcccgcaggtttgtgcgttgtagtgaacaagttaaagtcacactgtttagagcctactgccaaactttctacacgtgcaacctgtggttcaggtatacgcagaggacgcttagtgccctgcgtgtccaatataacaacggatttaggatgttgttggggctgccccgattttgcagtgcttccagtatgtttgcggaagccagggtagatggctttcatgccatagtacgcaaacgcctcgcgtcgttactgagcagagtaaggagtagcactaacagcatcctaagagtgattgcggaaaaacatgatgcaaatatcctgcaagcatttttacgtgctcaagtgttgtaaattatttaatgtgtaatttctcttctttgtaaccatttttaattgtgttttgtcattgtgtgtataatttctgtatggacatttgttctgaaataaatatttattattattatgtatgttctttacataatcacgggaccacagggtcccggacctttggaaggcgtacgaggggccgaagccaactcgcagaggcccgttgaacaattttaatctaaatgtaaggggacatcatccggcgattatccctgtatgcactatggaagtacaccaaaggacaatccccggttgatgcaggactattgtgagatatggtaaaaggaaatgatagggatatgggtgtgggtggctgtggaatagttaaccggttaactatggggactatggcccctgcccctgaccaatattgaaaaatacggataaacaggcagggggtgactcgcaaactcaatagtgggcccccggaaacggccgctagcatgtagcgacaagggaagcaacatccgttgagctgcttgaggaaggggaggcatcccacggctatcagagcaatcccggaagtacggtcaagacccctaccagcatcttactgggatacgtccttcccccaagtggagctgaaggcaactccactcttgcgaatctccactcaaaccagccgattaaggcaagagtgaggtaggagaggccactccggatagtcacgagtaccaaccggagttaaaaagtagggcctctcccgggagtcaggtccgtggggtcgccactgcccaacagctcgccacaagctgccttgcggacttattattattatgtttgttccttacataatcacgggaccacagggtcccggacctttggaaggcgtacgaggggccgaagccaactcgcagaggcccgttgaacacttttaatctaattatgtaatgggacatcagccggcgattatccctgtatgcactatggaagtacaccaaaggacaatccccggctgatgcaggactattgtgcaatatggaagaaaaatgattgggttatgggtgtgagtggctaatggactggtaaatatggtaactatggaatactatggcccctgcccctgaccaatattgaaaaatacggataaacaggcaggaggtgactcgcaaactcaatagtgggccccctgaaacggccgctagcatgtagcgacaagggaagcaacatccgttgagctgcttgaggaagggagggcatcccacggctatcagagcaatcccggaagtacggtcaagacccctaccagcatcttactgggatacgtccttcccccaagtggagctgaaggcaactccactcttgcgaatctccactcaaaccagccgattaaggcaagagtgaggtaggagaggccactccggatagtcacgagtactaaccggagttaaaaagtagggcctctcccgggagtcaggtccgtggggtcgccactgcccaacagctcgccacaagctgccttgcggacttattattattattattattgcacaccctatttgttttctaacttagtttgtagtctttatttgagcgcgttactttaaacaattgcatttttcatcctaatcaaccacattctcaaaataaagttcttaaggtgcgtttaagtaaagtaagttccgcgctatttttcaccctgtttagctacataatgtgcgacatgcgagtccttaaagaacatttaaaacctagaaaaatattttttatgaagaatttacaaaataagcggccaaaacatagcttatttgtattttgctttcgttctgtatttaaaaaataatgtggcaggtgtgcttcgattcaaggaaacatattaagagtagatagaaacatattagtagtatatagtccagtcatttggtagataaaaagggggttacctggaaggttttccgggagttttgcaaattggtgaatttatagatttgggtatgctcttttcgaatttcaactttgccacctcgtacacccgccgctcgcgccgccatattgaaaaaatggcgcctaaaaacggttttttattaatatctccgttccgacgcattttatgaaaaattatttatctacaaaattaaactagaaaaaatttcctacaatttatgtattgataactttttcataaaatcaagtccagtcaaattaggatttcacctcggaatttgagatacccagctgtaattttgtatatacttgtataatgactgcctgaaacttgtctcaaaacctacatatggtagggtgtaagcaactattaaattttaaggtcaaaaggtaccaaaaaacgtttttttgcgcttttttggaaatatctcatttcctatgggtttttggtatttgcatttaataccaatattgtagaatacaaaattctctacaacttttgtctaaactttttttttataccgtgcaccgtttccgagatagagggcggagactgcacctcttcaaaaaaaatttttttcgtctaacctatccgtgatggttgtctatggataggccattaaaatacgtcatggttcctaaaaccatttttcgtcaaaatcaattgtttgaaagatagacacttccaaagtggaaaaatgaggtctatcgaatgtgtcctgccctctaacttttaaaataagtgagtaagaaaactaaaaaaatatatactgtagattttaatggaaactttcaaagaaaattggtttgaacgagatatcataattagtttttaagaattgatacatttaaaaaaaacacattgtttgtacacgtggtggtgcagatgaataatactttgcggcgctcgtacgccaaaaactattgattttatgaaaaagttatcaatacataaattgtaggaaattttttctagtttaattttgtagataaatattttttcgtaaaatgcgtcggaacggagatattaataaaaaaccgtttacaaacaatgtgtgttgtacaaacagggaagtttcggtaggttcctgtttctgatgttatatgtgttatgttatatgttccaccgtgtcctccgggcggtcttcgcagtgatgacacccgggcgtttcctcccgcccaatcaaaaacaggatcctaccgaaactcctgtgtccggtaagcacctgcgtcaggcggtaggtgaggacaccatggcgcttctctagccactcctcaaacaggggacttacctctgcaatgacagcgagcccagccctcggttgcgacagtcgttgctgcacaacacacatagtttgtacacgtggtggtgcagatgaataatactttgcggcgctcgtacgccaaaaactattgattttatgaaaaagttatcaatacataaattgtaggaattttttctagtttaattttgtagataaatattttttcgtaaaatgcgtcggaacggagatattaataaaaaaccatttttagccgccattttttcaatatggcggcgcgagcggcggttgtacgaggtggcaaagttgaaattcgaaaagagcatacccaaatctataaattcaccaattttcaaaactcccggaaaactttccaggtaaaactaccaaatgactggactataatctattcttggcttttctcaagaaacggttaattaaaaactgtaaaaaagtttaaaaatcataaaaagttggtttattcattacatacatttaaacatgtttgtattagtttctgagaaaaaaaagaagagggttcaaattggctattaatttgatttgaatgtcagacaaactccaatttatttcagtcagcattttgttaattacttacttgttagaaaatgttagaaatattttattttgtttaacgcctcaacgccctcctacgccactcattcaaattacataagcccagcagcaagctcgtgccgttcttctttcacaactcatctgctagatgccagttaccacgagatgtttaattcatgtgtaatatgtattatcaaaattacacctaaaatattttaatcgcctaaatacgtttttgggtacttctatctggtcaggaaagagtacgtagtcagacggcttagtcgtccacacttgacctttttctaataataaccaataaaaataaatacaaaaaggcttcaagatcacaaaaagtgattctatcatattattgtttgtttgtagaaaaaaattacaaaaggtgggggtcaaatctgctactgctgtggtcttgtgtcaactaccaagactagtaacacctgcctctggttcaacagtttccagagtagcaacggacccctgaaggaagctgttgaaatttgttatcctatcagagttgcaggaaaacttcgcttgtgcgatgcaggtttttaacattttctagcgttgtaaacaaacttcaacgaaaagttacacagtataatgacaaaatacgaagccaaaaatcttttggccacatttatattttcatccaactatagattgaacttaaaaattagaatttaaactttcaaatttactaaatggaagtttacacacgattgacaaggacagagaaacaacaaggtggtcagcttcaaagcgccaatttcccggaaatattccttaaccacttatgaccaaaacaacaaataaatttatttttttcccagttttgtcatgactttgcaatttttctatctcaaatggaacctttttatgcgaaaacgaaagaaaaagcaagtgtcaaatttagtgccaccattcgaaagttctctacgtacatttcttttcatcgatgatagagcccagctactttgtgaaatttgttgttattattctatttatgcacccatagcatatacgaaacagacatttcggagacacatttcttcttttttcaaactttaaatacggcttgtcaaaactttcaatttgccatcaagtattttaggtctaaaccagaagtaaatttgatttacttagtatggaggagtttttataagttggtatcccagcctcataccccccgtactagcttcaaaatatatacggtcgcgtcagccatgtttttgtgtggcatacatttcatttattcaacaaacatgagtcacgtaaggaggacttctagatgttaataattattatgttttctagagtttattaaataagccatagttatattaaaaataaattttcacatattatttcactcggccgtaaggaaaaaaagtaaaggaaggcttttcaaaggatacactaaaataactttttagactgtaataaaaatatttgaaatatcaaagtcatgatggattccaaaaataataaaacttacaacttgcgagtagaagcagtgaaatgttcatatagtgacatctaccagagggtcggtgaagtacgaagtattcacctgtgaatacttcgtactaccctgtagggtaaattaaatccacagcgtttaaaccctgtgctggccgaggcacttcatatggtgatcgttggggtgcgttgtagtctatgtagcctatttaacttataattcaaacattttgataataattataacagacttcaggaatctgttttgacgtttaataatattgaagttttattggctttaaattgcattgacgttgagattggtttcaagcgtaagcgccttggtctggtaagcgtgtctgagtagagtgatcagacttgactttagcaacctaagtggtataccattctgctgcaagccatgtagataaataatttctgtataaacaacttacagtagctacgaatttgaccaaaacacttttgtacgaaaacgcagagcagaggtgagttggggttagggttgtatggcatttacagtccctggccatattattagacgcacggttattttttttcaatttgtaatacgtttagatgtgtttactcaatgtgtcatatatgtatatttattaacttcctaaatcccgatgtcctatgtatggaacatttaacataaagaattttgaactttattgttttttttaacctttagagccagggtacactcgtccctatataaccctctttcttcccttgtttcaattagtagcatggcggcatgtaagacgtgtggtggttcggaccatactcgaacaagttcaaaaaaatgtaaaaactatttaccacccataagaaaaaggaatctgagtgaatctacccaactagagatttataccgtcaaacgaggacttgcttcctgtctttgtccgctcttggatccagagaaaaaactcaaacttttgacagaaattcgacgggatgttcgcgatctctcacgagtctatatcgaactgggtgtttggtataattattatatgaagacaagcaccgaacttccacctaaaccagacgtgttgaatttcatctatgccatgaagggaaaaggaccctataataacgtatattctaccatgtttagtgagagaaaatttgacgataaacttcgctcatttgtggttcaagagatggcgaaacagtacgagactgtactacacacaaacatcagcacacacgcctactctagactggcccgctatttcaacgtgaagcgtaatgatccagcgttgttttcggctttcttcaagaaagtgctacccgacgataatgaagagatgcgtcgagtttgttctattatcaacgtggacactgtcggaggcgccaagtggtggtctactattccagaatggctcaaaattcaggcaaaacttgaagactttcgactatttccacaaccatcacatggactcaaacacattacctacacatccaggggttggcatgaattactgcgccgtgtagatccaaaatctattacgggcaattggcccaagatcattgatcatcgacgagaattatgggctccttggttagatattaacatgataaaatttgggtgtaccctacaaacagatggctttagcgtgagtctatcaatgagtcgcatcaaaagggagcctagtacgtcacaaccacagaaacgatcaaagaagagctatgatcgtatcatcgctgttgatcccggttccaggattcccgttgctgtggtggaatcgcgcaggttcaagtttcaacgtgtgacaaaaaaatatgtgcgctcacatacattggagtggaagcgtgcacgagtcaaagacaagttgtgtcgagtcagtgaggaggctgaacaaaaggctcgtgaaaagttggattttcccgtttcttctaaaaacatgagccatgtcgtggattacacggtttttagaatgcactggttcaacgttcgtcaggaaccgtatgagaaacatgctaagctctcacgtttgaaactagacaagtatatccgtaccgctaaatgtgaagaaaaaataatcaaggaaatattcgatgatggctccaatactctagtgttgtatggtgctggaagtaaatttatgaacaaggcttctttcagcggtcgtaaattcaaacatgactcgctcatcaaacgtctacggagtaagcccaacattgatgtagcggtcgtagatgaacagtatacctcacaggcgtgttcttcgtgcaacgctacaactggacagtttcagaagattgtcatgaatcatcgactacgctggggagtttgcccaaactgcaacagcgagtttgaccgtgacaccaacgcagcgaagaacattttgatcaattatacacggtctaccctctgtaggccaggatgttccaccaatggagcatcgtagcctcctatatatttttgtatctcggtgtcaataaggttcaattttatccttggacttttttggtgtcgggatttaggaggttaaaactttattatatgtttttgatttgtacttttttatatttgtagaacaaaagtgttaattaattcccatatctttactacattactcacgcgcttatctccggaagtacttgttccaattgaaaaacctttttgtcggagatagtccatttgttaaggaaggttatgagatataaaacattacgctacgctcaatgaaaacttcaaaataattacctactaaaaagcgtggtgcgtctattaatgtggccaggaactgtatgtaagtacattatacaatgtgataggggtgagacttctaacccgttaaggctgagttctacatctaattttatcgacaaaagtcgggggtcgaaggggtcgaatcccctccccctaaaagttatggctattttaatagtttttttactttttttgacatcaaaggttgtatgcgtcgtagaaacaaaaaaaaaaacgacaaacggtagctaataaccttagctaactaattcattacttttttcatatgtatgataatgttttggtgagaaaaaaaatcatttgtgaataatttttaccgaaaaaatcactattttccaatattttcaattaggggttcaaccccctatattattttttttgtcgataaaattagatgtagtactcagccttaacgggtcagaagtcccacgcctatcacattgtatatttctgtatacaagttatcgattaacatctgttagggttctgaatgtgtgcgtgcgacgcaagtgtacctgtgtgcagagcggatgcttaatctcagggaagacatgatgtcgatagtatcgatagattagaactgcacagttaaatcttatgtaacgttcataataagcaaatcataaaaaaaacatatgctgtccatctctatgcatatatattttttgaaataaatccagttttctatcgaccaaattagtgacacaaaacaaaatttaatacgaaattacttgctattttatagcgaatgatatttttgccattattttataaatgataactcatcagttatcatagttttaatcagttgccaatacatctattggcaactgattgaaactaaaactactaaaatccaaccagtatttttttatttattgattgatgtttttgtaatcagttcgggcattttttttaccgaaaccaaaaatgttggatatctcagaaactagccactttccgcccaaggacctcagggctaattttgtaggaaattagttgtgttatcacctcccgagaggaatacatcgaattcaaagtcgccctgtatataacggaggttaataaaatttagttttgtagataattatgagaaaatttcgatactttatcgataacactgctgctacactgtacatccctacaatacacgtctgtgttgtatagatgtactgtgtaaataagactagttacattcgtgcggggcagcgtcctggtccgcgcaaatctaaccagtctcattacgtactgcccgcgatacagacgtatttgacaaaataaataaatacattattgattattctttgtatttcaatattactaacgaacgaacgaagttactagtacaacgaaggtgggagataatacaggtaaataattgaatacacgtttatgatgaatgagtgaaataagaataatattaatagttttattgggtgaatgaatgactcatgagatatcaggtgtggagaatgagagaatgtttagtttgatagtacaaatgtaagtgaagcaagataaagtgtttgagaaagtcaatgatgatgatccaattccaattgtttttttttacagtttacgctgtccgtgaccaagatggctgccacactagcgacgggtcggatgtatattatgcgcccaaattttctgcaattcaaattgaaagtatgtgaaatagtgaatataggcaacggacacctgttctattttcttgaattatatttatatgaaacagtttcgtttagtttagttacccgattgttaatatgttttggaaaaaatattaattttattttacacccttcctgtcgagagatcgatctgatagttggaagttggtacacattcttaatcttgactaccatatcctcaaacagcgagtttagaaaaaattaaatatgtgtcttattattgttttcagttgacatcatggcgtcgtggttggacgacaactcgagactgcgaacaaacctgcagcaccagatcgagtggaataacaactttgttacgtgtagcagcaatttattgtagattatttaaagagtttcttgattgtcgattaccgcagatataatattatggcatactctaaaagatattaattaaacaatttgtgacatgtcgcggcaattaattgtagattatttaaacagtttcttgaatggctcctgtgcgccttgaatgtaataatatttgatggtgatggttttgcaataaaattactatgacatcatacgtgtagtatcattttcaaacaaagtcacgccttttatacccgaagggctaggcagatctctgcctttacctgtgcatctgcacattacaccatgtaatgccgctatacaatgtacactattcaccatttgtgttataagtccttgatgtaatagggggtgtgcctattgccatatactggacatttcctggatcattgtccggcagtcgcatttgcgaccactcaatcaacgaggaagtctattataaattaataattagcaataatgatgtcatattcgactgcttggttggtgcagtgcatagaccaactggctaccgaatgaaaatatattttagtgcggtttaaaactgtcacatacaaactgaaatgaatatggttgtgctcagcaatcacatcagtggcaagtcgtatgaaaaacattatttgcggaaacacgcatcaacacaaagtgatcacatttgatcagagatcaggctttgaggaagttgttagtttgtatgtgtttgtagatatcaagtaagcgccagtagtttcagtaagtttgtcatccctgtaagactcattaatataattataaaaaaaatcaaatattatttcacatggtcattgtgctcatgtataggaagactgctcaaaggatgactctaaaagcacttattaggctgtaataaaaatatttgaaatatcaaagtcatgatggatcccaaaaataataaaacttacaacttgcgagtagaagtagtgaaatgtaatatagtgacatctaccagagggtcggtgaagtacgaagtattcacagggtaaattaaatccacagcgtttaaaccctgtgctggccgaggcacttcatatggtgatcgttggggtgcgttgtagtcctatttaactaataatttaaacgttagataatctttataacagacttcaaaaatctgttttgacattaaatagtcaaatagattttattggattgaaattgcatcggtattgagattggtttcaagaataagcacaccttttataagtccggcaagcgcgtcggtgcagagttatctacacctgatcttcctatatattataataacaaaaaaaaaaaaaaataaggcttctggatcataaaaagtgattctaacatatgtttgtttgtttgtataaaaaaagtagtaaaagtgggggtcaaatctgctactactgtggtcttgtgtcaactaccaagactagtaacacctgcctggttcaacagtttccagagtagcaacggacccccgaaggaagctattgaaatttgttatcctatcagagttgcaggaaaacttcgcttgcgcgatgcaggtttttatgattttctagcgtcgaaagaaaacttcaacgaaaagtgacacagtataatgataaaatacaaagtgaaaaatcttttgaccacatttatattttcatccaacaatagattgaacatataaatttaaatttaagctttcaactttacgaaatggaattatacataagagcgacaaggacggagaaatatcaaggtggtcagcttgaaagcgccaatttccccggaatactttttaaaacaacaaataggtcagctcaagagcgcttattttgagaaatattttaataaaactcatcacataaatctaataatatacaatataattgagctattttgacacaaaagaaaattaaatattttagccaccattttacaaaaacaaaaatgaagtgatcgatttagtgccctttaccgagtaacgtaattacatgctttatatacatctttgatatccgtctctacaaataataactttagtcgttatttatgaattttatcaaaaaccttcaattatccgttttgagcggctaattgaaggttttttgtctctaagaccattttatttacacattattggggagttttagcaaaatggtaacccagtctgttaccccacactagcaaggatatcacagtcagccatcttgttgagtggcacagatgttttatacaacagacttgacttacgaaaggaaaggtactggctgctgatattattatgtttaatgatgcgttttaataattatattcgttaaccagtgctaatttgtattcctcgttttatctttttactcaattttatctttaattctcaaaaattacctccattttaatattatctgaaactaaatttggtaaagtaaatttaaaacataaaaatggacaatgctttaaacgaataaatctacaaatacctacagaattttataaacaaattattaagtcgtgtcttcaatttattaaatgtagtctttgacggtctgtggccaattacggatgtgtatgttagcagggtatggtgggggttgtttgacggaatcaccaacttaaagctaaaaaaatacacagaagtataaagttaaaggacaatggatactgttgggcgcatcactgaatagaaataagatacctctttttggatagatattcttatggaaaataaaatatagtattttcaatatagtgcctcttatattatcaaaaatatgatcctgatcaagtaattagtgatcttgtctctgttatcataagataaacattccaaaagtcaaggtttatatccccattacatcaactagaacctatttggaaggtagttcgataataaattgccacccatccaaatactaacctcggcaagcagggcttaccctcagaggtcgactcatatacatgaaattaattaacgacaagaactagacacatcagacacacagactacatctagttacgaagtaactctattctgctacgacgtagctagaccagctacgaagtagaaagcgcgtagctacaactgcgtgcgtcttgctacgtcggagcgcgattctagctacgacgtagcacgagtctagctatgacgtagcattataatagatatcacgtagtagaattttattgttagcattacattttatattcttgtaaattagtgaaccattatgtagtgttatttagtgaatcattatgtagtgtgtaaatagaaacagaaaatagtaaaaatacaggtttcatccatgtagttaaaaaaaaaattaccgatctttttacccgattgttaaacattttctttcgtacgtatcctgtgtttatgtatgtatgtaagtatgagtgcattattaatattaaatttatttctttttaatattattttgacaaagactaaaagactaaaactaacaaagactaaccttacttcacaaaaaaaataaaccggtacgaatcactgagtccagttcaacacacggcaataaaattttaataagatatatttaaagtgtaacgtagcttcattttgaacaatattttaaatagaagaccttcgaaaagacaacgaaaatatattaaattgactatattttgtgttttatcatattttttttggattttacagtgccacgtaatataataataaattaagtaaaaatatataatattttaagtttaaaataacgttcaaaaatgtaaaacgttctcctcggcggggaatcgaaccccggtcatccgcgtgacaggcggccatactaaccactatactaccgaggatgtgattgaaaatctgaaattgggcttcctattcgtcgaagtacaatagaaaatctcaaataactgttaaataataccattacaggttttaaatttggttccacagattgaaaaatatttatttcgttctattactagcatgtgtatacatagttaactccgcataagttaagatatagcataaatttgcaatttcatctggttgaggctactacaacgcccctccacgtcattcatacgaatcacatggttcggtaccatgctcgttcggtactgcttcgactacttccctgctagatgtcagtcaccacgagatttgaaatgaacgccttatatatttttttaaatatatgatttatgtacaacaactaccaacatattttccttttgttgtcatactcaatatttattttaaaattgaaaataatttgattacatattttattatgttgtagttactatgctgttttttatattttgaaatattaactatattttttaaagataacttattattattcatttatttatttacctttcttgatatttacattattaaatattcaatttaaaaaaagcacatttaaaaatataaaaagcagtagcccaccagtatcgggataaatccaagctaccggcagtcagggctcaagagagaggaatttccgggcaatacgcgccgtatccagaagtactgccttctgcatcaggctcttgatccaaccatctaacgttagcctactcaggtgttggtcgaggcttttggctataaggccattggcagatacgactatcggcacaatgattgctgaatctacatcccacatgtctacaacctcatgagctaaaaaaagaaagataataaagataacttattattagtaaaacaataaaaaatcatgatattattttaatctgatgatgtgggcaggttgatgaagaatgttctaaacttatactttcgcaaaattgtgtaatgaaaatattcaaacatagattaaaaactataaatataaaaagagatcttgaagtattattttctttaaagacaaaaatatcggctgttatagtaataattcgcgatccaccagtgaggtctcccacgaaaatatctttacggctttacacaacccctggaaatttaccttttattgtggacgttacatcgaattctaagccacggactccagggagagaccgttatgctattctataccagttgctggaaaacgttcacttgcacgatgtagaccttaatgttctttcatcatcgtcaatgataaaatgtttagcagaatcatctggcaattctctgttttaaatttttttattatattgaattatcttatagaagtactcactacgctaaaatcaattatgaactacaatgaacaatcagatatataatattaatattttagtgaattcataaataaatagtcaacaccatgtgtgtttttttttcagtaactttgtttaaccgcatctacacgcaaaaggggcgctactgtcgccaaatttatgaaaaggacgaaagcgatcgccaaatttaaagtcattttcacaggcacattagctcagttggatggaatagagcgtcgcttaacgagagcgaaggtcgtgggttcaagtcctgcatgtgccgtccttatacttttacttttttttaatcatatggagattaggttaatgatagggcatttactgtattttctgataatgctgaacaccactcgaattttttttatattaatttcttattattatttcaaaattctgttatggttaattttacactattgttaatccggtattcttatatattaaaaacaaaaagtgtgacaatatatgtaaatgaggatagtagtgtataataaggtacttttaaaaatttatggttatataaattgaacaaaattagtttatatcgaatatatatcgttcaaaatcatattttatcttcaaaattaaataaaccttaacattttaatttaaaacttaaaaaataataatttaagtaaacagatcttatcgtttgtcagcttatttaaaatgtgtgccatctagtttttacgacttacattacttaacacaacagctgcacattttagttccctgtctggtcgcaatagaaataatgcttatttcaaggataaagggcgctgacgtcgtaaagtaataaaaacgtaccgtaacgtgtcgcaaatttggaagcttataaaccaatcatcttggatgatctgttacagtaagtattatcaaattaacaagtgcgcaaacgcacacggagatgactgacaaagaaagtttgactttacttattggcactttttgtttttaaacgtttatttttacatgatattatctaactaggtaaatttgagggaaaaatttagctagatagtaaaaacattttgtttaatcttacaaaaccaaaccatactgatatataattctgaatatctgttactcagaatgttatgtcagttttgaaatattcaaaagtgcatgatgtaagacgaataagtaatactcgtttatttattgcttctatataaatataaccatgtttatgagatacttacgattataaaaaaaagagttttatttatcatattattttatttagcctaacatgctgtcaatgcattgtctaaaactgtactgagacaatacttgtggtacttattgaatcagcctaaatgccttgtttaaagatgcacaaaatgcattttagtgcaacacattcagaaacagatagccttttttaacgcatttaacatcgggccctgtggcgtaatggataacgcgtctgattgcggatcagaaggttccaggttcgagtcctggctgggtcgaaattattttttaacaactcattattcttgtgattaaagtaaagctaagcttcaaatcaagttattctatcagacggatgccttccaaccaaaatatcgagaaattaccatgacattttataacaacctgtcttggtgtattataattattaaaccataatctcttaaacaacattttcattttaataacacgtaacaattattacacgtacaaaaatttcgattcattatgatactacgacctacgacattatgatcggcgattcattttaattttaagaatattatttcagtattagcgaattaatacatttgaaatatgaatttagtgaattctgtttggggataattcaaatttacgcggcaaaagtggttaaacagagttagtggcttttagtttttatatgtatttcaacaagaccaaacaaacctttcagggatgtaaaggcgtgaggatatcttattgttgtcacaaaaatgtataaccaaaagtaacgaagatttaaatagggaaaaatgtatttcacattgaatgtgtatacctctgcctaccctttcaaggcgtgattaacaaaataatcatcaaaagaatcaaaaaaccaaaaaaaaaaatgaaaaaggatcagatgactattctcatataaataaaaataattatttatataattaattacatatagataaatattttaaaaatgaataccatataacgcaataagcttatgaaacaatattagtactctatacaagcgtctacattgcaatatatcctccagagactcaaattaaccttacctacatagcacaattcatatcaaagcattgagtaaaaaatcaataattttaacaatgaatgagagactcgcgtttcgcaaacattcttccataacttgacattgttttatataatttttccttttatatttttatatttccttttaaaattgttagtttgaggaccgtgtgagac

SEQ ID NO: 45 - DNA, 21746 bp, Spodoptera sp.
  source 1..21746: mol_type = other DNA
agactaaatcgtcttatatggtatagattgcacctaattgcactattctgtgacattgtcagacaaattgatactctaatcaaaattggataggatctattttcttatgcagctgttggaaattaggctacagttttgcgcttagataaggtcgggtatttattggtatttcaaattgttgctaaaaccaattcactgaatgcgatgttctccagttattttgttacttcttgaatacagctgttctgttaattatgatgaccattataaaattgcgataaccctaaccataggtatgtttttctggcttgaagagcaatagtgtttttagtcagtaagggtctgacactcggaccctcctcacccaaggcgggagaaatcattggatgattttcacccctaaaaaaaagcttaccgtttctaatttgcatgcaatgcgaaaactatcttaacgacgtgtgtttttaaaccttttgattaaatcttgatctgaaatcttattggactccgaattgtgtagttagagatacattatgttataatggcattgtcaattctcacattctattctccatatcagaagaaaaacaattaactccttacagttttctcttacttctgtaagacaataaactacaggaaacagtgtattagtgaaatgttgaccggtgcatgtttgtaagtacgcactctgaatgcgtcggcagtgtgcgcggcggtcaagtggtcccacgcgaatctatgatctgtgtagtagctggcagctgctacagggttgagaacaaattatttgggaatttattaggaaccatatattatgataggctactttttccaccaatatactaagtatcttgttcgttatgtggttgcaagtacgactatcgataaagggtcttaggttcagctgatcaataggttatgtattgcagttatttcggtttcaagaaagtttacaatagtagcacgaactctgtataagcaataagctcaccttttattacatgggactcacatacctaaaatagaggtaagtccagacgcaccattgcctattcattcggtgattaaaaggaatgacgttatattggttgcgttaaaactttaaaagtccttactaaggaccttagtacaaagcctttaaagtctttaatacattgtagcggatatttcttctctacaaaagagccagccctagcccaaacagttaggataatcacgctaaattattgtctggcgtatcagcagtgctgtacgtgtagcgagcgctgtggggtacgtgccacacggctcgatagtgccgccagaggtcagcactgcgctccatggagtctatgggaactttctcatgtaggcaccatgtgatttgcgtttcctgtccttgattagctgactataggtaggttgctttcaccaattgaccattgagactctttaggtgatggcacacgataaaacaattgatgcgtttacaatacgtaactgtgtgcccatcagctcaaagaaatgatttgtgcaccgcagtgacagcgcaatcggttaatggctgggtaacctgctgccgcgcagcgtaaagcgagttcgattcccgcaccaaatttccgcaactcattgtgtgatccacaatttgttgttccaggtctgagtgtcatgtgcatgggaaattgtatgtttgtaaacgtatccgacatccgcatcctagtgcgggcactaggatgttctcctgtgtcgtgggtctcctgtgtcgtgggtgcgtaaaaaaaaatatactttgccccggcaaagtatatttttttaaatctagccatataaaacaattataccaactactgaactatcccaagtttgtttgtttgtttgttaccgctctatgcttaagatatttatgcacccaatttactagttgactgagattcaggagtacggaggactggggattataaagaattaacatcaacatacacccataaaactgcgagtaaaaccttgtatactatagtatgtagtagtaaataacaaacaaagtaactatctctctatcagcaaaattctcacaaatgtcacatttcaaattgatttagtgccgcaataaacctacaattgttgggagctaggcagggcggccatattgtttaattacagggtaggcagcgagacagctcgccagacgtcaattgacatttgatccgaatgacctcatggatcagctcaattggtttatgtctcttgagaatgttttttcgcaaactgttttggtgttgaagttagttttgtgtattgggtggtcttaaatatgatgtcttctgttcaattcttacctatgagtaataagcaattaattacatttcaatacgttagcctttgaccaccatctcgctagtgaaattcctccaatgaatccgccagactcgatgaccaaattgatattgtcttactatatttctgtagaatccttcaggaatagttagttttggactacaataggtataacaataccattcataacaatcttgacaatcagattttttactattgatgtcagtaatcaaggttaacattttaactccaaacggtatatattttccttcattacattaaataactaatcgccaatcattcttcacgtatcacatacattataaaccggcacaatacctatctaagtacctacatacatagctcccacaatacgcaccacacagtcgacgcctacagaattgagtccgcaaacaacaaattacatcatcgaaatgatcttttgttacatttctgagaagttaatagttctcgcatcctgcacataacaccactgagccctatctaattggcgcggtcatcgccaaccgctttgatgtctcatttcctgcctcagataacatccatccttgtctaactatcgtaaagatgctatttctatccctctttattaacgtcccgtgaaatagtatggccacacaagattggttgtaattattgggtggatttcgtagattgctttaaaatagattaaaaattaggatgacgattcaatttttatggtgaatattttataaaattgtgtttaatgtaaatctttggctggtgttcgattccaagatccgatgatgtgttatttgaaattgtcaatagttgtacggagactgtataagaattttgttgtccctttggtaaaattaaatgtttgaattggatttaaaaaaataccatacaggttacaactttgttaattttacatttctatcgagaaaattagtattatttctgactgaaataaatctgtaacccttagtacgagtttactttacgttaaacgaaacgagagcgcgttcggcgctctgattggccggcccgaataaaccaaccaatcacaacgctgaacccgctctcgtttcgatttcgttaaatgtaaaccaatctcatgctaatggtagatactgaacaccagaatttttcagcaatcaaaaccgttaacttacaattcacatgaaatcaaaagaataagcacttatagtcaacaaaattaaaatacagtgggtaggtacggggtacgagtatcatacaattcatgcacacagccgtcatacaatttgaatgaaacaataacttagggtagcgacatattggtgcattgtgatatacaccgtgcgcctgcgcggttcgcagaacaataataataatcgacgcaagtacactgaatgggaaataaattacacacgacgcctgtagggatgggactccgtcttgagcgaaaatgtcgatgtcgatacaataggaatatctttttatcgaagtgctttgtaaagtttttgtagatctgctgattgctttattggttaggtgattgagactgattgtatccttatacttgagtaatctttactacttaaaagtagtacctaaaagataaaggtaaactgcatccttaataaatatacaatttagtatgtcgaactcacatttttttaagtggggaacatcttccaatatcctctcggggcgttgggcgaggtgaggcgaaaaggagtgtcagactattactggctaaaaacgaccccattcctactcttagtattattaccagtaagcttaaatctgataatgttaaacctgaacctttataaaacaaaacactttattaataaacagcaactcccatccctagcaccgcctgaagcggtgcgcgtacgcatcgaacatcgcaatttcgccgtgcgcgcgccgctcacttattaaatccttccgccccgccctaatgccccttattacaggtaatataataaagcggacacattgaaccccgagccttgtcattaaagcgacattcgtgtactttatttattttattacacttgtgtttgatgtataatgaattgtgcattttgttgcagtggtattgtttctgaattttggtggtagtaggtgagtgatattacggatgggtcccagtagggctaatgcccaatacgtaactgcggaagacttaacgagataccgatgggctccggctcaaagagcaggagtaggaacagggtgatttttggtcagcaagagtttgacactccctctcgctttacccaaggcggtaaaaaagtaggtgagcgatttagtaatgtcctcattaacttatctagatagtagatacatatattatatttctttctgtggctgtcgtaagccgactaaaagacaataaatcgactaaaagacgacgtagcataactttaatcaaggttaagtcagtaaattacccatcatcattaaattagtgttacattgtagttaaaattgcaatatcattaaagaaacgttagtactactactaacgtacggacagatatatacttaattctaaggtttctggcagttagagtaatggcaggatgtgctactggttccataacactccatgcacattaacgtgtcataacaacagtaataggtacctagtatcttattatatctaactcatttctattccaacacatagcaattaggtggtctgtatgtgtttaaaattctatctcgtatggagatgttgaataaggaacctaatttaaaacttaggtaccttttttgaggggggaaaatcagctaatgacttctcccgctttgggtaaggcgagagggagtgttagactcttactgactaaaaaccggccgtttctggtggtctgatgactctttgagacacgcgtggaacgcgacgcgctgtacgggtctggttttaatcgatcaacgagctaccgattcctaacacctggagtgtctctcacgacggctggggcggtaatcttaggtttctgggtactattttaataagcatctacgtatttaattggtaccaaccattagataacaaatacgcctgatgatttattcatagcattacacacagagaccgttacaaaaaaacatacaggcgaattgagatgagcacctcctccttttcaggaagtcggttaaatggatggaagttcttttttaggattccttacgaataattgaaataggtgattgaaccaaaacttaacttaatatcaaataggcaacaaataaaatataatggatgacaaacctgactaccataatccgtatacaaaatgctaacccgtgacattacctataggctacaaaacacgggtgtccctcgcaatacggatagtatgcactagcgcatcgaattttatgtagctgcatgaagacatcggcgcggagttaaagctatgcttacgacgcttttatgagcgcggcgcggctttgttgtaaggcttaggacatggtggggattgtgagttgaatgatatgtaacatgtaggtccgagatatctagattctagatattctaatgttactaggtttgatatggagcttgtcgatagtctaatagtttaaagtggtattgtaatgccttagttagttaatgatgtgttgagcttttacagcaaaaattaacacctagctaaatctagaatttaaatttcaacagcaatcaacaacacaattgcgcacatactggactatgagctttctctacataaaacaaagaaagaacaaaactgttattaatcttcttattaaacattcttttgaaatgcgatattccactatcacaaagaatattgcaaaaacttaataacctaaatcgcttcatcgcccgctccgctcatcacgaaacctcagtctgccgccgcaagcgcatgacaaagatgagatattactattctgaacacgcgcccgattcaacctccactattcatcgtcgacagtttataatcgcgaaacctttcatgcattttatttgcaaaaatattactcaagatctgcatagggctttgtcatggtaaatgatatactgattgagttctctcgaatgaaatatggttatgtaactcgattgcttcgttaaagaatagtgttagatcatggtggttcgatctaggaggcggacaaaagattttatttactgaatttcgttttgttatatgaaaaaaatctagttataaattaaggcgattttacttctacattcagaaagtacaaagtaacgtactagtgcgcctgaactctagctaaaacacattttatttatagaaacaacacattctctaatcctaaacccctgttgtgcagcctctgtttgagcctttagggttcagtcacgctgcgtactgcctatcgggttaccgggttccagctcgaaaagcaggaatatgaacggggtggtttttagtcagtaagagtctggcactccctcacgcttcgcccaaggtgagaaaagttatttgatgactctacccaccttaaaaaaagtaattctgtttcctgcgtaaaatttcaccgatggaagtggaaactatcgtatttttctatactcaactttttttctgatttatttcgttgtaggatccaagacagttattcaagtccctgggacgcgtcggacttcagtgttccggtgttttcattgttttatccactgtagatcttagcttactgtagatccttaggaggttttgtgaggttgtggcgtcgttatcccaaaaaaaacctaaacccctttcaaaactaaaacatagtttgctaattctagaacagctattgatatttgcaaggcttcctttacctagaacctgctatgatctatcagatatgacgagaaacaagtagtggctagggtattctagtcacatgaacacacgtgatgagcagcgcaatggagttcccacaagcaatggcctgctctatggaaatagtatggcggtttaagtcaatgtaggtaatacctaacctacgtggtgaagcgatacactctttatgattattacgtatctaaaagcataccatggtaccaccaaatatattattactttactaacttctaccagcgctcccgtgaaataaaaactatcctatcacccaagtcagctaataccctgactgtataccgcatttcatcaaaatcagttcaatagtttcagcgtgattgacggacaaatatccaaacgaattttcacatttgtaacattagagtcatgcctggtacactcagagatagacaaagatggcattgaccgcataatagaagtcatacctttttttttagggttggaaatcatgcagtgacttctcgcgccataggcaaggcgagagggagtgtcagactcttactgactaaaaaccaccccgttccttctcctgcttttcgagccggagccccggtaaacccgctaggtagtccgcagctccggatcaggcatcagccctactgggccccatctgtggtggtttgatggctctttgaggtacattttgatccctggagggtcttatgatatagtggacgagttcgtgggcccattaacaatatacgctgctatttatccggagctgcggactacctaacggatttaccggagctccgactcgagaaacaggagtaggaacggggtggtttttagtcagtaagaatctgaagaatttctccccttaaaaaaacaacgactgcctcgttggccgagtggttgcaagtgcgactgccgggcaaggggtctcgggttcgattcccgggtcgggcgaagtattactgggctttttttcggtttttcgaaaatttctcagtggtagcacggagtctggaaatgtgcccggtatatggcaataggctcaccacctattacatgggacttacaacataaattgtgaaaagtgggtgtaacacagtggcattacgtgccatgatgtgcacctctgcctaccccttcggggattaaaggcgtgacgatatgtatgtatgtatgtaatctaaaattctccaacgggcacccttttttggtgaaaaaaaaacaaaatacataataaatatacaacttcattggaatataaataacaaaccactatttatgtaatattatgttacagtacggcataatataattataaaccatatataatatgtttatataatacaattaactaatcacatggttttatatcacttttttccgttatacactattttatataacgctttatattcagggggtacgcagaggtccataatctctataccggtaacatcgggtttctttgaccctaagaggcaactttgaccctaattctataaccaataggaatccagaacaaagcgtttaatagtttttcattggtctaaaagtttgggtcaaagttaccccctaaggtcaaagaaacccgatcttacgttacgataaaaatgtattgctgttcgttagtctcgccaaaacttgagaacggctggaccgatttggcaaattttggtcttgaattatttgtggaagtccagggaaggtttaaaaggtgagaaaaaaatgtctgaggcggtacgaagtttgccaggtcagctaatataaaataaagttaaatttttacaagttttattagagtgggtacattttggactttgtgctaggaagtaacaaggttcaaaacctcttttactgactaggaaataaaatccaaagcccaaaacttctttctgcagactataagatacaattatttgttattctgcttgtatacaatcttattttttgattacgcaaaacttttccaccagagatatgttatgctattctacaagaaatgtaatagctaagcttagaaactatgtcaccgtttccactgatactaagcttggcgaggaagatgcgcagctcaagtatgccataatcgatagtagggaagacatttatatcacacatccacagatcacatctatagcgcgcatctttccaaaaaacagtttagctgaatcagttttcaccaatgctaaactgtgtaccaatgaatatgattggtggtatccaaacgcattaacagcaacgtagcatagcatatctccgatagaaaagcacagctattgaaaaagttggttcgtataaataactgacttgattccaataatttttataccatagtatattttgagacaatattataaaaaaaagtatacaagcgtttttaaatcttgtagcaggtttattacccaaaaaaaacctgttttgcataaacaaacatgactgttttatagaacccctaattcacaataaaacctaattttcgcgtaaaataaataagtacacacatacaaataaattaataagtatatacacgctatgattagactatcaccttaaagggataggcagaagtacggcacttactacgtatacagcatcaatagtattcacttgtcatttgatcacaatttggggcaaacaccatataccaggttaccacattttaatgcagatttcaaaattactataacattttttatggtataaaataatccggtaaacgagcagacggatcacctgacggtaagcaatcgctgccgcccatggacacttgaaacaccagaggcgttacaagtgcgttgccgacgttttgggggtctggaattttagcctcctaaatcccgatgtcctatgtatggaacatttaacataaagaattttgaactttattgttttttttaacctttagagccagggtacactcgtccctatataaccctctttcttcccttgtttcaattagtagcatggcggcatgtaagacgtgtggtggttcggaccatactcgaacaagttcaaaaaaatgtaaaaactatttaccacccataagaaaaaggaatctgagtgaatctacccaactagagatttataccgtcaaacgaggacttgcttcctgtctttgtccgctcttggatccagagaaaaaactcaaacttttgacagaaattcgacgggatgttcgcgatctctcacgagtctatatcgaactgggtgtttggtataattattatatgaagacaagcaccgaacttccacctaaaccagacgtgttgaatttcatctatgccatgaagggaaaaggaccctataataacgtatattctaccatgtttagtgagagaaaatttgacgataaacttcgctcatttgtggttcaagagatggcgaaacagtacgagactgtactacacacaaacatcagcacacacgcctactctagactggcccgctatttcaacgtgaagcgtaatgatccagcgttgttttcggctttcttcaagaaagtgctacccgacgataatgaagagatgcgtcgagtttgttctattatcaacgtggacactgtcggaggcgccaagtggtggtctactattccagaatggctcaaaattcaggcaaaacttgaagactttcgactatttccacaaccatcacatggactcaaacacattacctacacatccaggggttggcatgaattactgcgccgtgtagatccaaaatctattacgggcaattggcccaagatcattgatcatcgacgagaattatgggctccttggttagatattaacatgataaaatttgggtgtaccctacaaacagatggctttagcgtgagtctatcaatgagtcgcatcaaaagggagcctagtacgtcacaaccacagaaacgatcaaagaagagctatgatcgtatcatcgctgttgatcccggttccaggattcccgttgctgtggtggaatcgcgcaggttcaagtttcaacgtgtgacaaaaaaatatgtgcgctcacatacattggagtggaagcgtgcacgagtcaaagacaagttgtgtcgagtcagtgaggaggctgaacaaaaggctcgtgaaaagttggattttcccgtttcttctaaaaacatgagccatgtcgtggaatacacggtttttagaatgcactggttcaacgttcgtcaggaaccgtatgagaaatatgctaagctctcacgtttgaaactagacaagtatatccgtaccgctaaatgtgaagaaaaaataatcaaggaaatattcgatgatggctccaatactctagtgttgtatggtgctggaagtaaatttatgaacaaggcttctttcagcggtcgtaaattcaaacatgactcgctcatcaaacgtctacggagtaagcccaacattgatgtagcggtcgtagatgaacagtatacctcacaggcgtgttcttcgtgcaacgctacaactggacagtttcagaagattgtcatgaatcatcgactacgctggggagtttgcccaaactgcaacagcgagtttgaccgtgacaccaacgcagcgaagaacattttgatcaattatacacggtctaccctctgtaggccaggatgttccaccaatggagcatcgtagcctcctatatatttttgtatctcggtgtcaataaggttcaattttatccttggacttttttggtgtcgggatttaggaggttagagtggttgggattgggaaaattggaaagagggggtaattgggcccccgctaatctcactcacacaacgcaagcgttatttcacgtcggtttactgtgaggccgtggtatcactccggtcgagtcggcccattcgcgccgaaacatggctctctcacttaaaacatattttattttactggttaaaacaggataccgcgttgatatacaatacatacttgttaaattggtataaattatattatttaccctaattacattatacaggtggtattattttacggccgaagttaataaccaaccttatgtgacgtcctgcgtgagcgatctagaagcgaacgcgaagcgacgcggtgacacgcgaattcaacgcgatgcgatgctatgtcctatgtgcatgtgaatcgtttcgttttgtttcagtttctgacattatctatatattaatacgtgatgcaaaaactttggaccgctttttacgaaaattgcgcggacgtaggagcataaaatttggtacacttatagtttatgtgtaggagaagtgcagcacgcttatatttttttaaaataatggttataaagtacattaaatcaataaataaaacattacacacacatgcatagtatctgatcgtatttgacaaaacgtcaaaatctatagacattgcgatgatattctcacgtctcatatgaaaagagttttataaaaagagtttgtttgagtttgagttaaataaaaattatccttgaacgtatgttaagtggtattgtaaattaaatcgtatatggttgaatttcgaccactaggcgaccactagtaaacaaaaatgtgacggcaccgcgtccagttcgcgcgacaatatcaagccaattgatcgcgtccgcgcgatacattttgacagtttgtttttcgcaccgcgccacaccgtatcgcctttgcgtctagattgctgaccctggacgtcgcgttaatctaaaatatctgaatcgatcccagcttacaacatgttataaatcgatcttaagatatcgaatcttacgacatttcgtcagattgagatcgatttttttatttcgaactccatcgaatctcactatacgtttcaaaatgacatgaatcctaatttcattatacaggatgttcagacggcattattttatccagtctcactatacagcgtgttgtcaattttaacaatcctaatttcattatacattgtaaagacggcatacattgatgtgtttgactatacagggtgttggtgactatacagggtgttaacaaaattttaagaatcctaatttcattatacgttgtaaagacggcatacattgatgtgtttgactatacagggtgttgttaactatacaggatgttggtgactatacagggtgttgttgactatacagggtgttacgacggcatcatgccttggctcctcttccactgggcgccagacctgcggttgtggttggctctagctgacttgttcttctctttcttgtctctgttgtgaagaacctccttctcctgcccctggccacgtggcttgcctgttacgtccgtattcctgaaaattaaaaaagtattaagtgaagttttgttgaatattggttggaccaaaatatattattagttattacctaccgaatgaagtgaaagtcaaaacatttatttcaaataatcataaattaagcacttttgaaaagtcaaattgaagtccgtcagtgtgtctgtcagtaaagctataaagatgaaagtgaaaaaactaacttcattgcctaaaacttattgttatttcaaaatcaattttatatccatataaataaacaaatattaatgaatatatgtataattgtatacctaggctgtggtgcgggtcggttcccatgtccccgtccccgcctggcttgatagctcgcctccctgcgcgcgcgcatctcctccgggttcacacagaagtccatcttatttctactactactcggcttctcttcttctggaccttctggttcatcgtccgactcctcctgggagaagattatggttttataaataaaattatgataaatgataataaatgataaatgatattttatttctgtaaatagattataaaataacacttttacacgtcaatatttcaaatagctagatgaggccggcattttactttgaataagaaaaagactgctgacctgtggggtaattctgtgtacattaccagctctgtaataactattgtggcacctgtattagctttaatttttaataactgtattgatcgtggtgtgtttcctgatctcatgaagtatagtaaaataactccgttatttaaatcgggtagtacttctgaccccactaactttagacctatttcagtactacctacattcagtaaaatttttgaaaaaattattctaaatcagatgcaaagattttttaatagaaataaattattgcatggtaaccagtttggatttacaaggggtcgttcaacaactgatgccggtgttgaacttcttaatcacatatatgacgcgtgggaggactcgggggacgcattgggtgttttttgtgacttatccaaggcgttcgattgtgtccttcatgaaacactgatcaggaagctatcccattatggaatgcggggcaactctctggacctacttatctcttacttgagtaatagaattcagagagttgagattaacgggaaaatttctgccgggtctgttgttaggatgggtgttccgcaggggtcaattctcggtccgtttttatttcttatttatattaatgacttaccttaccttgtaaaggataaccatgggatagtactgtttgctgatgatacctctttattatttaaactcaaacgtggacaattagtcagtgatcatgtaaatagtgctctctcaaaaatagtacgctggtttagtgccaataacttgctacttaatgaatcaaaaactaaatgcattaaattcacaacaccaaatgttaggcatgtcaaaaccagcgtgctaatcaagggcggggagttggaccctgtagattcagctatctttttaggtataaccctagacgctaagctacagtgggccccacatatagataagttgtcgaaaaggctcagctcagcagcatatgccgttaaaaaaattagaaatttaactgatgtaaatacagcgcgtctagtatactttagttatttccatagtatcatgtcatatggtattctcctgtgggggaatgctgctgacattcagtctgtctttgtgctgcagaagcgagccattcgatcaatttataatcttagtccgaggcattctctcagggaactatttaaagaaattaatataatgactgttgcctctcaatatatctatgaaaatatagtgtatgctcataaaaacataaaattatttaaaaagtacagtgatatacacaatatcaacactagaaataaaaataaatatgttgttcctactactagacttaagaaaataagcggttcgtttagatgtcaatgtatacgcttttacaataaaattcccagccatattcaaagtttaaacctaggtaaatttaaaaatattattaaagaaaaactttgtagtaaagctttttataaaataaaagactacttggaggatagtcaggcttgggaatgaactgctataatgtccacacaggtcttgctgacatgtttgtaacatatagttacattttttatacaatttgacattaacataatttgacattgttttatatatatttttttccttttatatttttatatttccttttaaaattgttagtttgaggaccgtgtgagacttttgctagtcattttatttttagtaaattatattctgacagtttgagcatttgtgtggcctacccaaatgttcttttggttggtgttgttcgtcggatcattcagcaacagccgtcagctgagctgattgtaaactgacacatgcgtgctgccatctgaacaggtccgctcaaactgctgtggttctttcctcaaaagaccactacagaatcaacttgcacggttctccgacatctttaattgattttgtctggactttaaaagagactatgacctctgagtttgtttcggcatttcttctcagagtagtcagataggaaatgccggcctcatctagttatttaagagattgacgtgtaaaagtgttattttataacctatttgcaaaataaatatcatttatcatttatcatttatcatttatcatttatcatttatcatttatcatttcctatccgactactctgagaagaaatgccgaaacaaactcagaggtcatagtctcttttaaagtccagacaaaatcaattaaagatgtcggagtaccgtgcaagtttattctgtagtggtcttttgaggaaagaaccacagcagtttgagcggacctgttcagatggcagcacgcatgtgtcagtttacaatgagctcagctgacggctgttgctgaatgatccgacgaacaatacctaccaaaagaacatttgggtaggccacacaaatgctcacactgtcagaatataattaactaaaagtgaaatgactaggcaaactctcgcacggtcctcaaactaacaattttaaaaataatatgtgaaaacaaaaaaatatcgaatgatattaatgtatatcatgtcaaattgtataaaaatgtaacttgtgttacaaacatgtcaacatgacctgtgtggacattatagcggctcactcccaagcctgactatcatctaagtagtctttaattttataaaaagctttactatacagtttttctttaataacatttttaaatttattcaggctcaaactttgaatatcgctgggaattttattgtaaaagcgtatgcattgacatctgaacgaaccacttattttcttaagtctagtagtgggaacaatatatttgtttttatttctagtgtttatattatgtatatcacaatactttttgaataaattaatgtttttgtgagcatacactacattttcataaatgtattgagaaggaacagtcaatatattaatttctttaaataattccctaagagagtgcctcggactaagattataaattgatcgaatggctcttttctgcagcacaaagacagactgaatgtcagcagcatttccccacaggaggataccatatgacatgatactatgaaaataactaaagtatactaatcgcgctgtatttacatcggtcaaatttctaatttttttaacggcatatgctgcagagctgagtcttttcgacaacttatctacgtgtggagcccactgtagcttagcgtccagagttatacctaaaaagacagttgaatctacagggtccaactcctcgcccttgattagcacgctggttttcacatgtctaacatttggtgttgtgaatttaatgcatttagtttttgattcattaagtaataaattattggcactaaaccagcgtactatttttgagagagcactatttacatgatccctgactaattgtccacgtttgagtttaaacaataaagatgtatcatcagcaaacagtactatcccatggttatccttcacaaggtaaggtaaatcattaatataaataagaaagagaaacgggccgagaattgacccctgcggaacacccatcctaacaatagacccggaggaaacttttccgttaatgtcgactctctgaatcctatcactcaagtatgaaataagaagatccagagagctgccccgtattccataatgggatagcttcctgatcagtgtttcatgagagacacaatcgaacgccttggataagtcacaaaaaatacccaatgcgtcggccgagtcctcccatgcatcataaatgttattaagaagttcaacaccggcatcagttgttgaacgaccccttgtaaaaccaaactggtttccatgtaataatttatttctattaaagaatctttgcaactgatatagaataattttttcaaaaattttactgaatgtaggtagtactgaaataggtctaaagttagtggggtcagaagtactacccgatttaaataacggagttattttactattcttcatgagatcaggaaacacaccacgatcgacacagttattaaagattagagctaatacgggtgctacaatatctattacagagccggtaatgtacacagaattaccccacagatctgcagtctttttcttgttcaaggtatggaacgttttgacaatatctgtataatctatgtgttcgaaagagaagcctaaattgcaagctgcaacattttcttttagtaaagattctgcaactgtgggagatgagttcaaagacttagtagtggatacaggaacgtccgaaaagaagttttcaaatgcagctgcgacttctgcatccgatttaattacattattatcaattataagactaaattcactactcttctctttagacctccctgtttcactgttaataatactccaggtcgctttaattacattgtcactgttttttattttagagctcaagtataacgattttgcaattgagcaaacttttttaaataatttagaatatttctttacatattcactaaattcagttgtattaatatatgttccctcgttataaagttcatataggcgtttcctactcttatagatgccagtagttgcccattgattgaaagacgcattgccatgagctggtatggttttaggtgtgaaggtggacttaaactcggtatggtaaatgttaaaaaattcatcacacaagttattagaatttttattccttaataataaaggtattttgtcagtgagtttagatttgaaagtttcaatgcgtctttcagtctttgggttaacaataatatgtggtttcgacactttatttactttatttgttattgaaattaattgtccacaatgatctgaatcaagcaatgatattatttgtttattagttggtacaatgtcagtataaatattatctaggcaagtggcactagtaggagttatcctagtgggctccagaaacaggttcgtgaggttaaatgaggcaaataaacttacaatttttgtacttaaactagagttttccaacaaatttacattaaaatcgccacaagtaatgatgaatttatttgaactactgagtttatttagtacttcatctaatactgtttcaaaacagtcatacaaaccagtaggtggtctatacacacttaaaacaataaaccgctctaattccacacaggctatttcaacagtacgttcaacagagtaactaactatatccttgcgttctttaaatttaagtttgttgtttagtaaaattagtgaaccaccatgtatagcgttctccctgctgaacgagctaccaatctgatgattaccaaagttgaacattagttgatgagatttcaaccaatgttcagtaatgcacataatatcaatactattacaatttaaaaatagttctatttctaattccttactcaaaaaaccttgtatattttggtgaaccagattgataacattactgttatatttgcaagaggtggactctcttgtcttattttttaatttaaattatggggaatgtcaatactaatagaattattttgagctatgtcaatatttgaatgttgctcaataggagcaacctgtttagccaagtttttggctgttatattaataaaatatgatagcgacacagctatctgtcttaaataatacctggaaagatagtacctatctttcgtcaaatatacatatttaccaacataattgttggtgtcaataatatgtacatttgtgcaattgcataaattataatttatgcaattacacattgcaacatttaatttatatctatggttattttcttcctgtggcaagctattgctgtaaggtaatgtaaacaaaattatttgctttagtttaagtgctacaagtgaactatgatatttaagaaaattatttttattcaaactacctctatttgcacaaataattatgagggtagcatcatgattaaaattataattaataattctctccaaaatattaccaaaagtacagccgggcatacagtgatttattattgattgtccagggtatttacttgtcaataaggaacctaagtttttaccaatctcatcactgaagatcacaacattattgttattacagctatgagttatgagtaaatgcaatattttttttgtgttgccccacactaaaattttctcttgtgtcgtgggtgcgtttaccaacatacaagttcacatacacatgacacccagacccgaaacaatttgtggatcacacaaagagttgctccgtgcgggaatcgaatccgctacacgttgcgcgacagacggttgcctagccaccgcgttagttgaatcacaattttcctttcaatacatgtcatgtttaacttgaagcttgaatgttgctttcaatacatggtttatactagtaacaatttactaaaaatatgacattagtttttcagaaacatctctcctacctcttggtcccgatcgtactggcgcagcgccctcggagtgacgaagggtctccgcgcgtcctccgtgaggtccgctgtgggcgccacgccgtccgagtcgtacgtgtcgtcgtactcgtccgagtacagcgcctcctcgtcgcataccaaactggaacattggaatattcataacaataatgtaaatatggtctttgatgaacttggatcttggagatctaactggaccagcccactgtacagaaaatatgtatttatttattaaatactttattccatatacactgtgaaattgaatgccatgggtattctctgacaatcaaccattgggtattgcaaaacgatgaagtggtaggtgcaaagttacagaaaagaaagcctaatgtaaagaacagaagtactaccactcgtaaactttgattcgaattatctaggtactgttatctcatacgacaaaataaaaaatacgtgtctaatattttttcattacttaactgacggactaaatagatttttaattctcataccctgtcatcatccctattaaggataaaaaatccaaagcctcatacaaacagatgcataccggtttaacttcatagacctgaaaaacaacattaaataaaaaatctactcacttatacttgctataaatgtccaccatcttcttaacctcagacttatcatccagcatctccttaagatccttgtacttggacctccgcttgccgacgtggatcttggagacatccacatcatccctggtcatgatatcgaactggtctccatcgaacacgttcagccgagccacgcccgtctccaggaacttcttgtctaacggatcttcagggattattggtagcgactggtctaatgctgtgaataggggaaagaaacataaaatttctagttaaagttcttaatatctgatttaaaaaaatgtttggtttttttcatggaacacgccgacgtaaacgagcagaccgatcacctgatggtaagcaatcgccgccgccatggacacccgaaaccctagaggcgatacaagtgcgttgacggcctttttggggttaggaatttaagagttgttggggtatcggggattgggcagaggggtaattgggcttccggtaacctcactcacacaacgcaagcgttgtttcacgtcggttttctgtaaggccgtggtatctccggtcgagccggcccattcgtaccgaaacatggctctcccacacttgaataaatacaagatataaacacactcacctctcaaaggctcagccaaattatcttccaaaacactattaataaccctct

SEQ ID NO: 46 - DNA, 21746 bp, Spodoptera sp.
  source 1..21746: mol_type = other DNA
ttggttactggataattatttaatcgatatacataatataggtgttacactcatcgagattaaatgaaaaaccttattaacaaggcttttcaatcaattcttgaccatccagtacagtatcaacaatatcgggatttgtaattagtaaattaacaaaagttgttttgttttattttttcagtaaaaaagctgcgagtgatagcgatatattcggtatcagtcacgaccacgaggcaggcgcggacgtcggatcatcaggtcgagcatgcctgccgtcgctgttcgtgtaccgagtggccaacgggtgtgagcgacgcacagctcacaccgatggcgaatattacatcgactgcaaggtgtaccgagctaacgacgcgcgcaacaccgactcgctagagctatggaagaaggcaatcgtacggatcaagctccagaccgacatagactctcctcagtggcaaaaactgcaggagtttgtaaagtccgcagatgttttgttccccgacaaacctatattttacgataataaatagttatatgattttatttcaatgaatgttttattttttatttccctactacacattatgtgtgaaattatgcgtggctacacataattccacacatgtcatacagacacaattaaatatcataaggttatgtttatacacaactttacgatattgtattacgtgtgcatacgttccatgtccctgtttcagttagaacgtacgttgtacggaattatttgaatagtactaaacagatgataacgtttgttacttttttcgcgttaatatcgttaaccgagtcgaccgttcacgattgggcattctggaccacttttcgttcggcaaaattaaccgagtcgaccattaacgattgggcattctggaccacttgagcgaaggcgttcgccgagcgaaaagtggtccagaatgcccaatcatatactactgagtatgttttgattcgcttcgttgcaaccaagcgaggagcaaaaaccaagtctctgatccgagcggtcacacccaaggtgtatatacctgtattaccactcatagtcggagctcgatataggtatacgataaatagcacccttttgaaaacgagtcaacttctcacgtacataggaaaaaaagagtcgtattatttcatgacagaagatcgcttgattgtgagcatcaaacctacgatatttaaaatgaacttgtattcatccatgcaaaaaaaagaatttcttagtatgtttgaaccctctttaattatagattatggattatccttattgtatagaaacttgtacggattgcctctagagatggaccacgcaaaaacaatatatcaaacccagggtttgacaatgaattctacattatttatcgacttgcgttcgacttctgttaatgaacaatatgttgcgctttctagatgtaagaattatagaaaaataaaattgattttaccatcttaaactagtttttttattactttgaccctaatgatgaacttgtccctccggtagtaccggtcgtgcccgttgtcgcatctgttttggtactagaagaagtacccatgttactgctcttgcagccaacaataacaacgattactaggagtatcacaacggcccctccaacgacccaccaattgacagaggccatgtttgttctaagaaacctcgagtccgacatcttccttatacatattcatcctacgacttgttcgagtggtagttttagtttgaaaccacacattgtttttgttgaattgttggacatgtgcgggcattgactaaccgtctttgtaaaagactttttatttagaaaggtacttagaaatgcagacatgagagcgagaaaccccacaatcaagaatatcatgttaaaggtaatggaatataggaatagacaaacgacaaaggaaacgctcgccatagtttcagcgaaaattcccatttgaatctgacaattgttataaaccaaatgaaattttgaatcgttttcaaaattagtttgcatatatgctcgggcacagggcgtacataattcataaatggccaaaacttcgtcgttaaactctgctttcaaaacgttggtgattataggatcagaaggagcgcccggatgccaagtgcgttccccaaaggtaatatatgtatgacccaagagagggatacgactcacaccgcgtcgtttgatgatgaaaatttcactatccccgtgatttgtaaaaattctggaaacaataccccgttttgtttcgggccaatatttatccaatgcgtcttttatcaattcgggactataccgcattcttacccttgccgcatactttcgtgaaacaaagtcacgcgcgagttaaggaaccccaatctacacgtattagctttgtcagcaaataagtatttagtttattgttaagtgattgttttctagaatattccatagcccattcagcacttataataatctaggacgtgcgtcacatccgacaacgttttactatgtactacgttagcaataagttagtatataagatgagtataatattattttagacaattactgtattagctgtaactctggtcgaataaagttatttttttaactctttcgttgctggttacttaattggcgcagccggtaggatctctgtagtcagtctgtcgcgtatacaattctacgagaagcagccgacgtccgtttctacggttaagcagagatcaccgaacaaagaaatttattaagaagcccttgcaagtacgagagaggaccagccacagccaagcagtagttcagggatcatgaagatagctgcggaattgtgagtaaatcttttcaccttcctatcagttcttccttacatcctaaccttgtaataagtctatgtgtgtgtattattagggattggacaacgccgtaataatatttgcatagattttagttgtactgatagttagtataataacattttagtagcatatttgtgtcaattttttttctctttctctcaattttccagtgttattttaataacttttacacaatggaaagcataagccgtgtcccacaagaaatggttaaaataatacctgtattcagtggcgacgctagaacattacctttatatatcaaaaagtgcgaatacattttgactacattccaagggagcgtagctcaaaatgcatatttattccatgtagtatcaggcgaagcagccagtttggtaggcgaaagagactcaatagatacgtgggatgagctgaagaagttgttaaaccaacacttcggtgacccacgcacagaagattgcttagcaatggagttagaatcttgcagaattaataagggcgaaagttatttagatttttgtcatagattacagcatatgagaagtgctttatttgctaaaatatcggagactatcatggatgattctttacgtaaggcaaagcaaataatttatagtaacagggctatgaatgttttcttgtttaatttaccaccatttcttgtaagattagttcgtttgcgcgacattacaactttagaagatgcgttaaaaatagttttagaagaacaaaactttcagagtgtttatgattctaaaacaaacgatcgacgtaattttaacagaactaacaggcctaatttgtctaattttaatagtcaaactttttccagttttaataatcaaaacgtgtctaattttaatagccatataaacgattcgcataggatatcaagtacacatgtaccgaataatgctacgaatagtacgtttacgccaaacaattcgcatcagtttaggaattttaaacaacataataataatcaatataattttaatcgtagatttaataataactcgtcaccgcagttaactaggtcaccgtttccgattgctcaatcgagtcaacagttcgcgacacatgcaccgcgcatggcaccttttgcaacgcaagcatcgacgtcgggttcgaatactgatgtcaccatgcgtactgcgaattcgcgacgtgttaattatattaacaattatagtaataacgaacagaatacaagtaatatgaacaatgagtgccaggaattttcccctgaagatgccgaaacggaaaatttttgcataatggcctcaacactagagaacgaataaaaataaattgtaataaacgtttaaatttaccacatatagttataccagaattaaaagcagtttttatgatagatacgggaagtgtaaggtcttttataagcccgtatatagcgaataaatattttaaaaattatttacagtatgaacctttcgaagttgttagcactcacgcatcgagcgttcatagtgaaacagcgtttattccattaccagttacttttcgtagtcaggaattccataagttttatgtctatagtgttgacgataggtatgatgggttaatagggagtaatttgcttaaacaattacaggcaaagattaatatggaaaaccaaatattacatttaaaaaatactgatattcctatcatatactcaccgcctatgagagaggtatacaatttaccccctcgtagtgaactaagggtaagacttccggtcaacttattggacggggaagctgtgttagattttaagcagtttacagaagggattcgaatgcccgctgcattagttacgtgtgttaaaggttatgcaacaaccgttattcagaattacagtgaccaaaacagaaatttactggtgacagggccttttaaagtcgaaccttatatacagaacccatctattagcgttaattatacggaaaataatataaatatagaaaaactacttacaaataacttaaaaaaattacagttagaccacatgaatgtagaagaacgcaggttaattgagggactttgtaaggaatacaaagacatcttttattgtgaaaatattccgttaaccttcacaaaccaggttaagcattgtattagaactaagaatgaagacccaataaacaacaaagcacataggttacctcctactcaagcaaaggaaattaggagtcaggtcgaaaaaatgttaagggataatattatccaggaatcgcattctccctggagtgctcccgtacatttggtgcctaaaaagatagatgtaaatgtaaatcacagtggatgacaaataccccttacccaacattaacgacctatttgatatgttaggtaagagtacctacttcacaaccctcgatttagctagcgggtaccaccaattagaagtacaagagcaggatagagcgaaaaccgcgtttagtacaccttcaggccattacgaatttaacagaatgccatttggtctaaaaacagcacctgcaacttttcagcgagcgatggataatgtcttacgaggtcttcagggtttacattgcctagtctaccttgatgacgtcattatcttctctaaaagcttgccggaacatatagaaaagcttcgagcagtttttgaccgttttcgtcaaacaaacttaaaggttcaattagataagtcacatttcctcagaaaggaagtactgtacttaggtcatactattacgagtgagggtctgaaaccaaataatgataagatagatgcagtgcttaggtatcccattccagaaacggttacacaaattaaaagctttttaggacttatcggctattacaggaaattcattaaagatttcgctagagtaactagaccattaacagcttgtttaaagaaaggtcgtaaaattattattaatgacgaatataaaaaatgttttgagacatgtaaaaagcttttaacaaatgcacctttgttacaattccctgactttagtaaaacttttattttaactactgatgcatccaattttgcaatcggcgctgtattgtcacaaggaacagtaggctccgataagcctgtagcatatgctagtaggactttgagtgacacagaagttaaatatagcactatagagaaagagttgcttgccataatatgggcagttaaacactttagaccgtatttatatggtaacaaatttactatatttacagaccatagaccattagcatggctgtattcattaaaagaccccaatagtaagctcacgcgttggcgccttaggttagaagaatacgattatgatgttaaatataagaaagggccgcaaaacactaatgcagatgccttatctagaattaaaattaacgcaattgacgatgatttagattcaatatttgttaatgtaggagataggcaggcacgaatacacaaaatgatagaaagcgaattggatgaggttgaaactccaatagaaacgatagaactttcggattctgacgatggaataacagccaattcggtttcaaatagagaacacgaaggtattcctattttaaacgaagccattgatactaaaccaaaacagattttagtgcatccatggctcaaaaataaattacttgtaaaagatatttctaataataaacaaagaatcctagaagttcacttaccaatgaataataataatctagttaaagactttctaaaagaatatatagatcccatacataaatattttatatattttgaacatccagcctttagaaaatctttttcaaatatggtaattaagttatttaaaaaggattcagttaagttaacagagtgtacagaaagagtagtaaatttgacagaatctgaagaagatcaaaaggaagttatcttaaaatatcacgatgggaaaacatgtcatagaggcattaaagaaaccttagctaaacttaaaagatattattggtgggcaaatatgaaagagacagttacggcaatcataaatgcatgtgaaacatgtaaacgaatgaaatatgatagaaaaccaattaaaccccgtattcagttaacacaaacgcaggatagtccttttcaggaagtttttatggatttattgtatatagaaggaaaatattatttaaccatagttgatgcatttagtaaactggcacaagcaatagaggtaccaaatagaagtacaccggagatagttagagcgttaattaagtattttagtatgtatggactgcctagaaaaattagttgcgattccggtacagaattcaacaatacattgattaaagaaatgatgagcttatataagattgaacttcatatagggactccaaataatcctagttcaatggcaatagtagagaggttccattcaacaattatcgagatttatcgtttagctaaatatgataaaagcgatttagacgcagcatccgttatgatatatgctattatggcttataacaataccatacactcagcaacagattttacgccttttgaattagtatttggtcacacttattcagataatgtatttaacatagatagagaaaagagtctaactcagaaactattgttagatcataggaaacgtcttaaaatactttatgaattagtgacagaaaaattagaaacagataaaataaaagtaataaacaaaaaaggtggtgaaacaacaccagctcttaagacaggcgatactatttatatgaaagatactagagtgaggaaagctaaagaaaaaccacgatatgaaaaggcgaaagtaattggtgaagttgaacataatatagtgcctgtagaattaaagaaaagaacaactagagtagcgataaaaaatgtaaaacgtcctccacagatcgtgcctggtacttctggtactagtagcggcgacatacatgctggaccttcaaaacctcggacaaaatccggggatagcatcgctaaagatgggagtagcagtgaagaagaatagttattggactatatacaaaactatagatttggaatcagtaggtttacaaatagataataatattcgggattttagtaatctaaaaatgaaaattatagaaaatagattaagtaatgaaaccgtaggaatagaaaatcaaatagaatatctagctaagctaactaaagataggttttttcatattttaccttttcattatagaaacaaacgaggtttgtttaatccattaggctcattcgtaaaagctatttctggcaatttagacgaaaatgatgcaattaaatatgatagtgaaattcaaaggttacagaataaagagcatgtagtcgaacgtaaagtatcgtcaatgacaaaggcttttgataaattaataaatgactccgaaataataaatcaaaatattaaaaacttgggtttacatactgatgaactggaaaaattagttgaacaggagtttagatttaacaaacttttccatgtattaaatactatgtatcaaattttgagtaactttcgaacttgttatgaaaacataaaagagatcgagacggccatagcctttagcaaattaaatacattacaccaatccattataaatagcacagaattatataatacgttagaagtaattgctaaacatgctcgaacaatatatccggtaaaaaaaggtaatttaataaaattagaacgtaatattattcttaagtcatatataaataacaacaagttagttttcgttttagaagttcccctaatagataacgaaacatataattattacaaggttatacccattcctatattccattctccaaatacctatactattatacccaaatacccttatatgatggtgaatagattgaaatacatgcccgtagtaagcccatgtgttgagattgaaaatgacaaatttctttgcgctgataccaatgttgcccagtatccaactgagacctgcattgaacaaataatgttgctgaagaacgattacaaaagctgcatacagaaccatatcgaaatagaaaaaatcaagattcaaaaagtaaccaataatcaatggttggtttactcagaggagaatctcatcatcacggagaattgtaatgcagatatcctgaagtacactgttcttggaacttacatcgtgacacctggtcaacaatgtgaaacacaaataggtgatgtcatcgttaccgctaccacaaacgctacaggttccagccttcagctgccaaagatccagatgcctgagctgcaacagcacatccagagaaggttcaagaaagtggatctaagaaatgtggactttagtgatgtgaaagaagtgttacaaagtgcaaagtttagtgaaatagacgatacaactcaaatagtgacaatagaaattagtatatggaccattttcgtgtatatcatcattataatattaatagtcatttttataatatacaaatttcagttagtacatttttgtcgaaactctccgaaaccgtctgcgacgccttcggataatttctctcttggggagggaggagttaaggaaccccaatctacacgtattagctttgtcagcaaataagtatttagtttattgttaagtgattgttttctagaatattccatagcccattcagcacttataataatctaggacgtgcgtcacatccgacaacgttttactatgtactacgttagcaataagttagtatataagatgagtataatattattttagacaattactgtattagctgtaactctggtcgaataaagttatttttttaactctttcgttgctggttacttaattcgcgcgcccatttatattttaattttctaaaaccggagaatattcctctcctctctatttttcttccttccattcgaaggttttagaagaaaagagtcgcgcgcgaagctatcgctctttatatagaccttatcagtggatcccggggtccgaccaatcagagagcagcatttcgacggcccctggggcactgaatctagtggctcactccattagttaccgttgggagaacgagacgtgctcaattcgtcaatgaaaccaaacacatgttatcaattaaaaaaataccctttaacctcctaaatcccgatgtcctatgtatggaacatttaacataaagaattttgaactttattgttttttttaacctttagagccagggtacactcgtccctatataaccctctttcttcccttgtttcaattagtagcatggcggcatgtaagacgtgtggtggttcggaccatactcgaacaagttcaaaaaaatgtaaaaactatttaccacccataagaaaaaggaatctgagtgaatctacccaactagagatttataccgtcaaacgaggacttgcttcctgtctttgtccgctcttggatccagagaaaaaactcaaacttttgacagaaattcgacgggatgttcgcgatctctcacgagtctatatcgaactgggtgtttggtataattattatatgaagacaagcaccgaacttccacctaaaccagacgtgttgaatttcatctatgccatgaagggaaaaggaccctataataacgtatattctaccatgtttagtgagagaaaatttgacgataaacttcgctcatttgtggttcaagagatggcgaaacagtacgagactgtactacacacaaacatcagcacacacgcctactctagactggcccgctatttcaacgtgaagcgtaatgatccagcgttgttttcggctttcttcaagaaagtgctacccgacgataatgaagagatgcgtcgagtttgttctattatcaacgtggacactgtcggaggcgccaagtggtggtctactattccagaatggctcaaaattcaggcaaaacttgaagactttcgactatttccacaaccatcacatggactcaaacacattacctacacatccaggggttggcatgaattactgcgccgtgtagatccaaaatctattacgggcaattggcccaagatcattgatcatcgacgagaattatgggctccttggttagatattaacatgataaaatttgggtgtaccctacaaacagatggctttagcgtgaatctatcaatgagtcgcatcaaaagggagcctagtacgtcacaaccacagaaacgatcaaagaagagctatgatcgtatcatcgctgttgatcccggttccaggattcccgttgctgtggtggaatcgcgcaggttcaagtttcaacgtgtgacaaaaaaatatgtgcgctcacatacattggagtggaagcgtgcacgagtcaaagacaagttgtgtcgagtcagtgaggaggctgaacaaaaggctcgtgaaaagttggattttcccgtttcttctaaaaacatgagccatgtcgtggaatacacggtttttagaatgcactggttcaacgttcgtcaggaaccgtatgagaaacatgctaagctctcacgtttgaaactagacaagtatatccgtaccgctaaatgtgaagaaaaaataatcaaggaaatattcgatgatggctccaatactctagtgttgtatggtgctggaagtaaatttatgaacaaggcttctttcagcggtcgtaaattcaaacatgactcgctcatcaaacgtctacggagtaagcccaacattgatgtagcggtcgtagatgaacagtatacctcacaggcgtgttcttcgtgcaacgctacaactggacagtttcagaagattgtcatgaatcatcgactacgctggggagtttgcccaaactgcaacagcgagtttgaccgtgacaccaacgcagcgaagaacattttgatcaattatacacggtctaccctctgtaggccaggatgttccaccaatggagcatcgtagcctcctatatatttttgtatctcggtgtcaataaggttcaattttatccttggacttttttggtgtcgggatttaggaggttaattaattatcatccattcttttggcttgaataaacaggttgtatagcacaggagttagagtatttattcccgaacgatactccttcttggcgagtttgaacatttctatatataatgcagttttcgagcttctcttcatcgttagtagattggccataattttggtgtatgcagcatcgaccgttttatatttttttaaattgaacaacgaaaaaaaggtgggatatgtgagatttgggtatccatttttcgagtttgttcgacggcgggatttggccatcttatattattaccgttcaaaagatggatactgggagctcataagatgtctgatgtgcaaaatttgttcaaaacaaaaacgcttcaagcatatctgacttcaaaaccagacactgtaacaacagaggatggatttaaaaccgcgtttggttttgctaaaatctccctgctttggccattttattcgtattccactccggaattgggatggacctcttggcagtcgagggagcggacattcatagctcaaattaacctaggcggtaatatattcaactcagtttgggctgttttgaatacgacttttaatcggttcatgggtaaacccctgccaaaaactagagaaagtattctgggtgaattggttaaaatgcaacaagccatgactggtatattcttgtatgacaatgtgaaacgttacaaactgattggtatgcacgatagaacagacgactggcgttcgtttgcaatacagattcgtaaaagtcttcctaaatcatccaccaaatttaatgacaatttcaaattcattaaagcaaacgggcctgataaattcatttacgagtccccgagcttactagagtcattttcaatcgctagatatgtcgtcactggtgactctgaagttctcaatgtgctcaaaaagtatactctatccccaccgcctacaccggcaaagaaaagagcaaaccctccaataaattactttttaatatttggtttgctgggcgcaatcgtttcaattgtattattcatgacaaggggaacaacacgagtcgcggcacgaatacccatcatccgtcggccgcgacatccaccttcttatcagaggggcgtgggtatagcatatatataaaaaatagaaacaaaaaaatatatttttttatacatttatttcaagagaacatttttatttataacatttcaaaattataagtatataattcactttgtggagtagagtggacgaacccgtagatggtatcacccccgaatgttgaaatttccaaaacagttccatgggtatcactaaatcctttcaagcctttcaatttggtgttcacaataggaatcctttgccgatagtcgttaatcttgttgttggtctcgagcgtaggtggtggtgatgtcatcgagtaaatgatacatataacaatcatgtaacatatggatataatcatcgctacttctttacatataccgttgcagttttagtaacatacatgctcgttttatcagcaatagactcggccacaacaatcctgttttccgtctcccgaaacacgcgcttctcgactgttccttcggcaaactttacattttcctcaatgaacccgggacacgtcatcacctttgattgtactagagtttgtttgtaatgagacaaatcaatcggctgcggactctgaaacatttcgtagcgcgacgaatttatccgatattgaaaatgaagcgtgtaaccgtgttccacagtcttcattttaatgcggtcccaaaacgtaacctttttctcgcccattgctcgcggtggttatccgcacactgttgccgacgcgacgacggtctgcgcatcacaactgcgctctaaaaacagacggcgatagttctatctcatttatgtaatgtgcaacatctagaatatttgtattaaaattgttcattaattgcgcagcatgacgaatgttctttacgtgtacagaacgtgactcggacggattataattatttaatatgcgcagcaattttaatacatatgggacttttattttggaaatttccttttcaatttctgccattttttcattcttttccattaaatctcgacgaacagtttccaaggtgattggtttactcatcaactcgtcaatgcgctgaccacgcctattgatataaccgtccaatttttccatgatatttttcgtcttcttctctaaacggtctatggcttcatcctggggaatcgcgtcatccatctgcatttgtgatgtcagagtctgaagaatgtctccgtacactgtttctacgagtatggcaatctttaattgggtttcatccatcttcttaccattagcacagagtctcttgttacgacgtgaaaagaaaagaccattcagaatcggtgccgctgaaataaggataatagagcagtttggaaaagttttttctactcttgatttgcaccgcttcaatatatccagggtttagtttcatatatcccggggcgacgttatcgagacacaatacgggaaacggaagtggcaccgtatacattgccagcggaccacagtcgaaattatccaccacgctcacattgatggggaggatactctccgaagaaccaacgattaatccataacagccgccgggcaatatatatttatatttggaatatattttggatggaatctgaggaggtatttgtctgtctccatccatagccaagggtatcagactcatatccgcgggtgggtttggatcgttggtcaaaatctttccatccaataccacgctcaagaaatcatccacttgattgaccaattcctcgatggcgtcttcatcatcatcacagtggctggaatcaaaaatgggaatttccccaaaggcgctattctccttcaaagttttctggtcaaaaattgaaatttgtttgatattgaaaaaatatatccaagtcgttgaagttttttttccactgtgtaaccgtgtggtaaacattacttcatatcgctcacccaattgcaaatctagagccgattctagagccggtgatacgttacccgagcaaataatggttgaggtaaacattatgctagcgcgaacacatgcagaatactaaataaaatggacgcccggcgtatttattcagcgacttcaaattaccgcctcggcgcggagctagtacttgacgagcgcgcacattagagttttcattagagaacttccgggatctcgaacatacaaaccgattgtatacacgttcatacaaatcattcccaataaaactataattataatcaaggcaatattgagcattctcttaacataccccccggaccccgaaaggaaatgaataagaacttatggcggggtttcttcaaacgattatcaccacctctgtgggttatgcactagccagtttaatagattctggtacctatgtactgacgaccgctttcacgacagatattagactacaggcaaaagtaaaatttataacactggtagtgtttttgataacattacttggggttggggcgttgacctggtgaaatgaagatttctctgttggttggcgtacaattgtttaatattctatatatcttggaaagcttatctggaaaaggtttatctttgcgcatctttaagaatgttaatgtatttttatcgtctaccctaaactcagcaacccctttaatattaggtggagcatcgccccattgtattactagattattcaacttttggcctcgaagagcgtacaacatttggacatttacctccaattctatggtgtgaaattctttatatttgaatattatggtatcactaaacagcaaccatccgtcggtaggccactgggttttgttcgatgatgccaaatctaaaacttctccgtcgcgagggataggataaaaggtttgaatttgtaacgttgaagatagccgggaccaggtctgcattagttcgatggctttcaacacgggtatcgaaaagactataaactcgtttcggggatggagatcacctttggcatcgctaggaattaaaatgccgggaatccattgagcgggtttcaaaccaatcgactttacaggttgaaccataaaaggtatgtctataaccacaaaagaattttcaatcatctccatagtcatgacgtagatggctctaggtcgaggggaagcaaacaccccttcaaactgagtgacgaacccctttccaaaaacatataatatattgtgcataaatatcgctttgaaacgaactccatccaattttctggccttgaacgcgatagagtttagttttgtggctttattgggcaactctgtgaatcgacgcgaactattcaatggtgtttgagccacaatctcgataggatcaagattggataggtcggccgcgccgctcaatatttctagaaaaaattgtcgacccaaagcgttttcaatacagagtaaaagttgttccggactactttcatcgtcttcatattcaaacaatagttgcaatttttccttttcactgggtcccgttatggtatttaaaacgattctaaatttcgcactcggataatagacaaactgatggtgtgtcaatgggttgcacgggaccatgtgtttctgtgccaacaccgttacgcgttcaagagcggccgacatcaagggatggccaattaaatcgtattccactgcacgttgatgtctaatcaacaatatatcattgtcgtatacaattgccacatctttaatctccttgaacaactttaactgcaattgaaaaagggtttcttcggatattgaacgaatcacccaatcctcagaggcggtaatgccaaaagtatccaaaaatgtttgattttgttgagcgtagaggcgataatcggtcttgggcgatacaatttttgtccgtttcgtcgctctacctctttggtctagggtatatttcatttttttataatcctcgatggaaatgttgtcaatcaatatagagcattccgtttccagagtcgccgccatgacgtcacgcgctatttatattttaattttctaaaaccggagaatattcctctcctctctatttttcttccttcccattcgaaggtttcagaagaaaagagtcgcgcgcgaagctatcgctctttatataggccttatcagtggatcctggggtccgaccaatcagagagcggcatttcgatggcccctggaggcaccgacgaaaaggaatcagtccaatattggatgtgtcgatgaaaggacgtcttgccagagtaagaatatggatggattccttttctctattgcgagaataaaaaataccgaaaagcataaattttccaccaacccgtgttattcgttatcgcaacgtttttttagtcgaaacgaaggcgtttcttggaaaatgattataatgaacaacaaagttcaattaatcaaactagacaatttaacagttctcgttagtgtatcggtagagcttgagaatcgccccggattatattcattccacccacccacactgctaaaggatgattgtagaaaagttcaattagaactaccctttgattgttctatttcgacagacaatgcgtatactttgtgcatcaattattatcggataaatattcggcaatggttgatgccccaacaccaaattattcgagaagattcatacactgacgtatccaaggccgtgtccccagagtttgagtggatgatacggaatctaaacgaagagcccgttgagttgatctcatgcgacactaacacgtgagccggcagtcggctacgagaagccatggcgtgtaggtctcgctctcgcgacatgtcaaacaaccattttaaaaaaattcctcccgaactcgtttgggtgattgggcgacaattatctgaaggtgattttttcaatttcaaaacagcccttctgaagcaagaaccctcgaccctcttggatattccctttcttgggtccaatactctctgtccatatttatacaaagaggacaatgtgttcaaggtgggcgcagacaacactttcaaagtaattcaaaaggtgcgtttcaaggatcgctcatattcaatggtatttgaacgatattgcggcctgaagaaaatgacccttcccaagagaagaatgcttcagatcagatgtggggacgaatccgagttttctattccgattccgaagaacctggacttgtacgagtatagatttttggtaattgatggaatcacatatgcgacgtgtgccaaccttgaaactccaaaaatacccttgtctgatggaaattatctcatcaagatgggactctttcttcagaaaggatcggtacatcgatatccaaaacaagctcatctaccgcccgattcgttgaagccggtgctgaatcccaaccgatacgagtatttctccatatctctgacgacaaaatattcaacttttgaattgtatcggcgacagagaaaaataacgtcaagaaaatggtttgacccaagagattaggataagatgttattttttattctactcatggtcattggcgggacgaatggagattcatgttcaatcgcacaaacggcaatcatctctggactgcgagcagatttgacagagtgtgaggaaaatttgagtctcgtaaacactgaaatgaatagagccaaactcctgcccgtcattcatttggaagaattggtaatccaggctaatcgcaccgtcaggctcttggcggatattacaattgtacaaatttccaattatactgatgatttttacaataaaacaaaatcgtttgattttcccaattcccatttcctaacaacattggtgtttccgtatgccgatggacctgtagttttactttccccgaaagagtttacaaacgtggctcctctcctgggattcacatgtgatttgggcaagtatattctttccttggagatggacgagggtacgtgtgtggcgggaaaacattacacatggaatagtcttagaataggtgatccggaaacgtggacggagagtacacttgagtttggtgataaggatagtatgcgtttgacggtggcgtcactcgataagggtgcgctctttccagtctgtttatttgctcaggcggtgggcgcttgtaactcagtctttttcaaaacctctcgggtctcggactagctccgtcatggacatgcgtctggaagagaatcgaataaaaacatttgacacatggcccgttgcctttttgtctggaaaaatacttgccgagaatggtttctattacctcggtcgtggagatgatgtacgttgtgcattttgtaaagtagaactgaacgattgggagcgaggagacgatcctattaaacaccatcggcgatgggccccgcaatgctcgtttatacaaaaagggatcacatccaaggttcaattgtcacatcctcgatatgattccgaagcggctcgtttaaacagctttgtaggatggcaaaactcttttaaacaacgaccaaaagacttggccgaagctggatttttttacacgggccaaggggatttgacaatttgtttttattgcaatgggggtataaaaagttgggaaaaggaggatacgccttggaaagaacacacccgctggtttccccattgtgagtttgctcgtcgtatgagagatgaaaaggaccgaccatcttctctatcatcgactctatatgaccaatcgatatgtaaaatttgctacgaagaaaagtgcaacgtttgcttcacgccgtgtggacacgtcgtagcgtgtgtcaagtgtgcagttaaaacatacaaatgccctgtctgtcgaacccccaatgtgaatataatacgaatatatttttcataaaattttgtttattttcatctgttccctttcctggtcagcatgtgaatgattctttttcgtcagtgcctccaggggccgtcgaaatgcggctctctgattggtcggaccccaggatccactgataaggtctatataaagagcgatagcttcgcgcgcgactcttttcttctaaaaccttcgaatgggaaggaagaaaaatagagaggagaggaatattctccggttttagaaaattaaaatataaatagcgcgcgtgtgacgtcatgcagatggtctataatcgagcccaattcgacaagaataaaccgcctataactttttacatagcaattcgcgcgactgacttttgcagatggtctagaatcgaatcaatatgcgaaaaaagtgatacaccctcattacaagaataaaccgcctataactttttacatagcaattcgcgcgactgacttttgcagatggtctataatcgagcccaattcgacaagaacaaaccgcctataactttttaaatagcaattacgcgcgaccgacttttgcagatggtctataatgttttcaaatttcaatgtggtgttagtttcaaaatatcaagtcctttggttaaaaaactaatagacaagagtatggttccatatatcctcaaaacgaaaacaatcgaaacatattttaacgtcatgcctagtataaaaagccaggccctctcttgtcccgattctgaaattaacgtcttgttttctcaaaaatttggtattgagatgattaccgaactgggacgcagtcattgttctctatacatggagggggattcatgggataaacaagaaaaggaatttaaaaaattaattaaaactggtaaaggggaagtatttgaagatgtatacacaacaatgaacgcagcctattctcgttatacgagaaaggttttgccaaaagatagcaccaagttgattgaggtcctttcaaaaatacagtcttgtatgataggttactttatatattttcccgagtgtgctagcgatactctaagtactcgaactcgatacatattgccgggattcaaagttgacgattggcgagccatggccaagagttcatcaaagccggctccctatagcattgatcaatatgctgatgccatcttacaaaaaaaggggaatacaaaaaacctcattttcgaaaatcccagtctgtttgaagcgtttaatatattgaaattttatatgaaaaaaaacttcaagtttatggaagcgttgagtgattccggaaaagattatacccaaatatctacagcttatacaaaaaaaataacccctaaaagggtagcgttggccgtgagtgtttcgggtatcatcttggcccttttcctattctttttgaaatatctacgtaaacaaccagaggtaggacccgtccctctaccgcgtttcggacgacgtagaaattatcaaattgcaaactttgatgcatccgctcccgatcagagagccgtttccgttgcatttttataacattggcgctgacgtcacgcgctatttatattttaattttctaaaaccggagaatattcctctcctctctatttttcttccttcccattcgaaggttttagaagaaaagagtcgcgcgcgaagctatagctctttatataggccttatcagtggatcctggggtccgaccaatcagagagcagcatttcgatggcccctgggggcactggcaaaaatgaatcagattgatgccaaccgtgggaaaggaaagacggttaatcgcacgccaaccttccatgtatcaattctaggttcaaaagtcgatcgtttttcaagattgcatgaatccaatttgttatcaaatgaatttcttttttattcactattgaaaaaatacccccaacatatataggtaaagagggatatcgatctcggatataaaagctatcaatcacggtaaatggtatagtgtcaagacgccaagctctatttcccgacaccaatgttataacgtcatttgtgttaaaatcgcctgtaccgataaacgcataatcaatctttaaaa

SEQ ID NO: 47 - DNA, 21713 bp, Spodoptera sp.
  source 1..21713: mol_type = other DNA
aaataactttcattgtagacttctaataaaatcttatcactcacctgtcacttgtattgccagcaattgatgaacaatatgtcgtgcagtaatcttaaataggtcacgactgcttattttcttctttttataatatggcataagcagtttaaccacaagactggcaagatctaccttttcggccttttttgtagtagcttggttatctttagtcacatcacttttgatcttgtgtttactttctttgtggtgtgatttctcgtttttgtgtttttcccttgaggcctcctttgtctttcgttcaattttattttttttacttaagctaagtttgtgtttagattcatatttttccttaattttaggtggtgctgaagaggatagtaatttttcctccaggtctttctcaatatttgattcattttcagggagttcaggttcaggtggcagatctttaaacttcaatagtttttgcattattgcgtctgcttctaggcttagtttacgagctttattcaagttcatatcttcactatcgacttgaagcgaccctccagaactgttagatttattttcttcaatagtagagtcctgattgcttttcgtctcatcattctcatcgttaacattgctaagtactaaagtttcttctgcacttttgttaatgttataatcagtaccgtcgtcgattactaattctttttcagactcatcatctgattgcccaaataatgacgcaggttccacagaagtgccatttgtcttaggaacttgattgtttgattccttgacactatttttcgtagacggtttttttatatgattgcttttgctgtggcttgtcttaatttttttagatggcctagtttcgctatcgctatcggaagattccccaaacagggctttaattttcctttttgatggagatttacctttattcgttttacgatcggttttcattggcactttagggtcattttttactttttcaatttttttagtagtatcttgttcatccgtttcattgtctttaacgttttctttattggtttttggtataccctttaatgtaatattaatcacgaaggtatcagattcatgatcggacgagtgtttgtcaacgtctgctggttcgccttggacacctatagtttgattgtcatcagtgttggcaacttcatcattgatttcttttaacttaagtgtagtatcattactgtttgtgttcgaatcgttgatttcactgtttcttctgtctccactattttcatcaataacgagaccatttgcatcatcatcactttcattaggactattgttagaagattcctttgatgatttaacaaagaagctttttagttttgtctgtgtcataaggtctctcttaaaagagtttgcttttcgttttgtttctttatcggatttagataattgaatttcttttttattttccagttctgaaaaaactaaaatgtgttaaaacagtgatacagttaaaaatttacagaagccacttgtgttaccagtacatataacactgtttagagtgcaaaaacttacctaattgtgatgcagtaataaaaccgttttttgctctctgttgctcatattctttaacaaattccctgagtgtgttattttttttcggctcaaactcttttaactgtggataaatatggtccttgcatgcttttacggaagatatctgaaaatagtgattattgtattgttaaaattgcacgttgaagctgaaattaaggatttttagaattaatttctcaccaacttggacatcgctcgcctgtacaaacttatgaccgtactacacgagaatgcttcgtactccagttctatagcgcactgctctatgtcgtttttggaaagcggcttgtcgaagtggtcaatgtccttagtgctatgaaaattattatttaaggcatcggtaagtaatacgagatagccatctcggctcgctactgttaacccattaacctaaaacaaatattattttccaattaaagttacagtaaatacctaaatagaataatgaattagataactgtaaattgattagaatgacgtacgtaatgagcaaccatataaaaaatataagttgtcaaacgacgaagttcttacgacgtttataggtttgaagtaaaaacaacaaatgaggttttacatattttatcccatacttactttattgggtgtactttcagcagctttacatttcgaatgtttggcagattccgcatcattactagattttttatcttcagttcgctttttcctattagcaaattcttgcattataagagatttcgtttcctgcgcaattctacgacggttactttcaccatcggaatcaccactgtctcctccataatatgactcaacttccctaaaatgccagtaaaatatgaaaactcaattactgagtagtgagtatctaattgttatgtaatcaaataactggtagttatcaatcacaaagtgacatagatattttttatgaaatagtaataaaaacgtttactttttctgtcccagtcggccttccccgtagaggtctgacacgtcctggttaacaacgagtccgccggagcgtagctgtgccgacgaggcgcggcgctggtgctggtccagggcgcgccgcacgctgcgctcgtcgctgcacacgtcgcatcgcccgccgcacttcggaatctcctcaccgaaatactcagcaaaaaccttatgacgacacctaaacatcattaagaatatatagtgtataatttttttatgacagtcattaatgaatatgtacaataacttacttgatatcttcgcaatatttcaccataacttcaaagcttttgtaggcgaccttacacctatttttttgctcaggtgttttagagcgccctacttcacttttgagtaaaaaatcaacagcattgcgttcactgcggcagtagtaaatacggcaaaaagctggcttgccgtctcgaccagctctaccagattcctgttgtttaaacattgaggtagctatagacacatttacatgacactgttgtgtaggacatacgaaaaatatttgtatcaattttaagtttgcagcaagaagtaataggtacaattattataattaaataggtagatatttttaaaacacaatattggaatagcaaaagtttcttacttgataatacgcggcgacattttgggcgataccccagtgggcaacggcgcgcacgctcgctttatccactcccatgccgaacgacaccgttgcacacacgcaaggtacttcgccctgtgaccatttttcttgaactgatatacgttctgaagatttcatacctagaattttcagaagacatttttaagataatataataaatactagaccactaaacagatcctcagactaacccttagacactgaatatgaaaataagttgttgttttttcagacctgacaaagcctgatgattttaaaatttatgttacctaccctgtgaaaaaaatgtttgcatgattactaaatgtatttacaataactgtatcacactgataagttgtattatagacatgcattacatacaagtttaaaagttatcaaatcaggaaacattttttttttataatgtaggtagtacaattcatatgttttgtatacctaatttttttatattaagcacattttaaactgcttacctccatgataagctaaagacattaaacctcttttactcaacatattggctaaatcttcagtttgttctcgagttcgacaataaactatagcagcatttttatctttctgtaataaaacataatatagttattaggtaatatgtgaggacaggtgactgaactgaaaaatacttttttttaatcttacaggtttgacattttcattttcttcttttaaactttttttcaagaattccgttaagtggcccacttcatcatctatgcagttttgataaatcacatcatagaataaatttcttctgaaacttggtgttttatatagtgccacaggtaataacagcttgagattagataatatatcctttgccacttcagcacttgcagtagctgtaagggcaacccatggtacacttttatattgttctcggagattacctagctttaagtaatccggtctaaagtcatggccccattcactgacacaatgagcttcatcaacaacaacatatgatagctttttatatttcacaagatgctccatcagagatttaaatgtacctgtagcagcctgttcaggtgttacatataaaaatctagtgtttggtttcatgcttcttaaatcattaagaactctctctctatcttttgatgtcattttagaattaatagattcagcattaatttttattttagagaggtgatcaatttgatctttgatgagagccaacagtggggagaacacaatcgccactttattgtcctgcaacattgcaggcaactggaagcatagagactttccagagcctgtgggcattgaaacataaacatcgtgtactcctggaattaaaaaaaaactatgttagaactattctaaaagacatatctattctggatctggtagctattttggtagctcagtgtatgcagaatttgcaaagaatgaaacatattgcgtttaaataattttcgccgcctatttatctagataagtccttcaaactttagataaaatatctaagcttatacatcttacctcttgctatcgctctaattgcacgttcctgaagttcacttttgaactttcgatgaccaaaacactgaaacaatttttctgttacgttgtccattgtaaaagacttgaggcttctccgacgttaaaacaattagggcacgtatattgtgaaaacttttaaccatgtcaggtttgaagacatattttgtataaataaagtatttttatctaaataaataaagaaaaaacaacctcaaattattttgtatccaaaatacacaactgacaacgaaatgacattgattgattgagtgtgacagttgacatttcgactttcacataatgggaagttccaaaggctctaatagtacactgaaatggtatggagtagtcgaatttgtggtatttaaaaagaggtagaatttttctatttcttctactttgtttgatagggatcaagcctaaattcctaggttaggcaacgtgttgctgaatataaccattattgcgattcttaatattagtttatggagagttcctgaaggagggaagaggttgccggttgccagtacgttcaggaagaactgcttatatgtactgcaaaaacattgactatcccgtgtctactccgggaaacaaaatatttattttcctacgtacgtacgtacgtacctacgtacggaataaaaaggaaataatatataataatacggaaatacggaatataaacaagcaccctgaccctatttctcaagaaagtgcggaaaaatcctgtaagaagtattcatgactttttatgatattattagagtattatgtatttacttatttagcacctccttacttaccatgaaggaaaatgtcgtaagcaatgaagtgcaaaataaattaaaagttttaaattgcctattcaccttatcctcctaaatcccgatgtcctatgtatggaacatttaacataaagaattttgaactttattgttttttttaacctttagagccagggtacactcgtcccagggaatatgcataaaaaataaaatggcctgatttttttttccctaagcttttaaggtcgcagtattacactcaattcgttatttcctaatttaatatgcatttaattatttaaaacttaaatcaaaaagtgaaaaatttacgcgcgtaattcaaatttgtaaaacgcctcgtgacgtcatagggcacattatcgtcctgtcagtcagtcacgtgtaccaactcaactgtctgtcaaagtgtcaactcatggtagaggtacagcttgtgtttgagaactttgagagaaaaattggttgtatttctatactagcttagttttctaaaatagaaatatcaagcatcatcaatagcaatgacggacaacggttttgtgaaagcacagtcggataatcttccaaaaatagatgcatttatgatgaccacatattttgcgtcaaacccagattttacatctgctgaggttaaaggagtaaaagctgcaaggtaattattgtcaaacatggtatttttaaactagtaaacctgtttttatgcatacgtgcacttatttaattatttccctaaatataacctcaaatgttgtttacattcattatactttattaaaacacgtatgaattagattatacaatcaatcgcatgtttttatgagagtaggtaagtaagtaaacctagattattgtttattacaggtctcaacgagaatcatacggcgattcagctgtaggatatgtacaaattaaacgagaagggaacttatgtgtagtgaaagctcgcatcacaccagagcacaatgttcgtcagaagtcatatgcagtacaagctgtatgtgatgaagctgaagaaactgtaatttctgtggaatgtctggattgcgcagcacacttaggtacgatctcttttacttactttgtgtttgtggctgatgatatacttgttatctaagtaaaactcttgacagtcataagtcatatgtaaccataaagattgtcaaattattatgaagtcaagaacttatagcaccattaggttaaccattactaccagaatgatatattgtgtaaaaaacataattttattcttttgttttaggaggatgtaaacatgctattgcatttttagcatggcttcaccgacgtagtgaagatcctccaagtacaagcattgagtgttattggaaaaaatccaagctttcttcagttggtactagcttgaagtttattaaagcaaaagatatttgcaaagcacctaaagtgaatcccgcatcaaattcctcaagcactggcaattttttaacagtagtaaaaaataattgtgtgagtgttggtgatacaaataatcatctgatgaaattttatcaatctccaaacaatgcagagagactgtcgatccatcatttaattcttgcaagcaaggctacaaaccctgttgagtttgttgaatattgcaaactggtaatgagtacagaagcatgcgaacaagctgaattgataactaaagaccaaaatgactgtccattatggcatgagctaagatatggaagaatcacagcttctaaggcatatgaggctgcacattgtaaagttctggatggttccttaacggagaacatattgggagcaaccaaactaaaggacacagaagctatgaaaagggggcgatttttagaaagtcaggtattaaaagaagtagagaaaattaaacaaataaaaataaataagtgtggcttaaaattaaatgcggctcatcctataatgggggcttctccagatggggaaagtactgtgtacagcatagaaattaaatgcccatcatcagaaaaagcgttgagccgttatattgacagcaatagtgaagtggctccaaaatatatggcacaactacaacttcagatgcattttggaaataaaagtaagggtcttttttgtgttgctgacaataattttgaaacctctaagaaagtaaatattatagaggtggaatataaaaaacaactgtgtgaaacaataatagaaaaatgcacactgttttggcatcaagccattttcccaaaaataggtaaattgtaaaaacttgtacttttactttatctgaaataaaacaaatgcattcttaattcatttttttattaaaacatcctgaatatttaccaaaccacatgccaatgttattgcatcatcaatgacaggtattaaattatagtctacacaagcatgaggcagtaacatatgaaactctcttaatctatttattacacgttcaacatgaattctcaaagctgctattcgttttgactgctttacttcatctttggtgcttgggttggactgtgaaacagaaggtggccggacgagagtacagtctctggctcccagtaaatgtgataagtctttaaaccctctgtccgccataactgctttttttggaggtaagcagtctaagtaaccacagtcttgcactatcatgacatctgtagctcttccaccatatccatcggatataaaattaatcaacccatctggtgtacatgaaattaaatacttcaatgtattacattttttgtactgtgaccaagtaagtgattggtggactggatcggaaggtttttcaatctggatttcaaagcaatcaataatagaaataacatttgaatacctagctctaaatgatataggtaaatttttatatacctcagttggtgttggccacacaatcaagtctttcatttttgatgcgattaaaggtaaacttttattgaatattctactgatagtgctctgtgagtagccaaaatgtaaagcaagtatgccaaaagattcatttaacttcaatttcttaagtgttattaatatgtctacagttggaagtggaatgttttcacttaatagttttattaaatgatatgactgtttatgtaatcctagtaacattttgggttctctatctatggcacttaacatactactgcgcattacatttttaaaatgtttttcatcatctgaatctgctgattcatcttgcacacaataacttaagtcagatgagctacagggttcataatcatgagatatctgtgaagaaatggaagaaatagatgttgtatccgacttagtaggaaataaatttctttttaccgcagctgttgcaggttttattggtgaagttccaatattttgtgatggaaggggaacaggagataaagctacattagtcttctttgttgttaaattaacttgaacacttttacttctgaagtttggtctcatatttatttgcacacacttgtcactaaggaagttttctgtattagtagagacttcaacatgggatgtactgggctctattacagacaaatccataacagaggtactaggcctcactggatcattttcacagccttgaatataggaagtacttggtccggcatcacaataacttgtttgtgaagtttcacgttctaaaacattttcactgttgacttcaggttcggagaaagattcatttataagtgataatcttttcttcttagaatcatacattctctcctgtggtcctggtgcatttcgtttttggcattgaaatttatgaggcataactcctttatttaagaataatttaactttttcgccttgttccttcatgagcttgtatttaatataatttactgtatcttctttgatctgaaataaacacaacacttggtgaagcatcttaggataagtagaaatagctcagatgaagaatcttctaacatgttatgacattcgtaaataaggttacgaacttaaataaagttctgtaacctagaaatttctagaacactacaagatgttatttgtccaaatataatacttacattaaaatgatcttcacaacaatgtaaacgcgatattgaagatacattatattctcttcgcataacctcacaccattgtttacgtatgttcggatctctcggaacagcaaaaaacactttatctggtgtactttttatattgttaggacacattggtaccatgcaatatctataaaatggctttttttcttcttccatgattattacgcgtgttattatctatcaaactctcaatgtaaacaaacaatacaatgacaggtgtgccctatgacgtcacgcatcaagcgcgcgagaaataggagcgtttgaactcgtcaaattaaaccactatttttaaaattttataaaaaagtaattactactcttacagctatggtttattttttttctacatcaaaatgaagtgaaaattgaataaaaaaaataaaaaaattgtctgcatattccctattagtagcatggcggcatgtaagacgtgtggtggttcggaccatactcgaacaagttcaaaaaaatgtaaaaactatttaccacccataagaaaaaggaatctgagtgaatctacccaactagagatttataccgtcaaacgaggacttgcttcctgtctttgtccgctcttggatccagagaaaaaactcaaacttttgacagaaattcgacgggatgttcgcgatctctcacgagtctatatcgaactgggtgtttggtataattattatatgaagacaagcaccgaacttccacctaaaccagacgtgttgaatttcatctatgccatgaagggaaaaggaccctataataacgtatattctaccatgtttagtgagagaaaatttgacgataaacttcgctcatttgtggttcaagagatggcgaaacagtacgagactgtactacacacaaacatcagcacacacgcctactctagactggcccgctatttcaacgttaagcgtaatgatccggcgttgttttcggctttcttcaagaaagtgctacccgacgataatgaagagatgcgtcgagtttgttctattatcaacgtggacactgtcggaggcgccaagtggtggtctactattccagaatggctcaaaattcaggcaaaacttgaagactttcgactatttccacaaccatcacatggactcaaacacattacctacacatccaggggttggcatgaattactgcgccgtgtagatccaaaatctattacgggcaattggcccaagatcattgatcatcgacgagaattatgggctccttggttagatattaacatgataaaatttgggtgtaccctacaaacagatggctttagcgtgagtctatcaatgagtcgcatcaaaagggagcctagtacgtcacaaccacagaaacgatcaaagaagagctatgatcgtatcatcgctgttgatcccggttccaggattcccgttgctgtggtggaatcgcgcaggttcaagtttcaacgtgtgacaaaaaaatatgtgcgctcacatacattggagtggaagcgtgcacgagtcaaagacaagttgtgtcgagtcagtgaggaggctgaacaaaaggctcgtgaaaagttggattttcccgtttcttctaaaaacatgagccatgtcgtggaatacacggtttttagaatgcactggttcaacgttcgtcaggaaccgtatgagaaacatgctaagctctcacgtttgaaactagacaagtatatccgtaccgctaaatgtgaagaaaaaataatcaaggaaatattcgatgatggctccaatactctagtgttgtatggtgctggaagtaaatttatgaacaaggcttctttcagcggtcgtaaattcaaacatgactcgctcatcaaacgtctacggagtaagcccaacattgatgtagcggtcgtagatgaacagtatacctcacaggcgtgttcttcgtgcaacgctacaactggacagtttcagaagattgtcatgaatcatcgactacgctggggagtttgcccaaactgcaacagcgagtttgaccgtgacaccaacgcagcgaagaacattttgatcaattatacacggtctaccctctgtaggccaggatgttccaccaatggagcatcgtagcctcctatatatttttgtatctcggtgtcaataaggttcaattttatccttggacttttttggtgtcgggatttaggaggttaagcaagtatggcgattccgatccttctctgtatgaggagtggtttttgcccaatattgaaaacatcgtagtacagtcaacaacagtcaaccacaaattagaaatccgtacgtggaatttaaatagtaagtcataatgatcacgcgacacgcaatcaataaaaagagcgatgtgttttatgtaattccatttaatcgaaaaatcatttaatacttattatacttcaagattatacacgtaatttaagatcataacaatatgactttgcaaaaaaattaacaaggacaataatttatgtatctataaaataactaattaggtaaaacattattaaattgaaaattatatacataagtctaaggtacaatatcacaaaactcgactttaccttctattgttactcatttgatatgcttttaaacacgaaaaggtcatcttaacttatcgtgtatagcattttgttttaatacagccttatttaattaaacatagcatagtatgcgtgactgactgcttataatctagctgggaagataactagcaatgagtaatgacttttatataaattagtaattgttcgcagaaaaatcaagtttcgggcgctttcttcagcccactacggctgattacgtatcgcaactgaccctgagaccctgccgaggcgaagatattgttatttatcaagtcacaaatatacattccattttaaccacaaggtattttatacatagcaaatattctaatcctcttattcttcaatttatttgacattctatcaaatacgttcagtctacctttagtcatgcattaattataaaaataatttcttttatcttacttatacttaaaataaaaggaatacttcatagaaaataaaagaaatatcggcacagcaatcaatatgtctaacatttttgatcagtcaaaacatttacatatcaatctgtcaattatacagaaacaaattcataagaattggcaagtttttatcattttattgtagtattatttatagatataaacttaataattacattcatccagtttagatgatttagaagttttcagggaagaacatagatgaaaattttgcaaacaataggaaatgtgtgtacctcacttatctaaatattaacagtacacattttaattttctttcagtccgagtcaataatacacatttacttataaacaatttcaaaatttgcatcacattgcttaagaaacaaaaatagcacttgcagtgaaatttttgattccgacaacaaacagtgttttgtgaaaacacattttgggacttaagtaatagacacaaaccgatgtaatagtattagacataaataatgatatattttggtacaaaaaatgcattcacccttgtacatttcgtttctggatggtctttcagtcttactacagcaactaggcgacacgtgaatgttagatgctagttgctacatgcctttagtgtcggaagcgtggagcgcatctacgagccgtagacgagctggtagaggtgcgaggagtggtcagcgagcgcgtcgtcgggcgcgcgcaggtcggcggcgcggcccgccgaaagcacgagcacgcgcgcgcactgcagcacgccggccaggcggtgcgccaccagtaccacgctcgaccctccgaacgagcagcggatggcgtccaggatctgacgctccgcttcgttgtccaagttagccgtcgcctcgtctactagcagtatctgatgatcaaatcattcataataatccaacctagtccaaaatgtgtccatagaaaaataatacacatacaggaaaaaaatgctgtaaaccatcaaagattatttaagaattaacagaccaaattttttggatgaatcaattcatccaaaaattttgcttggtattatatgtgttcatgttcatataaatgatatatgtaaatgggaaagttgtagaatagtaccttaggtcggtgcagtaaagccctgaccacacagagtagctgcgcgtggccgcgcgacagcagtgcctgcgcggcgggcgcgtgcagtccgccgcgcgcgtgcacgaggtcgcgcgcgccgcacgcgtccagcgcgcgccacagctccgcgtccaggtactggcccagcgggtccacgttgtcgcgcaggctgcccgagaatatgaacggctcctgcgggatcacgcctatacgggacctgcaatcatcatcacacatggtctacattaccaatttatattaattttcttcttattgagatttcatatcctagctaaccagcgtactagcttatgtataagcttcataggattttgaagcggtcgaacaatgtaatttgtaattatacatatttacgtaatatacctgagtgagtgtaagtgcagtttcgagatgtcgactccatcaattaaaattcgtcctcgggcgagtggtgctaggcgaagcagtgcagtgaggagagagctcttccctgctcccgtgcgacccaccacgccaagcttctcaccgggatgcgtcgagaatgacacgccattcaaggccatcacaccattctcacgaccactataaataaaatgttacacttagtaataaaataactaaaataattcttaacttatcaagtgcatagtggtgaataccgagaaaatagccaatagttattacgaaagtagctattgaacaatacctacctatatttcaggaaaacatcttcaaattctataacaccttgtgaaggccagccgtatggcggtgagtcaccgtctataggttcactttccacctgcaacaattatgataaagatttgcatacagacagtaggtatttgtaggaaaatataagatcatctctacatcgcgtacataccgtcttgatgtactcgccgacgcgctccacggctatcatttcacgttcagtttccgtaaacgagtttagcaagttgctcagcatggacgtcattgacaatgcgtaggaaatggcgagaccgatgagtcctgcaaaaaatagcagaaatattgacttacgaatttcctgcttgtaatggtcttcagtactttcgtaaatagtacaaagtatcactaatatcattttacagaattagttcgagtgaggagtagcaatgacgaagagcgttagatacggtcgaattatatttatatagaaggaaggtggtaaagggtaaagatatcgaagcatatggatggtgaaggaggtggatatggacggagatgtatgatgataggcaaggtatcagacctgggtcggcggcgtgcatggtccgctgcagcacggcgagcagcgcggcggcggccacgacggcggcggcggcggcctgcaggcgcagcgccagccaggcggcggccgcgcccgcgcccagcgccgcgcgctgccacgcctccaccagctccgcgccgcgcgcgcaccacgcgccgcccgcgcccagcgcgcgcaccgtctgctgccctgtaccagcccacgcgacacttaatactgcttgcatgatatccacacgcacacacttaaaggcgggtccagacatgtatcatttgcccgatccgatcaccgtatccgatcaccgtatccgtatctgcgtttgtatcaagccccgtatcaagttttggacgcctccgatttgctccgtatccgtatcttcacaatagtcatgatcgcgtatcaaattgcttagttcagtttctgctctcgatcaaacatgtcgtcgcagttggttgaagtgtacgagaatttagcaatttcatgtgcctgttttattgtcattcacaatattctaacttcaaaaccaaaacagagacgatggtggcaaacggaattatttagaaacagatacagacttggaggaagagctttgatgagagacctaagatttcaatacataatgacgcgtcccgactgacccacgtccgtatctgtatcacctttgatgatcggacaaaaaccgacatgacatgggacgggccgtatcataacagtgtatcgagatcgcgtatcatgatacgcgtatcattccccgtccacatatgcgatcatgatacgcgtcgacgatacggatacggtgatcggatcgggcaaatgatacatgtctggacccgccttaacacgactacgtattttaggttatctacgaatggtcaggtttcataaaaaagcagatttgactattggagataaagttaagaagaagaaagttaccatctagtgtgtcactgaagtgagtgtagacgggcgagagcgtgacgctctgcagccgcttgagttgtcgcgaggtgacgcggtagaggcgctgcaggcggtagtacacgaacgtcagcggcaccacgcacaccaccagccacggcagcccgtacagcgtcaccgccaccgcgcctggaaccacaccacacacgttacttcgccattacccctcgtaaacagcaatcaagttttctacataatcttaattttgtaataaagtcattattacataataccaaaattacgatactcaccaattaatgaaaatgtttgagctaacaaaatgttcaatataaatggcaacgagtcatccactgtgtaagtatctgatgagaatctgttcacgatacgacccagtggtgttatatcgaagaacttcactttcgcctgaaacataaattaaatatttacaaaaagtatttgagttgagtgataattttttacaatattaaagtagaaaaaaatatactcaccttgataatgactttaagtagaaccttatgaattcttgtagctgctttcacgccaccataagcgaacaggaaggctcgcatgatcgtgaacactaaatttagtcccgccaatccaaaatatacttccaaataaaaattatctgtgtaagtcggcgtcacatttgctttcaagtcttgtagcagttgttccaccggtggcccttgctgggaagtcgtattttcaacatttttattttctagaagcattcttgttgcatttatgatggtatgtataacgttgtctatagccaagactccatgatccagaatgtttgtcttttccgtgggatgttctagaaactcggtatcttcgagtgtggttgagtttttagtcctgttcttgacccagtacgttagccaaaggaaggtaaagttttgtgatagttgcatgagaactaaggaaagtataatcgtgactgagaggaacgctcccaccgaccgtaggtacaagccaatgacccaccaaccaacagttccctgcgacattgattcctgttgaaagcagtaaaatatggaattattttatttatattttgggctaaatatagcaatactaaataagatactagaagaacatgtaagtcatcaaacctcgtcatccaagctgttcctgctgaccgtgtcattgttatcctgttcgggttccggtgcccgcggcggttcctctcccagggactccgactcactcggcagaaactcttcgatttcatttaatacagtttcagggggacctatagatattttatgacaatattatatgacacatccataggtcactgttacttatattaaaacatcttgaaaaattccttctatgtctgtttattgcttatataccttaccttgccttaatatgcgtccgtcctccatgagcagagtgtacgaggtgcgcgcgagatgcctgggagagtgcgccacgaatatccgcgtggtgtgtcgcagcaggcccagtatgcagcgctgcattatgtgcgccgccaccgccccgtccacgccggccagtacatcgtccagcaggtacactgcaaacatattatcttgtataacaatggccggccatacttatttattttctttattctgcgactatcaataattgacaggaatgttcgaatgacagtgattagtcggagtttaggactaatcctttataacatggtattctaatcgtaatcaaatgggagaagtgggtgttactagtgcatcttcactaaaaatctagtgttgaaatatgtgtaaaaatagaaaagatctaaattacaatacattatccacacattattgaagacttaagtgattatttatctgtaccttgcttatcctggtacactgcccgcgccagtgcaatgcgcgcccgctgtccaccgctcaacgtacaaccaccttcgcccacgtaggcgttccatccgataatgtttaagtcctctattttaagtaaataaacaaaaccatattagctgttacagaataataattttaaaacgttagagagataaaataaacaggatattataattacgggtaagtgcacaggcgtcaactacatttctgaacttagcttcttcatatggtttgccgaacagtatattatcgcggattgtaccacgtattagccagggcttctgggacacatatccaaaacctaaaataaatgaaatttgtgtcagttaagttcctcatgttaggtttccaactaaagttaattttaatacttactggtgagattctcaggtaattgtaagtaaccgcttttcttaatcatatcaccaatgatagcatgtagtagtgaggttttcccgctgccgacggcgccagtcactccgattaactcctcgttaccaatttctaaagaaatatctttcaacatgaacggctcatcctggatcaactgctcagatgaagatgttgaatcccgcctttgaatattgcccctagacagtctctttttagacttccccttatttttcttagatttctttggtggcctcttcctctttgaaggtttggcccacgagaacgtcgcgttcttgaatattattactttatcttcatcatggttcttattgagacggtcataataaagttcggcgtccatatctggaagctaaatttaaaaataaaacgtaattataacacatgaaatatgtatatgtagtactagctacttccgcgcggtttcacccgctctgctcggctcctattagtcatagcgtgatgttttatagcctatagccttcctcgataaatggactatccaacacaaaaagaattattcaaatcggaccagtagttccggagattagcgcgttcaaacaaacaaacaaacaatcaaacaaacaaactcatcagctttataatattagtatagatgagtaagaaataatttaagattactcacatccaacaacttttgtatacgttttatagacacccatgcctcagtaagcccgttcaatacccatgggaaggcatttagtggtgcgattaacatgttgattagagccactgtggtgaaaacctaaaatgcaatgaaaaaaggtttacaaacaaactaaccaagtttacacaatattattattatataatgttataaacgaacattattagcagtaaaatataccaaatacgtactgtaggagcatcaagaggtagtcctctaagcgagtgtgtgcctagtgtgaaggcggctacgagcactggcgtagtcgcccacaggaccacacatatcgcgtccagatacttgcggccgcgcagatatcgtaattcttgacctcgcgcctctaaaattacatgttagattaacatacatatgatcgccattatttctagtacgtcaagtatgaaattcaatttaaactctattagctgatttgattttagaagattcaattaacattactaacctgacactcgatttatgaagtagtcttcccaaacatgaaccttgactgttcttatacccttcagcaagtcacttattaagctgacacgagagtccttgtgtttcatcatttccgtgctgagttgtccaattttattggcaatgattttgttaattggtatcaaaataacagagaatgccacaccagctaggaacgatattccgacttgttggtacagaaggaataatgttatgaagagctgcaattacaacagacatgtcacgtcaattacacaataaggttatagtatttccagttaaaagtatgctatttatgtttcgtacctgtaaaggtatactccacaatgcatgaaaacttggacacgaatttacaattctgtccgtatcagtcgacatgaagttagtaatctcaccaatagagaacacgttattcagttctgtggaagtgacacttagcgtcttcctcagtatagtggcaacaatagcgccgcgcatcttcagacccacaattgacatgagccagttaaagtgcacattaaacagggcagatatcaaagtagcgcctagtagagatccagcatacacgtaactgcaattaaataaccaatgaaaatgtacatgatattaacataaataaaaaaaaaaaacaattattttgaacaatacttaccctaaatgttgatcaatactttcatcttcaacgaatttgataagataattgagaaggattggaccagcaaatccagccatgtcggaaactaatttgagtataccaatactgtagaattgtatgccaaaacatgaatgcaaagcccgcaatagtgtcacattctggcggcgcggggaacggactagtacccgtgttgtaggcgtcaccggggtagacgcttgtggtgccgtttctcctgttgcaccatatcctgcaaataattaatgacatagttatatacttttcattctaatttctacttaaaggtaaagagataagatcttatgttttccttccattgataattattattattaggaaaatacaaaccacaaattatctacttaaatataatttacaatgtacactatcaaagtgaaagatatctatgaatgttatctcatgattcattcatagatatctttcactttatttacagacctaaacaaagacatttacaatattgttcacatttacctgatcctataaaaggttcatgcggcacttcttcatactgctggtagttgtcaacattaccaattagtgctctatctatccgtgctcccacataagaacaacaatacttggctggcacatcaaacagttcctctggatcatttagtttattttcgaatcctacaaaataacaaagaatataactatgagttactaaaattaaataaaaacaaatactttccttatacttttccttctcctttcccaaatatcttaaaacccaattattctattgcaactgttcaaatcattcaaagtattggagttatattacatattaatataatataaacaaaaccttaagccagaacaaaagatgagtcacaaaagtacaacaaaagaataattcagtttttcttcattactagtttataactaacctttctgtagtagtgggtcaacccatgagaatgctagccttgatagacaaccagctccttgcatagcagtccccagtataccttcatccatgtgtggcagcaggggggtgtactcactctgttgacaaatttaccaccattaacatgaataggtaaattccaatctgaatctttaagatgaaaactcaaaaaacatcaagttacttattatagatattacatattataattttattattattgcaagcaataattttattattattacatatttgtttgttacctaattaactcaaatgcttatttatgacactggtttggtttctgtaatggtgtaataattgtgtgtaaacaataaataaacattaataaatatttattgaagttgtcaacttacatgtgtatgttgtgaaccgactagacatggtgaatagaatgtgggccttgagttacttgatgggagaagtgtcatgaaatacagtatgtggcagcacatggtagcaatgttgaaactcatagtgctcccagttattatactgctccgcagcgcaaccacattcacaaatactgctaagctccacattaacagctgagaagtgggtcctcgagcactttgtcccaatctgtgtttcagtgccaacacatagccg

SEQ ID NO: 48 - DNA, 21206 bp, unidentified
  source 1..21206: mol_type = other DNA
tgagttcctacgtcgtttcacaaaagcctgtgacgacaatgccataagtgaaggcatggctttttacatgctacaggagtttacgaagggagacctgcggacagaaattatgtccgtcatgcccagctcctcaagtggaggcgctgggaggtgacgtcctatttggagctcgtcaactggttgttgagagccatggttgatgaggcagcgttggcttctcaagtcgagaagtttacgcaagcccatcaggaagaggcggaggacgagttgtcctttgcggagcgagtccgtaagctcaacaatctttgtgggtttcttcatccacaagctgtggtgaagagtcggtttgtggagggactccattggtcagtccggatggagacccgggagcataacactgcccgggcgaccctggccgagttggtcaggttcgcctatcgcagaggcgaggcctaccgcaagttgcgggaggaacaacgccaggagcgtcaggccgagtggccaaggaacgggaggaggcgcgccaggccagagagttgagagaggcacgccgaatccgcaaggagagggtggtagctgccgtgggaacttcccagggtacctcttcgtcttccccagttgggaagacccctccgggaactgaccatcggtgttggaactgcaactccgatggacactgggcatatgactgccccaagttgagtaaacgcatccaacaacttgtaaggaatgcgagtaagaagtcggctacgagcgaagtacgttcacgccgcgagggtgggtctcgaccggtcgtcgcggtcgccacaccctcggcggaggaggcggacacgtcgtcctcggactcgtcgtcttcctccccgccctcagattcggacgccaagtcggcgggaaacgaatgaccgttggggctggtcgtccgaagctcacaacggcagcctcggccaagtgggccaggaggacgaaccaaccgtgccggatactgcggcgacctaagggagtccgccaacctcgggtaggactccccaagaacgaaaacccacgtcgggtgatcgcggtgctgacgggtgagaacttccaggtggctggacgggtgcagcttgcccccggccgtgcatgctgtacccgtatcgtacttgataccgggtcaggagcctccttgatacgcaagtcgctattaccaaaggaggtgaagctccaacgctggaggtccaaggctgaccatatgattgacatcaatggtggggtacttcccatcgttggtgccgtgaccctaccaactaggttggggacccatgaggtcgacgtgacctatggtgtagttgagaatatatcggtacccctgcttctgggtaccccttatgtcgtaacacaagtgcctttgatctgtggccccgagtactgggtcaagttgatgaatggggagactatccccatccttggtaagggaaagtctgtggctcctgtgacagtctcacagtcgaagcctgtttgctctgtgagggaagggtttactgctaccctgcgtttagcccgcaaagtcacgttgccccccaactcggtggcgcacgttgacgttgtaactgatttttcggggaacgggttggtgcaccctaacccccgtcttgctcgcaagcaccaagtgcatgttgcccttggcacgatggactccaaagccggagtcccgtggaggatccaggtgatgaacctgagtccgacgcccaagtacttcaagtcgggagccaagttcggctatatcgaccaacatgagggaccgatagtagcggtcaccctcaacgcgggcgcaagtagcgacccgaagtccggaaaggagaagcatcaagccaagtcggccacctctcctcggccccatgtgaacatggagggtgtcccccccaggttgagggttcaagttgaacgcctcttggaccaatatcacaagttgtgggatggtcaattgggactcatgagagctacccaacaccggatcgagttgaagcccggtgcaccccctatacgccaacaaccgtataggggaggaccccgttcaagggccctcgttaaggagcaagttgctcgcatggaggccctcgatgtgatcgaggccagcaacgccgagtgggcgagtccggtggttatcgtccccaaagttgatgggaccccccggttttgtatcgactaccgtaagctcaacgagagcacggtgaaggacagttatcccctacctaggatggatgactgtctggactctctgggggaggcgaacgtgttctctaccctggactgtaacgcggggtactggcaaattcccattgccccggaggacaggcataaaactacctttacctgtcactgtggtacctaccagtgcaaacgcctaccgtttggtctgtgtaacgcgccggcaactttccagcgcgctatggacatgattctggccggagtacggtggcagatctgtcttgtgtacctagacgatatcattgtgttctcccgaagtccggaggaacacattggccatcttggccaggtgttcaagctacttgctgacgccggtgtgtcactgaaggcgagtaagtgccacctcttcactcaagaggtggagtacttgggacatgttgtccgtccggggcgtctcagtgttaacgagaagaacttgagggccattcgtaaggctcagtaccccccggacccagacccagatgaggagcttcctcgggatgtgtaacgtgtaccgacgtttcaccaagggcttcgccaaggtggcgaagccgttgaatgagctagtgagctcgacgctaccgaagaacctgcctcccccaagtcgggtggagcaggaatcctttgagactcttcgggaccttctgctgaagccccccatcttggcaattcccaggttgggaggccactacatcctggatgtggacgctagctacgaccaacttggttgtgtgttgcttcagcagcagccggacaaggagtacttgccggtgggatactttagtaaggggctgaactcggccgagaagaactacggagtcaccgagttggaaggactcgcagtggtgtgggcggtgacgtcacttcgtcactacctggagggtgagaagttcctcatccgctgtgaccaccgcgcgttgcagttcatctttaagacggactgtacgaacactcgtctcaaccggtggagggtgcgactggcacccttcaactttgacattgagtaccgacctggcaggcaacatgcccttgccgatggcctctctcgggtacccaccgaggggctggacactaacccagttgatgaggacatccccattgtgggggtagtcacgcgctcgggtcaggcgttgaaccccgaggcgccagggaacaagaagtacttgcccctgtccctggacgaggtggtgaaggcccaggccgaggatcccttctgcaagtcgcagagaaatatactggatacggtggttgagacgcgcttctttctgggagacgatggcctcctcatgaggagggggtattccaggggactgaacaacttgtcgtccccgcatccctcaaggacagtatccttgagagggagcacaacgctcccacgggtggacacctggggtctagtaaactgtaccagaccctgaggaccaggtactactggccgtccatggtggtggacatctacagttaggtggctgcctgcacaagttgtgcacagaaccgtctgatggaacggcggcctagtacggctatgctactgttcccggccaaagagcccttcgccgcgttggcgatggacatccttgggccaccgcccgtgaccgaggagggcaaccagtacctcctggtcatctgtgaccgcttcacgaaacttacgcgagcgatcccactggcagagatcacggccatgtcggtcgtgtcagccttcctagatcactgggttgccgcgtatggcatcccagatagtacactatcggacaatggaccgcaatttgcgtctgtactgtttcagggagtgctggatatgttgggggttaaggcaaactatgccaccccctaccacccacaaactaatgggcaggtggagcgcttcaacaaaactattgttaggcagctgcgccactatgtgagtgagcacgtgaagacgtgggaccaatacatttctatccttactactgcctacaattcacaggttcactcatctacaggggaagtacccctcgcttttgtgaccccccgtcgcgtgcggtctattgccgtgcggcggtcgctcccaactagggaggatggtggcagtacgcctactcctactgagagtaaggcggagttcgccgctaggcttgaaaacctcatccctaaagtcagggctgagatggacaaagcacaaaagcgctacaagcgtacctttgacaaaaaggtgcgcaatgctaaacatgtccccgagcagggtgactgggtgctggtacactcgcacaccccaactgggggtaagctggtattccagacgaagggaccgtaccaggtccttcgtactgatgggcggcgcttcaccatcgaaagtgacgatggggtccgcacagtgaacggacaggacgtggtcaaagttgcaccaccgcctgcaggcgacccagcttgggcacgtgcgttggagtcgtggcgcctcccctcactgcctgcggccaaacagggcccgcaggagtacgtgttcgataagttcatcgaccacggatgggatgaagacactgaccgcctcatgttgagggtgcgttggtttggctacaaagccaaggacgatacatgggagtatgtggaggaccttcctgctgagaaggtccgggcgtactgtgcccggaatgagatagaccctaacagccctccctcaacgtgagggaaggccgagcaacagtgccacgagagtgcttcaagtcgaagtggtacgcagagtggcttttaactacagccctaaccctcacactctcacaacaaaggcagctgccagctaggcacgcatgctagactctcccactccacggcccttgccctcacgtggaggcgagcggcgatacccacgccgataacggtctccactagttggagggggcggcggctccaagtcggaaccgtcgcgcctctcacggtcgcgcaagtggcgccgaccgtggccactcttctgcctggtcttgcgcgcaagtttgcgacgcagacgctggacagactccgtctccgacggggtagaggactccgagacggagtaagccaactcgtcttccgacaaggagggagagcgccgagagtgtcggcgacgacggcgaggaggcgagtatgcccggctcgcgcgacgtttgccacgcccaagtggggctggctggggcataatagccccaatacgagccaactcggctgtcataaactccgccaccgactcgcaactcgcggtcgctactgcagtacgaacgcgctcctcaagttgaggagtctcggaactctgtagggttgcggtcgacgcggccaaccaggaaatggtgcgcaccaacgtggtgatcatcatctctgaggttagaggcgtgggcggcaacaccaacttggggtataccgtcaggagggtggcccccaagttgggggacaccggggtggaagactccacggccacgctgatcgggatgttcccgtgaggttggaaaggaacaggaggaagcggaggggcccgccgaggtggaggtacccgggtgtaactgcgaccccgacttggggctcccgcagtgggttgagtcatgtggtcatcataggacggcacggccataactatgggcttgtccgggggtggcgcagtgtggcgatccacccccggggcatacgggtagtccccgatgcccaacccctctcgtaggaccacacggccgtcgtgaagttcacgagcgacccacacgaactggcgaagtgcgccatcgtccttgggcccacgagtggggcggcgcaacttgtgctcaatgctctcccactcgataaacttatggagccggagcatctcctcaagtagagtgagttgtcctgatgagcacccctcagcaactagctgaggggtgagctgttccaaaccctggatgagccggagggggagatgccagagcatcccccgccgctgaacacaggacacccaggtcgacatgacctcgaggagccactgggtggccaacatggcccacaccaggtgatcaggggcagccgtcaacatgacggagccgaagtggtcaagcaaccggggcaacaacgccgggaacccgtaggggacctcaacttgaggccaccactcgggcttcttcggatagtactgctccttactggcagcagactgttgaggaaactcaagttgagccgaggtcaccaagtagggacctcgccggaagtctttctccatccgcacatcaaagtgatgagtgtgcggatcggcctcgtggaggtacggtgggcgagttgccacagtgtcccacgtgaaggtcggcaagtcgccgggacccgggatagttcccccgcggtccaccatggccttggcacgttggacgtcatcaacctcctcgtcgtccaggaaggcacactggtccgtcctgaagccggccgggaacccgaccctacggggatacttctcccgtaggcggtcccatacccggcccatcgctgcgccaagtcggccacagcgaagaacagtcaacccctcctcataaagaggccaagcggggtaaaaccaccgccccaaggcctcacgcgggacaacttgtcccgcctccgggggagaccccgccgtcaacccaaagccgggtgacgcgggagtcccatcccccggagcgatcgcggagcccccgccggaagtcccggcgggtgctgcaccgtaggaggtgtcctccatgcgctcgtcaagagagtccgtctccactcccggagtcgccatggctctccccaagttggggagagacgctctggctatcgcagcacgagacccgcctcgagttgagagggactcggatcgtgggtacacgggtggcctccccagcgtggggcggcccagtggaaggtgatggggaggtggtggtgatggtgaagtgtgaactgaggagagcaagctgccgagtgggcaagcttgaggagaggggcggtcaacgtgaccgcctccacatccgtgttacgtactcgatgggggacagcaagtcgcgcccccaacgccgagacgtgcgtttacgcaccccctcacagggccgaccgggtcggtcggaactgaggagaggggagtgtggcagtattgacccccaggtagcggggcaacacgtgccatgcaaggggcggcaggccactagcctgatccgttcctccccctgcatttgggtccatattccctaagtttaggatagttagcttagtagtaaatccaacttggatttgagggttttctgcatttatcgtcttgaattttcgtgtggcccggtgggcaggtgctggggtgggagattctgagtggcgagattctgaggggaccctggggggataaggggagggacagcggggcttggccctgcgtccccgtcccgaccaagaaactgttggaccacacaccatcttcttgtttgtccgtggggggtttgccccacaacagggacagagtgtgtgcgacttgcacttcttccggttcccccgacacgggaggcagccctggcacaccgccccaacttgggtaccgtgtgtgcttgtggtttttgccacacccgggtgcacccggaggtaaagtttatctctgtcccctgctgctccaccaaatgtggcataaaccactagcacacacggcacccaagctggggcggtgtgctagggctgcctcccgtgtcgggggaaccggaagaagtgcaagtcgcacacactctgtccctgttgtggggcaaaccccccacggacaaacaagaggatggtgtgtggtccaacagtttcttggtcgggacggggacgcagggccaagccccgctgtccctccccttatccccccagggtccactcagagtctcgccactccgaatctcccaccccagcacctgcccaccgggccacacgaaaattcaagacgataaatgcagaaaaccctcaaatccaagttggatttactactaagctaactatcctaaacttagggaatatggacccaaatgcagggggaggaacggatcaggctagtggcctgccgcccgttgcatggcacgtgttgcccccctacctgggggtcaatactgccacagctagggcggccggtcacggccgcgatcgctccacccgaagcggaggcacaggcggagaggccagcgtcggccaagcccgcctgctcgacggtggcggaagcgttctgcggcgccaaagcgggcgccgccgagcccaaagaacgcagcgtcgaatccgctgtgttggcgggagcgaccgtgccaacaaggtttgatacgagccatgcccgtttgctcgccgtgcgattcagcgctgcatccttctcagcgtgagcggctcgcaccctctgcacctccgcgtggagaaaatcaggcgatgcgccttggcacacgtggaaaaaaggttcaaggctcttgtgtccgttcttgttaaaagctacgcctttttctgatacgacgcgcttgaaaagcgtggggtccaacgcaacggtcttctgcgtgtggcccggacggcgacacttaagacacctgcagagaagcacagcatacgacagaaacaaaaaccagaagaggtgtatcaagtgtgtagcaaaaaagagaactgttcagcgcactgataaagaaaaaattgcctcatcatgtgtcctcctacaaccgccaccacacacacgttaagaagaaaataggaacatcacgaccgcacatcatgcggcacacacagtgctggtcctggcactgcgccccagtgtaaaaggcgtggccaacaggcaacgtgctcacgcacggctgttttccaaccaccatggagcactgcccaaaatagtgacccttgccgtcggtaccaacttttttgatggccgcacgccgcacacgcaggtgtcttcggaccagtctcagaagcacctgcggcagcgtccggatggccgatagtgggtccctgggagagagagggggagatggggagacggtatgctgcatttttcgaacaggtgcagaacacaaaagataaaaaacatatgcaggcatgccgcgtcaatcgaaatcccgcatggtcagaaagagttttgtcacacggatggggtaggatacccgcgtcccactcagctggagtcgtctgccaccatgacgcacctgtctcatggctcattgtactgacgggagtgagatcagttcatgcgatcgggcgtggagcaggtaagaaggtggtcggggctggggggttcaacactcgcaaaagagagcgcaggtgggggtgcgcgcgtgacggggacgccgggcgagaagaagtcggtcacgacgacggtcgagccgacgacggtggccgacgccgggcgctcctgctcaggcgtcccctagattggcgatcggtttgcggggatccctaaaaaacagttgtcgtcgaattggttggtttgtgcaaaacagtacgaagacgaatattacacacaagtgtgtaaactcgcatgtaccaaatgtgtacattccggatctgtgtacagcgtgtcgttttgagaacgtgctgttatggtgagggaaacatgtggccttgcatgttgcatggtacaaaatgcatgagctactttttggaggatgcacaatattagcgaagctcctctgggagagggacatcgatcttgtcacgctaacgccaattgattggtccacatatttgcaatgtcaaattgctcctggccacatgttgaatcggtttggctcgtgaggtacgatgccggacccgtcggtggtgtccagcggcctcgtcggggtggccttgtggtgcacgcagcgcttggggaggacgggcggcctagtagaagaggggggagaggactcggggtcacccagctgtggtgctcacccgccccctaaagacgccggctgtcttcgctatgacgccacccgtccacgggaggacgccgcccgcttcagcgacgacgacattgctggactgggcggcagcctccttgacgtgggctgccgctcgcagcactgccgactatgctggcgcctatggcaaagacgcgttgcggccactgcgcacggcccgcgtccaccgccatgtgcagtgtgaacggttcgcggccaaagtcgcacgggatctgagcggcggatatggtcgccgcatcgtggacggcaaggccgtcttggtggtgtggggggcagcagcgacgaggggtggggcgaccgccttgaaacgccacgtagcgcgggggtgcttcctcgccacccaagacgagtacaactcgtcgcaggcctgtgccgactgtcactttcggctggtgttcgtgtaccccaccgacctctccccggatgacaggcggcaggtcatcaacatggcgcagtgcgcggcgcaggcgcttggtgacgaagacggcaataagcgcaaggtgctagtgcgccggcgacgggcggccaaggagcgtcgcagatgcgacggccgcggggggtgctcctcacaagacctgacgcggcgaggaagggcagaggagggcgatgccggcgaggcgcgggagtggttggccgagattctggtcagtggcaagcgctctggcggctatgacatgccggcgtgctggtccgtgaagacgtgtgtcaaccccgaatgtggtcggctgtacctcaaccgggacaaagacgcggcgcgcaacatcgcgcaggtggcggtcagttcattgctggggcggtctaggtttccatttttccgcaactgtctccctcgtcggcctctggcggctacagcccagtggtgccgagacacggcatcggagtggcacccgccgtggtttgtgtcggacagtgctggtggtggcggtggaggcagtggcggtggaggcggtgaaggcggtggcggtggcggtggaggaggtggacgcggtgggggcggtggcggtactaccagctctgtctgggcgacgaccaaactcgtctcggtgagggctctggacggggccactgcctattcccgcacagcgacgagccctgccggcgacggcgggggcaattgtcgcacggttcatcagtgatagtgtaggaccctcttagagggcttcgctatatgccaatctagtgtctattctaccgtgggcatcatttgatgcccacggcatcaaagaatgcccagtttcaacctgtgtttccggtgtgttcccgacctctcagggcagttttgactgcagaatcggacgcagcgccgtctgtttgactttgggggaactcacgtgcgtccttgcctgctgagaactcgagtgtcacgagttttcccgcgcgcgccaacgatcctgcgggcacacacgttgtcctctcggggtggaccgctgcagccgccctgttggccccagcctgcaagaggggtgcccaacggcaacctggccgagcacgggtcacactcgctccgccacgcacagcctggcgctcaactggggatgcggcggggcagcaactggtgctttcctgtcactgcggatgcctgcgaggcattccgcgtggcgacgtgttgtcttgcaccgcgcgcgacggggcactctcgcgctccgcacagtcaccgctatcccttccacctcacccgcacccctccatccctgaacccccccccaccccctccccttgaccgtctctgcgtcgatctggccgagcggtgcaatccgtgcacctgtcgcctccccccctcccgccccccccccctctctctttcccccattctcccccccaagtcctttctggacgacgcctggcagtcgcgtgtgccgctcgacactcgtgacgggctgtcttcgggcggccctggcggccaaccccaagccatctcgtgatgggcaagcaggcggatgcgcggctggtggctggggcggcagtgcacaccaaggccacgtttgtgcatcactttgcggagtgcagtcgcttgtttggtgcgctggccggggctaagctggttcccggggtagtcgaggaggtggttcaaggaaccaagaatgggcggcggaccacgcgtctcgttgttgcgtggcagatgccggggcacctcgtgaccaaggaactggccctggccaacgtcaaggccggccccccccctttggcgggactgcatccccagccatccaacttacccccccagacctccacagctggcgtcgccgagacgttgccgccgggaggggcgggtgatgctggcgggctgggggaccccccctccctgacggcacgtccgttgccccagatccctctgacgcaggcgtcccaggccctgggaggaggcagcacggggggtggcgctggtgttccgtggtccagtcctgctgcaggtggccaccctgtcgtaaccgcacacgggtatgactggagcgtgcgcaccgcctccactggcgtgggagcgcctgtgcctcgcaaggactggtctgtgcgtaccctgcctggggaggtcatcttcccgaacggcgactccatcgggactggtgcgtcgcgcacccctctggactactttatggccatgttcccgatggaccagctcgtgcggatggtccggctgacgtgtacccagctacaggccaagggcttccctcccacgtcggccggtgagctactaaagctgtttggtgtcatcgtgctggccacgcgctttgagtttggagcccgggccgacctgtggtccaccaaggcacgaagcaagtacctggttgccccggctttcggccagcgtacggggatgccccgggcccgctttgacgccctctggtcctgtctcgtgttcagccagcagaccggtgcacccggggacacctccgagggcaaccggtggggcttggtccacgactgggtcaagtccttcaattcccatcgggactctcgggtcactccgagcgacttgatttgtgtggatgagtccatgtccaagtggtacgggcttgggggcgactggatcaatcgcggactgccaatgtacgtggcaattgaacgtaagccggagaatggctgcgagatccaaaatgcggcgtgcgggcgcagtgggatgatgatgagactgcacattgttacatccgcagagcatcaacgcgcccacgccgatgaggaggacgcggacattgggcatgggacggcggtccttaagcgcctggtcggcccctgggcgacgtcgggacgcatcgtgtgcgcagactcatattatgcgagcgtggaggcagcggtggtgctccgcggcatgggcttggggtttgtgggtgttgtgaagacggctactcgcggatacccaatgagcgagctgtcgcaactagagatggccgcacgcggcaaccacgcgacgtacgtccacacggggaacgacggggcggtggacttgatggctatcgtttgggtcgatcgcgaccgacgctacttcatcaccagtgcctgttcaagcgcccctggcacgcccatcgagcgcgtacggtgcaggcaggtcggagaccgatcggagcgcgtcgtgctgaaagtggcgcagcccaaggcggtggagctttactacggatgctgtgcgcaaatcgaccggcacaacaggtgccgccaggatgacctacgcctcgagcacaagatggggacgcacgactggtcactgcgcgtgaacctgaccatgttgggcatgtgtattgtggactcgtggttgctgtacgttggtgcccgaggtccaagacccacattgacccagaagcagtactacgaggacctggttaaagggcttattgacaacaacttcgacgtcatcggcgtccggtcgcgcgacgctggcagcgccgagattgaggcagaccagccgccatctttcggcgtgggctttcatttgaccccgacgaataagcggcgccattctggggcatccggttccggcgatcaccgggcgcagcgtgcctgcagcgtatgcaagcgcaagggcacctcctacgtgtgctctggatgccgacagaccccggcaggcgaggtatttttttgcggccccaagaccgggcgcatttgtttcgaggaccacttgagtgaggctcatgatgtggatttgtagttgagtagattttgtactgggaggagggaatgtttgtctgtgatgggggcacaatactcaacgtagtttgagctggcctggccattgcatcagcctatgtacggggtgccccttcatcgcccttccaacccctctctcgcgcgcacccggcccgaccgctgtctcgaggtcggcgggcgtggcgatggctgaagtccccatcgaggagccatccccccccgcacctaccaccctcggcgagtggcggcggcctacagtggaaatcccctttcctcccctcattccctcccccgcccgttggccgctgccgccggctgccgtggcaaggggaagggaggggatagagagccattgcgtaggccctcagagggggaggggatggtactggccgtgccgctagacgcggctgccgcggcgcgctcgcggctgctgctgctccagctggagctggcgccggccagcggcaatgccggcaacgcggccgcggcggcggcaggcagctggcggccaagagcggccgccacagaccccaccgcgtccgcggcggcagtgcacggcggccagggtagggggggggcgggggggggggggggaggcgggaggtgagagggattcccatcttttcagcccatgatgcgaatggtgggggtgctcggggggtgcaaaacagttgagcacacatcccaggtgtgagggtcagcgggaagggtgacaggccttcggctgacccgtcgaccggcctgtccagaaattcaatcaaggatgcctcgaccgcatcctctttccctgccacgaggcccagctcgaggatgccacctgacagacaggggcgtgtccgaagtcatttagggagggggccgacctgggccagttgatgacgttggagggcggggccagactctcgagagtccgctcgtacgcaggactccggtggcctcttcacaaggacgagagcaccctggaattgtcatggagggagtggtcgggggtcgcgtgtgctcccttcgtgaagcgtgatgctgtccgtgtcattctgttcgcctccctcgaccagtcaaaacccgcgcaagaagaggagatcggaagcagagggcacgcaaaaggtgcaaacatactgaaccgtcagcgagcgccgcgtcaatgtgcccaggacgcctgctactggccaaaaacggaagaagcgcttcacatgtatgcctccagaatgcgattttcctacgcaggcgacctagaatcggcgatcttggggtcccggatctcgggcatcatttgatgcccagccgggcatcatttgatgcccagatccggtagaatagacactaggggaggggggcttccattgatcttttagatacttagtacctaccaacagtcgcgctgaatgtaccatttttcgagcgcttgcgacctgactccgttcgatcttgatcaatcaagaaagaacttaggcagtaagcgaggccttccaatatgaactactatgatgaacagcgtattcagttgcatgaaaatagtaaagttttgatggattgcttcttcacaagcagggaccccgcatgtcagcaaacgggacgcggccactcgcacagccgcgccgcctcgcccgtgcgttctgtggggggagcccgggcttgccgcggtgccttccttcagcttcggcgtcgctgtcgacgacaagtggacgcagcagcttcgacagcgccagtcctgtgccgcttccgctggtgctgatacgccccatgtcgtcctcgggccggggtcatgaaaacggcggcagcagcagcagcggcggcggcacctcgcgcaagggagagcttggagacctgaaagagggccttcattcttcctccaataggacaaggagagatgcgctgcgcagggtcgttgcttgcatgaccgtcggcaaggacatgtcatcgctttttgccgacgtcctgcagtgcacccagacgcccagcgtggagctgaagaagctcgtctacctctacctggttcactacgcgtcggccaagccggaactcaccatcctaattgtgaacacgctgctgcgggatgcggcagaggagaaccctttgcttcgtgcacttgcgcttcggacaatggcttcgatgcgcgtggaccggatggctgaatacttggtcgagccgctccaccgggctttgtctacccccgacgcatacgtccgcaagacagccgcgctgtgtgtcgccaagatgtacggcaccaacccggcgcttacggtggaggagggcttcctggacaacttgaccgagttgctctctgacagcaacgccaccgttgttgttaatgcgattgcagcgctagccgagatatctgactcccgacctgggacgctctcccttactcccgcatccgtccgcacgtacatgtcagctctcggggagtgcaccgagtggggccaggtcactgtcatggacgcgctggctgactacactccagctgacgcggaagaggcggacgacctggtagaacatgtcctgccgcggctgcaacacgccaacgcggcggtggtactagctgctgtgcgcctgctactgcagctgttaaccgtggtgagcagcgtacccggcggcaacgcagcgcggcacacgtttgtataccgcaaaatggcgtcaccgctactgacgttgctctccgccaagccggaaatgcagtatgtggcgctgcgaaacatgagcatcctcgttcgtgcgcgcccggcagtgctggcgggcaacgtgcgcgcatttttctgcaagtacaacgacccgctctatgtcaaggtggagaagttagagctgatggtctgcttgaccgcgcccgaggatgctgtagcagtactagccgaactgcgtgagtacgccaacgaagtggatgtgtcttttgtgagccgcgcgatcaatgccatgggtcaggtggcgctgggcgcagccgaatcgacgacgaccgaccggggggttgatgcgctgattaacctgctgacccgacctctgccgcacgtggtgcagcccgccgttcttgcgttgcgggatgtgttccggcgccatccgggacggtatggccgccacgttgcggctattgcgacagactcagttgctgacgtgctggatgacgcagacgccaaggcggcccttgcgtggatactgggcgagtatgcagacgtcgcggacggggcgctgacccggctgcgcgcttgtgctgatgcgctagttgacgagtctccagcagtgcagctgtgcgtgctttccgcgtctgtcaaatgtcttctgcggcggccgtcggacagggtcgcccagacgcttgcgtcggatgtggtgcgcttctgcatgtcccaatctgaatcggttgacgtgcgcgatcggggcttcttgtatgcccgactattgcaggctgtttctggttctggagcggatgcggatggaagcggcgcggggagcgcaggcgcgaatagggaacgagtgcggcgtgtggtgctggccaacaagcctgcatcatctggagcggccgatgagctccccgctgagctagtggaggagcttttggggcacttgtccacactcgcagccatctatcactggcccgtgcacgcgattcagggtgtgagggcgggcactgcagtcaaggcacgaacctctgccggagatggggtgagtgatcttctgtttggtggtggcggggttgcggagctcagccagaccagatctgacggccctgatgccactgctgacggccttggtggtgcggcgtcatcatccaaggccgttgccacgtggggcccacccggagcagacgacttcttcggcctggccggcccttccagccaagcggtggttcctgtcgcgccatcgtcttccagcgggcctgtggcttcttcgtctgcacttactctactggacgagctgctgggtacagacgggggcggcggagcgagtggtggagtcagtggcggcggtggtggcgtcgccggtggctcggacctgttgcaactgaccgacgcgtcgcacgcgcaagcccccgcgccaacaggcgcgccggcgccggcctcaagcgcggccgcgcaccagagacggccgccttttgccggaaaggtcgctgcggcttccgccattggagggaagccgctgggggacccgtttggtgtctcccctcccccccctcctgagcagtctaccgatgctcttgactcttcgttgcctgctgacgttcggcaggtggtgctcatcaacggcgctcaagggcgaggccttgtcgtccacggtggtttttctgccgcagccgccaatggtgcggcggtggcggccaccctttggcttgctatcgccaaccacagcgctggcccggtcgacggctttgccgttcaggtgaactccaacctgtttgggctgtccccggctgcaggggcactggctggtcagcccgccttacccgcgggcggcactgttacgctgcaggtgcccatgcacgcgacggggacggccacggttggcagcgggattggcacgcctgcaggggcagccaaggctttgactgtgcaggtggcgcttaaggtgcgccccgtaggtgtgctctactttgccgaccgcctcgcaagacgtgtcgcgtcgctcttccccgacgggagcgcgctgcccaagcgcgccttcctggcggcctggtcctctgtacgagacgacgcagagattgccgtgccggtcgtggtgcggctcccgatggctggctcgccaccagagggtagcgcagccgccgccgcgtcggcggccgtcgtgtcggcactctccgaagcgcggctcttccttgtggcccgccgcacggtggggagcgcgcaggtcatgtacttcgcgtcacggctgccgccagccgtgacggtgctggccgaggtatccgtgccccccgttggaggggggggcgccgggggggttcccgccaagctggccattcgtgtggctggggcgtcgagtccgcaggtgtgcacgcttctgtcccaggccgtggcctcgggtgtccagcagttgttgaccaagggctgagcgcgtaacccgccgcaacaacgaaagaggcgagtgacagcaggggcagcaaccgtggccaagttcgcacaggtcccgcgacggacacagggggtagagcgggacgggccgccacgtgtttgaatttcatgttttgttttgaatacgacacgtggatagcatcttgtcaacattatggccaagtggccaagttttgattggtcaacaactttgactccgacttccggcggcgtgtcacgctggacgctgacgttcgccggcggtcgccgagcgccttgccattggggggacaaacgcgtggtccttgtccccttctggtggcgccggactgctgtggtcttctcaccgctcgtccctcgtttctgcctgccgtcttccacctcgtccgcgctctattcttttccatcctagacaccgtatgtcctccgccgctccccttccttcttacccctcctctccccctcacccccccgcctgccccctcctgccccctctctgttgagcgatgtcgttcctttttggcagcggcggtagccgcgacggtgacgacggcgccgccccccccccgccccccaccgacgacctctcctccttttctcccgacgcgcccgaggcggactcccccttctccctgggcggctctgcctttgccggcgacgccgacgacctggacggcggcggcggcacggttgacgcgtacagctcggcggggctgtcctcattgggcggcgccgctgatgggggcctctttggcgccccctccaccggcgggtccctgtcgggcggcgggggtggcctgggggggggctcttccggcgccacgtcggcagctggggaggactccccgctaccacccatccggctcgacgtgggcgccctggacctgtcgccgtccttccccctcgacggcggggacgtggactacctcttcctcgacgcccccggcggcgggggcgtgcggaaaaagtcgtggtcggagcagctcacctacatggccggcttggcctacctcaccggcggcgctgcgggggtggccgccggcgcccgggcggggctggtcgcgtcggcgggcaagccccgcaagctccgcatcaacgcggtgctcaacgcggcgggccgccgtggcgcgctggccgccaacagcgcggcggtgctggcggtgctgtttagtgcggccgagacggcagcgtacggggcggcagaggaggacggggcggccaactatgcggccgcgggggcggtggcggggggggtgtttaaaagcacccgcggcgttcgcgtggcgggcgcgtgggccctggggggggccgccctgggcctggcgggcgtctacgcgtcccgccagggcgtgtacgggcggggcatgcggggggcactctgagcggcgtcgtggcggagtgtggtttggaggggaggcctgcggtggccggcgttttggggggggaggccggagggggggcgggtactgtagagctgcgtgtgtccctgtgcacccctccccgcccttaccctcatccccctccccccgtccaagcgcgcttcttctattagttgctctcctttttgtggtgccccgcaaggccccatccactgttgtcattttttttctccattcacgctacgccttacgggtgccacaccccttggctctgtgcctgccgcccaccggcagtcggtgcgcccgtgccgccccccacctccatctttcctccccgtcatcccccacggccaccgtgacggtcactggcggcgttctcgcttccagcggatttgatccggtggaccttttttcgatttggctgtggcggaaacctacgccctccccagcccccgcccacgacgcgcggcggcttgaagaggcctcgcctggcagtctggtcggcacgcgctgctgcgggcaagtagaaccacgcccgtggtcgcgctccctgtcgctgccgcccctcctgcgtcttgttcgcgggggcggcc

SEQ ID NO: 49 - DNA, 20786 bp, unidentified
  source 1..20786: mol_type = other DNA
cgatggcgcacttcgccagttcgtctgggtcggtcgtgaacttcacgacggccgtgtggtccttcgagaggggttgggcatcggggaatacccgtatgccccgggggtggatcgccacactgcgccgcccccggacaaggcaatcgtgatagcggtgccctctcacgatgactacatgactcaacccactgcgggggccccgaggaggggtcgcagttacactcgggcactgccaactcggcgtgcccctccgcttcctcctgtccctttccaaccgcacggggacatcccgataagcgttgccgttgagtcgtctaccccggtgtcccccaacttgggggccaccctcttgacggtttttgcccaagttggtgttgccggccacgccattgacctcagagatgatgatcgccacgttggtgcgcaccatttcttggttggccgcgtcgaccgcaacccttcaagtttccgagactcctcaacttgaggagcgcattcgtactgcggcggcgaccgcgagttgggagtcggtggcggggtttatgacgaccgagctggctcgtattgggtctattgtgccccagccagccctacttgggcgtggcaagcgtcgggcgagccgggcatactcgcctcctcgccgtcgtcgccgtcactcgcggcgttctgcctccgtgtcggaagacgagttgtcttattccgtctcggagtcctataccccgtcggagtcggagtcggtccggcgtctgcgtcaccaacttgcgcgcaagaccaagcagaagggtagccgtggtcgtcgccacttgcgcgaccgtaagaggcgcgacggtttcgacttggagctgccgcccccgccgactggttgggaacgttatcggcgtgggtctcgccgctcgcctccacgtgagggcgagggccgtggggttggagagtctagcatgggtgcctagttggcacctgcctttgttgtgagagtgtgagggttaggactgtagctaaaagccactctgcgtaccacttcgacttgaagcactctcttggcacggtcactcggccttccctcacgttgagggagggctgtcagggtctatatcattccgggcgcagtatgcccggaccttctcagcgggaaggtcctccacgtattcccacgtgtcattcttggccttagagccaaaccaacgcaccctcagcatgaggcggttagtgtcctcatcccacccgtgatcgatgaacttatcgaacacgtactcctgcgggccctgtttggccgcaggtagcgaaggaaggcgccacgctttcagcgcacgcggccaagccgggtcgcctgcaggaggtggtgcaacgtttaccacgtcctgtccgttcactgtgcggaccccatcgtcactttcgacggtgaatcgccgtccatctgtacgaaggacctggtatggcccttcgtctggaacaccaatttacccccagttggggtgcgtgagtgtgccagtacccagtcaccctgctcggggacatgcttagcattgcgcacctttttgtcaaaggtacgcttgtagcgcttttgtgctttgtccatctcagccctgactttagggatgagtttttcaagcctagcagcgaactccgccttgctctcagtaggagtaggcgtactgccaccatcctccctagttgggagcggccgccgcacggcaatagactgcacgcgacggggggtcacaaaagcgaggggtacttccccggtggatgagtgaacctgcgaattgtaggcagtcgtaagaatagaaatgtattggtcccacgttttcacgtgctcactcacatagtggcgcagctgccgaacaatagttttgttgaagcgctccacctgcccattagtttgtgggtggtagggggtggcatagtttgcctgaaaccccaacatatccagcactccctgaaacagtacggacgcaaattgcggtccgttgtccgatagtgtactctccgggattccatacgcggcaacccagtgatctaggaaggctgacacgaccgacatggccgtgatctctgccagagggatcgctcgcgtaagtttcgtgaagcgatcgcagatgaccaggaggtactggttgccctcctcggtcactggcaggggcccaaggatgtccattgccaacgcggcaaagggctccttggccgggaacagcaacatagccgtagtaggccgccgttccatcagacggttctgcgcacaacttgtgcaggcagccacccaactgtagatgtctaccatcatggactgccagtagtacctggtcctcagggtctggtacagtttactagaccccaggtgtccacctgtgggagcgttgtgctccctctcaagaatactgtccttgagggatgcggggacgacaagttcggtcccctggattacccccctcctcaagaggaggccatcgtctccgatgaagaaccgagtctccgccaccgtatccagcatatccctctgcgactttcagaagaagtcctcggcctgggccttcactacctcgtccagggacaggggcaagtacttcttgttccctggcgcctcggggtccaacgcctgacccgagcgcgtgactacccccccgatggggatgtcctcatcgactgagttagtgtccagcccctcggtaggtacccgagaagggccgtcggcaagggcatgttgcctgccaggtcggtactcaatatcaaagttgaagggtgccagtcgcaccctccacctgttgaggcgtgtgttcgtgcaatccgttttgaagatgaactgcaacgcgcggtggtcacagcggatgaggaacttctcaccctctaggtagtgacgaagtgacgtcaccgcccacaccactgcgagtccttccaactcggtgactccatagttcttctcagccgagttcagccccttgctgaagtatcccaccggcaagtactccttgtccggctgctgctgaagcaacacacaaccaagttgattgtagctagcatccacgtccaggatgtagtggcctcccaacctgagaatagccaagatagggggcttcagcagtaggccccgaagaatctcaaagaattcctgctccacccgacttgggggaggctggttcttcggtagcgtcgagctgcctggctcattcagcggcttcgccaccttggcgaagcccttggtgaaacgtcggtacacgttacacatcccgaggaagctcctcatctgggtctgggtccggtactgagccttacggatggtcctcaagttcttttcgttgacactgaggcgccccggacggacaacatgtcccaagtattccacctcctaagtgaagaggtggcatttactcgccttcagtgacacaccggcatcagcaagtagcttgaacacctggccaagatggccaatgtgttcctccggacttcgggagaacacaatgatatcgtctaggtgcacaagacagatctgccaccgtactcgggccaaaatcatgtccatggcgcgctggaaggttgccggcgcgttgcacagtccaaacggtagtcgcttgcactggtaggtaccacagtgacaggtaaaggtagttttatgcctgtcctccggggcaatgggaatttgccaataccccgcgttacattctagggtagaaaacacgtttgcctcccccagagagtccagacagtcgtccatcctaggtaggggataactgtctttgaccgtgctctcgttgagcttacggtagtcgatacagaaccgtggggtcccatcaactttggggacaattaccaccggactcgcccactcggcgtcacaggcctcgatcacatcgggggcctccatgcgagcgacttgctccttaacaaggggccttgaacggggccctcccctgtacggttgttggcgtatagggggtgcaccgggtttcaacttgattcggtgttgggtggctctcatgagtcccaattgaccatccccccacttgtgatattggtccaagaggcgttcaacttgaaccctcaacctggggggaacattctctatgttcacatggggccgaggagaggcggccgacttggcttggtgcttctcctttccggacttcgggtcgctactcgcgcccgcgttgagggtgaccgctactactggtccctcatgttggtcgatatagccgaacttggctcccgacttgaagtacttgggcgaagagctcaggttcatcacctggatcctccacgggactccagctttggagtccatcgtgccaagggcaacatgcacttggtgcttgcgagcaagacgggggtgagggtgcaccaaccctttccccgtataatcagttacaacgtcaacgtgcgccaccaagttggggggcaacgtgaatttacgggctaaacgcagagtagcagtaaacccttctctcacggagcaagcaggcttcgactgtgagactgtcacaggagccacagactttcccttaccaaggatggggatggtctccccattcatcaacttgacccaatactcagggccacaaatcaaaggcacttgcgttacaacataagcggtacccaggagcaggggtatgatatattctcgagtactccatacgtcacgtcgacttcatgggttcccaacctagttgaaagggtcacggcactaacaatgggaagtaccccaccattgatgtcaatcatatggtcagctttagacctccagcgttggagcttcatctcctttcgtaatagcgacttgcgtatcaaggaggctcctgacccggtatcaagtacgatacgggcacaacaggcacggccgggggctagttgcacccgtccagccacctggagattctcacccgtcagccccgcgatgacccgacgtgggtttacgttcttggggagtcctacccgaggtgggcggactcccttaggtcggcgcagtatccggcagggttggttcgtccttttgacccacttggccgaggctgccgttgtgagcttaggacggctagctccaacggtcattcgtttcccgccgacttggcgtctgaatccgagggcgaaggggaagacgaccagtccgaggacgacgtgtccgccccctccgccgagggtgtggcgaccgccactaccggtcgaggcccaccctcgcggcgcgaacgtacttcgttcgtagccgacttcttactcgcattcttgacaagttgttgaatgcgtttgctcaacatagggcaatcatatgcccagtgtccatcggagttgcagttccaacaccgattgtcagttcccggaggggtcttcccgactggagaagccgaagaggcaccctgggaagttcccacggcagctgctaccctctccttgcggattcggcgtgcctctcgcaactctctggcctggtgcgcctcctctcgttccttggacgactcggcctgacgcttcaagcgttgttcctcccgcaacttgcggtaggcctcacctctgcggtaggcgaacctagccaactcggctagtgtcgcccgggcagtattatgctcccgggtctccatacggactgaccaatggagtccctccacaaaccgactcttcaccacagcttgtggatgaagaaagccacaaagattgttgagcttacgaacttgctccgcaaaggacaactcgtccccagtctcttcttgatgggcttgcgtaaactcctcgacttgagaagccaacgctgcttcatccaccatggctctcaacaaccagttgaagagcaccaaataggacgtcacctcaccagcgcctccacttgaggaactgggcatgacggacataagttctgtccggaggtcgcccttcgtaaactcctgtagcatatagaaatccatgccttcacttatggcattgtcgtcacaggcttttgtgaaacgacgtacaaactcaaagacacggagggggggagttccatcccactcctctttgtgcccaaaagagtggagtgcattcttcttggcacggcccatggctcaggcctgaataggaccgtacgccaccgacttgttgtggagggcgtaggtctcacagtcgaagatcctctggtaaaccgggttgacaacctggatcttgggtggcacctcacgttgagggaaaagccgctgaggcactggggtaagttgacccgcagtgcctgtcgtctgctgcggcgagcatagggtagccgccggcttttccgaggggaactcccccgtgaagggcgtacgccccaccaagaatggtgtggctccctcgttgggagtcatatgggtcgccccctgttcggggcgacccgagacaggcgtgaggagggattccccatgcgcctgccggctcgaaagccccaatccggtctggacattaaggccatctggcaaactcgccacaatctgattcagaatagtattcgtcatcgtgaccaccaggtccggcaaagtctgtcggaacacattggtcgcctcccgacggacagtttccgcgaggagtggattgtcgactccagttgagtctcggtccgcctccgggagtccacctgaggggtaaccacgatcctcaggggtctcaaccgggggcatgggcgcgagcccatcgctgaccaacggaggtccgccgtcctccgaaagcctagttggcgacggctccaagccaaagttggatccaacccgagtggagcccgcggggacagtcctctcaccttgcgacgttcccgttgagtataccacgcggtggccagacttcggcccatccacatcagaagtgtcacccgagtgaactcccgactgagtcggggtggcctgttgcccgcccgtacttccagtcctgctggcttgagggatctctagtccctctgcgaccccaggtaaactcacctgtgtctcaccagtattcaaaggcactgaagtacgtgcgtcacccgtgtactccccggacgacggggggtccgagctagccatgttggctgaagatccgtataacacggtccaagtccaccgttcctctgagctaactatcccaaacttagggaatatggacccaaatgcagggggaggaacgggtcaggctagtggcctgccgccccttgcgtggcacgtgttgatcccctacctgggggtcaatactgccacaccgcacacggcgacgctgccgtgagccacacgaccagcgctgggaagcgcaagtgctcccggtgcggcttggcgggtcactacgtacgcacctgtgacgcacagcagcacgtggtcgcggcacacgccgcggcagtcaaagccagcgtactgatggcgacggtagaccgtgcggcgcgcaagctgggccgcaaggccccgacttgcggcaagtgtcaccagactgggcacacggcgcgcacttgcccggcggtcctcgtcgggggcgtccggggtctcagagtcgacgctggcgacccgtacgccatgggcgagcacaaagtgcacacctcggtcctactcccactggctcgcgttggggcgacccgccctctggcggcggctccacccgggggggcggcggcagagcgcgccaccagcgtcaacaacaatggtggtcggggtgggccgccgacgcggccgcgaaagacggtcggggacccggcggtggcccaggcgctgggccacgcgctcgagtcactggccgtaacggccaaccgccacaggtacctcatgacgctgggcattgagcgtgctctccggtcagtctaccaggcgagtgcctccatgcaggggtttgtcgacgccctacccctggtgctggcaagcggcagccacccgccccggttcagaggggccgcggcgtcagccttgtgtcgcggcgcagcggtggcagagaggcccgacggcgagctctctggttgctgccaggctctcccggaaaagcacccccaggagtcggcctttgtcggcgacgggctgggaggcaaggcgtttgcaacaacctaggaccgcttcatgtctaccgttcaataagaggcgccgctgacctgcagcaaggatctgtcaggcccgggcgatgcccttgcgttcaagacggcggccacgaccatctggatgcacgtggcatggagggcaaagccagcagtgatgtgccttgccaaggtgatggacgatgacgccctgccagcggtcaagctgctaccgcatccacccttgaccgcgcaggcgcaagcgcaggcgtccacccctgcaggccgcgctcaagaccgtaagcgtcgcgccctccgcggcaagctcacgcggttcatctccgacacgatgatggggggtgccgacgaggtgaaggacggctcgtggccggcgggtgcgccacctttcgtacagcagcggatggcctcagacctcaaggccgtctttccgcgggtgctgcccataaagttcggcgcaaagctggccatcacgctccccgggacgcgccgccaggggtgctggctgcttttcctcccccacggcattcaggtacagcggctgctcttgtcgcggaagcgcgcgtcgtatgcggtctttccgcgcctggcacccgacctgtgccgctgcaagcacgtcaccccgacactgctgcggcgggcgatggaacgggctcaactcgtctcacaccctgggctcggcgaggtgcacaccctgctggcggtaagtcgcggcacgaatgggagcgccggtgtcgccaagctggccgccatggccggggttcgtacaaggcggtcccgcttttgcccgtacgtcgttactaacgggacgggtgtcgtctttacgctggagcggcccgccgacgcggccgaggtggcggccacgcaagcgcaccaggcccgacgactgcggggcggcaacgggaccaagtcgggcggcggggtgacgagcctggaactccaggcgaccgtcatggggctgccccttgaagggtcggtcacgaagtgtgtggtgggtgtggacccgggggtcaatgacatctacacggccagctccctcggcctggatcccgaccttgtcgtcgtcccgtcgccacacgtgtttgcgtaccgggcggagcgggcatggaaggtcgcagcccactccctggtgcgggcggcgcgcacgctgagccggctggccgccgctgtcgactcaccatcaacatcagaagcaatgcatctttggcaaagggggcgggtcaaggcgtcgagagtgcgagtggtaatgctgccggtggtggtacagtggcagcggcgggcaaggtctcccggtgccggcggcgccggcggtcgcagcgcaagcaccggggacccgtggcaacggccaggcggctggcacgtgccgagcttcgcaaggaagtgttggaggagctcgcccagacaggtgcatctgcgcagctcattgacacgctgtgtgcagaggcgattcgggcagcgggggcctacgggactgccggggcgcacggcgagggcgcccgtcgacgacggtggcagagacggcgacgacacccgccatcacgcccccccacttgtccgcctcgtggggcaacaatgtctgtgtgcagtgctgcgcatgccgagcagtcggacggcaagattatggcaagggcgcaggcctcgtggcgggcggtgtgggaggccagccggccagccggctccgaggccaccccagaggacgtctttgagggtacgtccctcaggcagccgacgttgctggactgggcggcagccgccttgacctgggctgccactcgcagcactgccgactatgctggcgcctatggcaaagacgcgttgcggccgctacgcaaggcccgcgtccaccgctatgtgcagcgtggatggttcgcagccaaggtcgcacgggatctgagtggcgggtatggtcgccgcatcgtggacggcaaggccgtcttggtggtgtggggggcagcagcgacgaggggtggggcgaccgccttgaggcgccgcgtggcgggggggtgcttcctcaccacccaagacgagtacaactcgtagcagacctgtgccgactgtcactgtcggctggtgctcgtctaccccaccgacccctccccgaatgacaggcggcaggtcatcagcgtggcgcagtgcgcggcgcaggcgcttagtgacgcagacggcagcaagcgcaaggtggtggtgcgccggcgacgggcggccaaggggcgtcgccgatgcgaaggccgcggggggtgctccccacgggacctgaagcggcgaggaagggcagaggagcgcgatgccggcgaggcacaggagcggttggccgagattctggtcagtggcaagcgctctggcggctatgacgtgctggcatgctggtccgtgaagaagtgtgtcaaccatgactgtggtcggctgtacctcaaccgggacaagaacgcggcgcgcagcatcgcgcaggtggcggtcagttcattgctggggcggtctaggtttccctttttccgcaactgtcaccctcgtcggcctcttgcggctactgcccagttgtcccgagacacggcatcggagtggcacccgccgtggcttgtgtcggaaagtgccggcggtggcggtggaggcggtggcggtggaggcggtgaaggcggtggcggtggcggtggcggtggaggaggtggaggcggtggaggcggtggaggcggtggcggtactaccaaccctgtccgggcgacgaccaaactcgtctcggtgggggctctggacggggccactgcctattcccgcacagcgatgagccctgccggcgacggcgggggcaattgtcgcacggctcatcagtgatagtgtaggaccctcttcgagggcttcgctatatgcccctctcgggaggggggcttccattgatttaactatgcttaatgatatcgattatgttgatgctattcgaactcgagagagccttcatttcagtcacggggcggcgtctcgatcgagcaacccccgtcctgtctggtcccggtgtcggcaaacgaaggggcgggtccggagtcccttgaaccccctgcaggggccgtctgctggcctcacttcaacccccgctaacgacggcggccgtaaaggctgtttctttaaaccacccccacccaacgactctcggcgtcagcccactgccactcgcggtggacgttccgctcctcacctcgcccccgccacccgtccccctcgccccccccctcggaacctcccccgctcccccatcccccccattcatgtcggacgctctttcctcctggatgctttcccccgccgcccctctcgccgtacgcgctcgtccatgtcgcgcagccgcggcacccctccgatggtcctcccgccgctgtcccccgtgtcgagcgtcgacgcggccgccgcgggcggtgtcatggcctccgccgcggcggtggctgcggtacccagccccgtctcgggagcgccaacgtcgggggagggtggtggtgttggtaatggccccgctgctgccgccgccgccgccgccgccgctgccgctgtcgctgtcgaagtcacccccaatgggcgcccccatggcccgtcttcttcctgtggtggccttagaaggaaggggggcgcctcggatgccgccgccacgccgccacctccgaccacctataccccgtgcaacatcctggtcacgggcggggccggctttatcggctcccacgttgtggtctacctgaccacccactaccccgagtacaaggtggttgtcctcgaccgcctcgacgcgtgtgcggcggtggccaacctggagggcgtgcccagaggcgcgcgcttccgccttgtcgtgggtgacgtgcgggacgcggggctggtggccactctcttcgccgccgaggccattgacacggtcctccactttgccgcgtcgacgcacgtggacgcgtcgtttgcgtgtccgctcgcctacacggacaataatgtggtgggcacggcggtgctgctcgaggcggcacggcggcacccgctgctgcgccgcttcctccacgtctcgacggacgaggtgtatggcagtggcgctgcgatggcgggggcgggggcggcggcgggggcgagggcgggcgcgggggcggagccgaagccggggagaggggacgggggcgttcgcgcgcccgcgccggcgggtgcgtcgacgccctcaactgaggcgtcgtccatggcgcctaccaacccttacgcggcatccaaggcgggcgcggagctcttagcttcctcctacgctaccgcgtttgggctgccgcttgtcatcacgcgtgccaacaacgcgtacgggccgggccagttccctgaaaagtttatccccaagacgctcgtccgcctcctgtctggtcgccgtgcatttctccacggtgacggcacccaccggcggtcctacatgtacgtcacggacatggcctccgcctttgctgtcatcctccaccggggtgtcaccggggaagtgtacaatgtggggagcaccgtggagaagagcaacggccaggtcatcgcagacctcctggacgtcctcggactggtccaaccgcccacgggagggcggccagccgccacggggtgcgacggcagggagaagctccgcgttgacgaccatgccagtcgttgcggcggcggcaacgttgaagacggcagcggcggcctgtcgccggggtcccccccccccggggtgaacgagccggtgcccccttggctgcgcgaccccgcgaccgccgccgcctttgacgcgcacgtgacgcacgtgcgggaccggcactacaatgacctgacgtacgcagtggaggcgtccaagctgtgcgccctcggctgggcacccgccgtgcgctgggctgacggccttgccgcgacggcggcgtggtacgcgtcggccgaccacctggcccgctggccggggctcgagggcggcctcgtcgcccactttgtggccccgcgggggggggaggggggggggcgccaccgccgacgccggtcgttttgaaagagggacccgagcggtctgtactgtaggtgggggggggggggggggggggggggagagtatcatacagtacggcggggacaagagctcctggtttcctactttcttttctcttgtttcttgccggccgcccccgccgtcgcgctgcctacaagagtggcgcgcgcggcggcggcggcgcgcctgccaatgtagccggggtgggggcacccccatggcgcgtggctcctattcctcctccctgcgccccccatcccggccgccccggcggcccggctggccactcgcctgcgcgacctcctcctgctgctgccggcgcaacaacaaggcggacgcccccccccccccccccaacagatgtactgtacagagggaaaagcaccccgccggcagcggccccccctacaggcacaaaagaggttgtgccagctctccctcttccccccctccctcaacattctgtctgcatgtacagtatccatcccacccccatggcagagggtggcgaggggggggggcgggaggattggcggtggcggtggctgtgcccgcggtagtgctggtggcggtggcggcggcggtggcggtggcggtggcggcggcggtggcggcggcggtggcggtggcggtggcggtggcggtggcggtggcggtggcggtggcggtgtccgtggcggccgcggtggcagcgcggcgcaggaggcgcccgcgcgggggaggcgccggatcacggccgcgcgggccggccggatccgtttcgccgccgccgcccggcgcgcccccgcgccgccgcccgcgcgccgccgccgccccgccgcccgctgctgcgtcaacggcggcgacgccacgcccgtctttggccgccgccgctgcgccgccgccgccactgccgctgccgccccgctgtcgccgccgccccgctgccgctgccgcccctctgtcgccgctgcggtggcagcgccggctgccaggcgggcggcgggcgagccgtgtcccgccagcctccgggccgtgtcgcccgcgcccgcccctccgcgctgcgccccccgctgccctcctccatccccccccccccccctctactgtcctccattccgcccccctcccgccccgctcccttccccaaaccccccccccccccccccccccacgtactctcctcccccctcacccccggcggcgcgcctgctggcctgtgtccatggtggcccgggacgcggctgccgccgccgccgccgccgcggcggggtcggtggtggaggcggcggcggcgggggcggcggcggcccgagcccgcgggggggcgcctccccccgtggctccgacgccggggggggcggcggcggtgggggcggtgccgacggcggcgtcggtggcggccacgacggcggcggcagcgccggcggctgcacgcgccaccgtcgacgacgcggcggcggcggcggcggcagccggcagcgcggcggccgcggtggccgcgggtgagcacacccccgctgccgccagggaacccgccccccccccagccccccccgctgccggcgggtaccccccccgggcggcgctcgcggcgctcccccccctcacgctggttgcattccccggctacctccgcgccgcgggggcgcccggcggggcgctgtccgccctcggcggggacccggcgctcgccccggccattgccgccccgcgggcggcggtgctgggcctcaccctccggccgggcgcgtcgcctgtggcgtccctgccgggcgtgtgtgcgacggggctggtcatggagctggacgtagggggggaggcggcggaggaggaggggggggaggaggcgggaggggcggggggagcgggagaggctggggggctgggggagggggagccggcggcggcggcggcggcggcggcggcggcggcggcggcggcggcggggggggccgtccccggcggtggccgcctggtcggcgtcgtgagccacgcgctgcggtggggcggcggcctcgccgactttgcctacatcccgcccgccgactgggcgacggcggcgccgccggtgcggcccgccgcggcgtcggtcgaggcgtgggcggcgcgggcgctcgcgtatgggcgccggggggggtttcgcgcggatgacgcccactactacgggcccgccgcggggggggggtcctctgacgaggaggaggggggaaggcgcacccctgctgccgccgccaccgccagtggcgacggtggccggggcggggggggggacgccacggctgtggccgctgctgccggtgccggtgccggtaccgacgccggcggcggcggcggcggtgccccggccagtggcgacggcaacaccgccaccgccgccgccgctgtcgacgtcccttttggtgcggctgcgggggccctcggcggcggcggcggtgccacccgcggccatggtagtggcggtggcagtggcggccgcggcggcggcggcgacgacagtgacggcggcggctcggcgtcgtgcgcgtcgtccacgtccgagtcgggctcgtcggcgggctccctcgggtcggggatggcgtcgagcgggtctgcgtcatcggcgtcgccgccgccgtcgccaccgcccgccgccgccgttgggggcccgcccgtggccttcggggcggcgatgggggggggcgctgacccccgtcatgaggacggcggtgacggcggtgggagtggcaacgagaacggtggtggcggcggcggcggcggcggcgacggcggcgacggggcgggcgcctcccctgcagcgcccgcggccaagcggcggcgaccaaacgcgcccgtggcggcggccgccctcccctccccccctgctggcgcctcccccccgccccccacggcggcggggtcgggacgcacccccccgggcggggcggcggcgcccccccccggctccccggaggaccccgcccccgcccccccggcgcggccgccgcccccccccccaaacccacagccgggcctcgccggcggcctcgccgccctccgcccccccgcgtttgcgcgcacacccggcgcacgcggggactactggtttgtccagtaccgggggctccgccccggcggcggcgggggggtgcgcggcgccgagggcagccccgcgcccccgtcgcggcatgtggtggcccctgccgctgccgcagctgccgccgccgccgccgctgccgccgccgccgccgccatcggcggcggcgacgcggtaggggtggggcgggaggaggcgcccgcctccccgcggccggtgggtggccccgccgacgctgtcgcctctgccgccgccgtcaccgccgccgccgccgttacggcgacggcggtggaggcgacgggggcggcggccgccgccacggacgcggccacgcggggcgccgacggcgccgcgcccggcgcagtcgccgccgccgtggacgcggcggtggcggcggcggcgggaccggcgggctgcagcggcggcggcggcggcgcgggcaccacccccgccgccgccaccgccgccgccacgcccctgccggccgccccctccacctctaagaaccgcaaggcggtcggcggcgaccgccgctccgacgcgtcgcggctgctggcgctccgtcaccgggtgacgtcgtcgaccccccccccccccccccgccccccccccccccgacgcgggcgcgttgcgggtgcccgccgacgcgcacgcgcggatcgtggcggcgtttgcggcgcgcccaatgtacctgcggcgggcactggaggacgcggttgccccctcggacgtgcggtactttaaggagctcctccccaccctcgcctacatgtactcgcccggctgccccggctacgccgtctactctgccgcgtggatccgctacggctacgacccgatgagcgagcccgcctcggccatctacacggccctggaggtgcgcttcaccgacgtcctcgtcaccgccgcgctcgccgcgcgggccgcccgcgtggcagcagccgcccctggcggcggtggcgtcgagccgccggccgtccgccacgcgcgggggcggctggcggacctccccctccgccgcaacacctttatccagctcgccgacgtggccgtgccggcggtggtcgcggcggtcgccgccgccccgcggtcggcggcgtgggatgacgcggccgggtggctgccgccgggcctcgtcgcggggctggtcgcgcccgtcaaggccgccgcgcgcgccttcgcggtgcgggagctgggcgtccccgccgcgacggcgctgctgtgtgcccgcgggccggcggtgacggtgagtgaggacggagtggtgcggcgggtgcggccgccccgtgggcgcgccgcgcgcggggggggggcggggggggggggaggggcggaggccgcgggggggggggcgccgtcggcggcgccgtcaggggttggggcgggggggggcgccccgccgccgccgccgctaccgccgccgtccgggtggccacccggaccgcacccaccgcgacgggcggtgcgggcggcggtggcggcgccgccgacggcggtggcgatggcgccgacgctgccgctcccgatgacgtgacggcggcggcggcggcggcggcggcggcgtcggccggcggggccgacggggcggccgacgtgcccggcgcatcgggcgacgcgggcgtcgacggcggcggtgccggcggcggcgacgaagggcgggaggtggacctggaggacgtggtcggtgggagttcggtggagagctttgacatcctcggcgagggcgacgcggacgggagtgaggaggaggaggacagtggctgggatgagccgtaagggggggggggggggggggggggcaggggagtgggggacggacgcgacggtggcgtgaggctcgcgacgaggataggggggaggggaggggggtggggggcgggcagcgggggggggggggggggggggaggggggaggctgcgggaggagcaaagggcaggcaatcccccgtgacggcggcgtcgcctcgcggggaaccactgtgccatggcggagcagagccccgcgggggcgcccacgcccccgcccggtggctcgccgcctcacgccccccgtgcgcggcgcacgcgcgcagcggcgccacgccgccggccgccgccgacacgccaacggccactgccgcgatgccgccgccgcccgccgccgccgccgccgccgccgccgccaccgccgcggcggcaccgccaccgccgcggcgccgccaccgcgcgcgccgccggccgtccccacaaaaaccgccaacagacaacctttacccccccactcgctcccctcctttggcccaacgacgccacgacgtgcaccgctcccgctgcggccccaacgcccccccccccccattctcttccccccccccccccccctccctacacccccctcctcccccctccttcgcatccatccatcactcctccgagtcatccccctccccccgccccccccccgcttcaacacccgtgccaccaccggcgtgagggccacggtcagcgggaaccgcagcgggctgctcgccttgtgcgccacgtaggcgagcgcggcggtggagagccccgggtcgaggcggcccagcgccgccggccggccgacgggggtggcggccagcgcgtcgccgaggcggccgaccagcgccgccacgtccaccccattcgccaccgccgcgtaccagaggccaaacgacgcggccgcgagggtgaggctcgtcgcaatgtacgcgcccccatactgggcgaccagcgccttggcgtccacgccgccgccgccgccgccgccgccgccgccaccaccaccaccaccaccgccgtcaccgccagaaggggtggggggtggcgtcgtgtcgggcggcgtcggtggtgcccgcgtcggcggcgacggcgtggccatggtcgtcgtcgtcgcccccgccggcgcgtgccgggcgggccgccgccccgccgggagcgccgcgccggtggtgacgcgcgccgccgctgcaggcaccgccacccgccgggggggggggggcgacgcgggcggtagggcaaacggggaggaaggcagccgccatggtcaaggggaggggggggggggggggatggagggagatgggcgccgaggcggtgaggcggaaaggggggcaggggggagttgaaagcggattggaaccggtgggggggtggggatgggcagcaggtcggggaagagggtaggggaggggggtgaagcgggtggagggacggggcggcgatgggtgccgcgttggcaaatggctggcggtggtgggggggagctcaagtgacgagcagaggcgcgcgggaaggcgggtcgactgcacccggtgctggagcaggcgccgagcgcggtggtggtggaggcagacggcgcgtcggataccgctacaaacgccggcgatttcccatctgagagtgtctgtccatttgtcttttcaatgccacgtgtgcttcgcttagggaaatctggtacgctcgaaccgatcgtgggagcctcgggtccatacacccgccgccgtgcggccgtgtccgtccatcaccgacacagcgtcacggtccagcgtcaccagcgccccgtgagtggcggctgtcgctgcgtcctcccctcagcagcccaaaccgccacggcaccaccgcgggggggcgcgactgcgtcactttaggcgtagcagggagataggggtaagggcccgtgctgcagggggcggaccccggccggggtcctacaccgccgcccgttgcggaagggccgtttcatctgctctcccaagcagctgcggcggctgacgccgcaggtgccggccaccgtcgccaccgccgccacggcggccgcatcagtgctggcggcacttgccccagtcgtcacggcagcagcggcagcagcggccgagccgcccatgaagtgcccggctcgagtattgacaggcgcttgtgggcattcgtgggaccgcttgacgagaagcgggcgcggtgaaggaagcgccggcgcaccgcttgccgagcccgcctgatcagatgcgaggcatgcagtggcctgcaaaagtgaacgacttcggatgagaagagacacgggggagtttcgcaagctcaccttcatttgataccacatagccacaaagacgtagcgtcaacgcgtgcaccgcgcgcatgagaaaacgccctacaagaaatatacccgcgatatcgcgtaaaacgcacgaaaatcgcgggttcttgcaaccacccccacagcacccatggcagactgggctgcgagggccaatccttcctcccgtgtcatcgactcgcaacgtcgcctcggggggacgacaggtggagccgaggcgaggaaatcgtgcacccctgataatcaaaccggaccgcgataattcgcgggagcctcccatgagttgtcatgaaaacgcgacacattctgacgttgatgcagctcctttcatcgtcccgttgcgccccgagcgtcggcgacgtctataaagtcgctgcgcctgccgtcgcaaggcaggcgactgagcgcacttccatctcgcacccacgccgttgtgcccgtcgggcgtcactgcgttttcgacccccccacgccctgccggccactacccagggatctcccgctcccactcaacccccccccccccaccttctacccccgtccgagggacctcccccccctccggccgtcgacccccccccccccccccccccctgcccaaccaccccattcccacccccctctccccttcttagcaatccccccccttcctctgcccttcccccttcctgac

SEQ ID NO: 50 - DNA, 20341 bp, unidentified
  misc_feature 1..20341: note = Fanzor polypeptide
  source 1..20341: mol_type = other DNA
aggacttagatctggaaaaggccttgaaggagcgagagcgagacgagtctgcagaacgagtcctagcatgagacttaatggacgtagcgagagcgccacgcgttatatgactccgcctttagcaatcgccccactcccgacgttcagaccattctaaagacaggcaccctctgtgtcgcttgtacttacgaggcgctgtacggccgccgccaccttcttgtcaataactgcagtcggccttgcgcctgagaaggtcccgttctaacctctgcacacggccctacacactgtattcgggtaagataagagctggaccagaatcaagcgggttcaatccgctatatctgtccaatttttccgcagatttgcgttccgaaagacacagaacctccgtctcctttgaatcggcgagcggaatcgccttgttccgtcggaagcatgtcccatatggccgctttctgcttcattctgctctcaaaaggtaatgccaagtgactgaatgccgtagtcagtggcacgaatccctcacgagtcctccggcaagtattctgtctcgaagacgattttcggtgggtggcggagtggcggcacccaccaaaagcgctcgattgcttttagcgtgtcaatacggagcccataggagtcggcgttgtagtggtatgccgctacagctggtagctccagatatcacccgttatgcagctccatgtcccactctatcgtatatgcgttgaccgccttgattgcacgcatttgtgtctcatttgcgtatatagctcaatttgcacagaacacttgcaatacgtgagtaacgtagcggttaaagtgttagcgttcggttcggtatacactttttgtcagccgagcgttcgcttcccggtgagagcatagagacaacggttctgcgttcagacggccatacttatcgcacctcctctcagacgctacaggctgctcagacaccgtccagatgacccaagtaagccaggccgttcagacgctgtccagactgatgaatccctttggcacggttgctgatcgggccgctggcgccttggaaggccgctcatccaaggagatcttcatcgagcactaccactcaatgctaggacatcagtccgatcgaatcctgcgacactacatgcgtcagcattactggtggccagaaatggtgaaggaaatcgaggcttactgccgaacttgcgcatcctgccaagctagcaaacccgaacgagccgcaccgagaggaaagctacaccctatccagctcccgttcacagcatacgaagagatttcgattgatttcaccggaccgcaccctgtcagcattgatgcggacggaatcgcgagattacattttcaccgtgattgacgccgcctccggagaagtcaagctcattccgtgcatgaaggccggtttgacgagcgcaaaatgcgcccaaatcttcctcgagaaagtgtacccgcaatggggtactccgaagacgatcctgtcggaccaagacgtccgctgggtttccgcgttctggaaagcgttccacaacgctctcggaacgacgctgcacgtgtcaaccggagcggccccttgtcgagttggccgccgctccgattggccaactcggccgctccggccatctcgacaggggatccggagcttgtcccggcggccgctgcgatggctcgattccatgcagctgatttgttctaccgagcgcatgcgagagatttacagtcgaccaccctatactaccgtgatcttgtggcgcgcaaggggcgcggtgctgcgcgccgaaatctgtatggtattctcaaactcaaatgatccggatcggctggcgcggctgcaagaggcctccacttgattggttgcctcgagaacttgaagtagtcgctagatacggttgacttagccgtttaaatacaagctatagtctcgcaaatagcgatagggaggagaatagctaaggacagctagtgtcggtagaattcgcccgagggagaagaaggaagacaaaagtcacgacgagaactacgctcagagtgcggagaccgcgggtacatgtggggggaccgggacaggtacatagtcacgatggagatcacagaaaggccgtgcttgtcgatccagattcgagaggcgagagagggcaggaagtcggaggagcgaaggatgatcgcttcgctcagaggtgtgacttggcgaggtgactcagagagcgaccctttttagcggtcgcggcggcggtgcctttgcaggtacgcttgcggcgaaccgagatcttcgcggaggtcgtttcggccgtatagcgcgggagcgaggcgttcgcgagacgaggggatcgacggagcttttggggcgacgacgccacggcgaccactcccggcatgatcggctgttcggcgcgtggggtgtcatgacgaggggtaacgggagcttgatcgacctccggcgtcggtccggcgaagtgagcggcaggggcgaagagttcgggagattgagcgcgttcgtccgcgtcgctcgagctcgtcatcgacggcgtggggccatcgaagagacccaatcccgcagcgttgatcaccaccttgaggtacgcgtcatcgagactccgaatggcgggttgtccgggttgagcgggagcgtgaagggccaagtcgagatccggcacgaaaggttgaggatggtgttccccgctcgagctcgcgagcgcgttccttccgtagaggtccgcggtgccaaagccagggctatcgaggctgccttcgcgaggagagaattccgggctagtgacgggcgagtgcgtaggccgaaaaccaggcgaaggaggggacttgcgtccctcgtcggcccagcggacgaagtggcgggctgacgtggcaggaggaggcggcgcagccgactcttgcgagggcgcggctctcgcagcagcgctcgatctcgctcgcggcagcggcccttcgcctcgtgctacacatcgacaccgacgactgtgcaccccagggcacccgcccgatctctcgagtacgcccgactccgcttttgaggactcgacggcaggacctttgtcgacaacaatgcaagttggaggccctctccgctcggtcgcatgggcagcgacaccctctcactcgagagtccgcgcgcagcatgcacgcagggcaacgacggcgttcttcgacggcataggcatcatcaacctttgcccgagacggccgcaggcgctgcgatccgtcgacgatggcattggagggaggaggcgccggcacgctctcggctcgctcgggaggcgtcgtatcccaggtgggcagattccttttgagagacgcgtgtgaagagtaacatgtgctgatgcaaagactacgatgtcggcaaaaggcgaccgaccaactcggaccttgagactcgaactgtgggcccgctgcactcagaccttgggtccgacccaaggtctgagtgactgaggggcggcttttggcggcatgcctcggttgagatcgagatcgcaacaagggttgctcagcacaggcttgttcgcggagatgaactgactccgagttgcaccacagtgtagtcgccgatcgcgtgacgaaatgacgaccccgacaccgctggtgagaacgttgtgccaaaaagtatccgcgggctttcggtcgctgtttcgccgaagcagtacgccaatctgacgcgcgtgataccgcactcggttgttccaagttgacgggacaagaggctcagaatacaaggcggtatgggtggcaagagtcgcgggaacgggtgggcgtgcgagcctcgaaggcaaactgctgcaccaagtctgcactgactacgtcggtacgaagagatgtgtcacgtacggtcaagaggatgagatcgaattcaggggcggcggggtattgatcgatcacacgagatcgaaagggaaccgtctcgcgctgacccggttatcgtcgtttcgaggctggcccagagccgcgaggctatcctgctggcgatgaatggctcatgcgcagtctcaagactgaacaaggagcccgcagtgctgatcgacgctcgactccggcgagcacagaagggaagccgctcggacgcggatgccgctctcgcgtgcaacatcgccacgacgcgcatcgtgatcgaactgcgaccttggtcgaagggcgactccagtcctgacgtgcgacggacaggcgaacttgctcgagctctccctcgtcgcaatggcctcctgacttaaaacggcgtgctgtcctcgtgaccgaccgtcgataagaggagcagatggcattgacggagctaacctcaagcgctcatcgctgactgcgcgagtgcgccattctttgctacgcttgctctggagcacgcgataagctcacaagctggcagcgggccgaaatcagagcttgagcgccaaagaacccgcatgcgacgctgcgaacggaacacgcgggtaatgaactgcgacttgcttcatgcgtgacagtcaccatagcgacgcttggagtgcccgcttggaggggaaaaagtcgccgcggacaccccgcgagtgggcggacgggcgaaaggacttctccctttctcgctctaacatttgcctttactgcaaacgcttgaaggagacctcgcctcgcaccaaagcttgctctaagcgctcatatcacccatttccaaccccgccggctgcctccgctctcaacctccgactctcgaggcgcacgaaccccttctcccgttgtcccctcgacgacaaccgccgaatgctgctgccgcgcacgcagctcttgcttgcgctcgcggcttccatcgtactcgcctcgttaaccgcccgcctcgccaactggacgggaacaggaaaacagcagtccttcggagtccgcggagccggcctcgtgcacggacccttgtgagtacattgagccagttttaccgcgcggcaaaggaaactgatgcctacaatccacaacacagcgacatgggccagaagaccctcatggcgcacttgcggggcatcgcgcgcgagcagctccagacggcgcacgcgacgaccatgatggagaccgggaccggcatcaaggccacactcgggctggtcccgaggagctttggcggaagtgagttggacagctgcttactcatagccagcctcgactgaccagtggaccatcggaacagacgagtatgtcgttgtccgcgacctgaaccccgtacgattccagcttcgccaagggacgctccagtcggcgacgtgggtgagggacaagtccgccacgaacgtcgccaacaacctcgcagctgccgagcgagccaagatcgaagagatggaccgcgagatccgcgaggtcctgggcgccgagaccgtcatcatcaacattgtcgacggcgacaagaggccggaggcaaaggcagctaccctctccgaccgtcaccgtcgcttctcgcggaggcaccaccaggaatcgaagctgccctgcgggaagaagcgcgtcgagctcgaacagaccccgcccaacgactcggactggatccaccgcgctgtgagtcctttgtctggtccagtcacacacataacggagcgggagctcacgcaaactttcagaacagggcgacgagaagacgatctactttgttgcgcccgacgaagcagatcgcctagtacagcatcttgtgacgcagtcgttcgacacaccaaagtacgacctccccgccaactctcccttcgccaacagcaacatcgatcggctcatcgacatcgtcaagcgatacccgccgtggcgtcgaattatccatacgcgcgacctcgatgcagtcatgcacacgacggcgtgcgaggcatggttcgtcctcctcacctcgtggtcaaaagtcgaggagggggcggtccttacctcggacgccacggtactcgaagacatgctcgagccgtacgttgccgagggagcgcagcggctgcattccgtccagcgcgatgtttctgctgccgctccctctgcaccaaggactggccgtggcggcgccctaggcaagaaggcgccgctgccagctcgtccaaacctccccgtgctcttgactcagctcggcgcacagtcggcattccgcccaacatccctcgacagattgccaaccgaacgacgccggggcgatacaatcgtcgtctttctccccggcgtcgacgctctcccaggcttcggcagagatcaatgtcgccgtgcgcgcgtgtcgagccttctgggaaacgactacaccggcagcggcatcaaaggcatctcttgggcgctcgtctcgagcggtctcggcgagtctttgctttcgatgagggaagaggactggtccgaccctcaaaagctcgagtcgcaggtctcttccctcgtctccctcctcgcctccaccgccgccagagccaagacgtggcgggctggaggcgactttggcgaggtcgccaagatctcgagcaagagcacgtcgatcgggcgcgagcagatcctggacctgatcgagtcggtgcgcgttattcgaggtgagaacgtcaactacgtcgcctcgacgttctaccacaacggcgatccgcgcggacccctgcagttcaagcaagctccgccgtcgactcgcccaaatcgctacgacgtcgactcccgccagccaagccatccctacctctctcgcccaggtccgcaacacgtcgtgccacaaggtctgaaccagtcgccgacgctgccgacgagcatcgtcaacccacgcctctcgaacccgctacaaccgtctcggacggtgcccgctccgggcgagaccgatccctcccgtccaaagatgtcgaagattcgtgttcggccgctgcagatgggaggaagcgggcagagcgtgttcatggctgcgcgaacgcatggtcccgagctcactcctctcgacgacaagaccatcgcgcgaatcatacaagcagacgccagccttcctgtcgaggtcaacgacgacgacgacgcggtcgactcggaactggagattgttcccgaagatgacgacgacgacgacgacgaagacgacttcacagcagtgccaaagcaaaaaggaaagctcaatcgtgtggagtcgtactttgcaacgatcacctcgccgggcaagaaccatgccgccgcgagtcgcaagatcagcgacatcacagagtcgccccgaccagtctcgaccgcttcggcttctgccaacaatgccggccgcagcggcgcacaacagaccgccacgcgtatcacgcgtctcacatcggcaagagctcctccgccagagccgtcgaggcgcaaagatcgcgaaccagtgcccgcgccccggcagacccgactcgcggggaatcccgcgatcaccgaacaagaggcagctctcgcatcgccagacccgatgctcctcatcatgtcgctcgccgtcaagctcgggaatcgctttgtccacagtgcgtttgcgttcttgctggaactgctgctggaacagggggaggcagggatgatggcgacgagggatctgctactccagcggaaccgagcggcgcagtgcctcggtcgtcttgctgctggcggagcataccgtgcggcgggggagcagtggttcccgcggcaaacccttgttatctctgagctggagaaggtacgtccggtcatacggtcagaatcgagatggacaagagaactgactacagtctctgagcaggaggccgtcaactcggccctcgcctccggtctcgtgcctcctcctcgactctcggtcaaggcgttcacaatagcctacgctcccttccaaaccaacctgaccgaatggccgcgaacgcacacgcgagacgaactcgtcaacttgggccagttcgtcgcgcgcgacctgtccaagaacgcagcagaagcgctgagcaaagtcctgcggaaggcgcacaaggcgttctcgctcgatccggcatcggaggctgccctgcagtcggcaaacatcgaggcttccgctcgattccgcgcgggcctcgggaactggttgggcggggtgctcgcgactgctccgttcagccaggcgtcggctcacgcaggcgccgcgaacgaagaggacaagggactgccgagtcgagaaaagaccacgtcgtacaacttgcgaaagggcacgaccggcaagagcggcgacacgcttcagcaacagcacggcctcggcccgaagatcgacccgactgacccgcgcgaaccccccgctctcgacctcgggaaagagaccgaaaagtcgctcgagcagatgatcaaaaagctcgtcgactcggtcccgcctggcagcatgttcaatcgatcagatatgcatgacgcgctactgcaagacatcaccacgatcgcgcagcgccttctagcatgccgggaccggcatctcgagatggcgctggtgctgctcagatacaagaagatcgagaacgcgacgaccatggccttcgacgacgtccttgcagggaaaatgccagagatgggggccggaacgcttgccaaggggttgctagctctggtgatgagactgcgacagatgagaacgctatcggggatcgagctcataccggtgagctgactggcacggcggcgtcgagcatagtcaaagggagactgactggcttgtccttttgacagtatttcgacccgcaatgggtcgatgtagacctgtacaccctcctccagtccggccaccggcaccgcttcaaggtgctctgcacagatctcgaaagaacctgtaccaagatcgcatgcggcctcctcccgttcgtcgatgaagacgaagggagaagagtcgagctctttgacctcttcaggcgggtgttcgaagtgtggcggattgacgaggacgaccccgacaacagagacaaggactcgccttggtcctggatcgaggccgagaggacacggtcgacgagcatccgcctggtcgtcaagaaggagagcgtgtccctcgtcgccaacctcgatcgggtcctgcgcattgtgtttggcgtggaggagaccttctacacctacatgaggcggaccggagctcaagtcgaggtgatgaaccagctcttcgatcatcgaatgttgccgaacaagttcgttcccaccgggcacatgcgcatgtcctcaacaaaggtccagttcaccggagtcgacattacgaagatgaccaaacttggacgagaggcgctgccggagaagagtatggctgtctgatgccgaaaagaattgagctgcgctgactcgccctacccagatctcgacgcaggaaccgcatgggcgcacgtctcacaactaccgctcactcaactgaaggtcaaggagtactttgccaagatgatgccgtcctttcagcgtcgcgtcgtcaacggcgagatcgtgtttgtaccgatcgtcgccatcgcaaaacccgacgcagacgtgatgctctcggaacggcgcgatccattgccgcccagatccgctcctcaggaagggctctcgcgcaaagagcgacggcgcgagcggcagcggcaagacgccctggaccgagatcgctccccggtcgacctccgaacgccggtacgcgagaaggcgccaccaagtcgaacgcgaaaggggataccggtgtcttggccaaacctgcgattcgaggggggaaggaagttggtcaatgactttcttggagacaccccgctcgaccacatccactccgccagcatcgacaccggcgtcgtctgtccagtcgcgaccttcatctcgaatccggttcgggacggcttaccaacgcagcgtgccgaggcggtggcgacctattcgcgtgagactctgctcacccagcagcgtcagaccagccgccaagcttcacacctcaactcgtatctgtcgaaccagttcgactttacccgatgggcggatccagcttccacagatgttcgagcgtcgggtacgtcgccaatgccagaaccggatccgatgcaagaccctctgctggtgaccggtctgcacttgctcaagagcatgcactcggtcttcgacgggcggtcgatccagagcaaggtcgagcgcaaggccgaggtcagttcggtggcatctcagcacgtcgatctgatattgggtggcaaggatcgctggaccgaagaggaccgcaagacgcgcaaggtcgttgtcatggtcggctcagcggacgatctcgcgaaatcttccggaatgaagggtgctgtcaccgccaacgtccttgtgcgggaaatctctgccgagctcgcgcgccgcagggtcaacttcatgatctgcgttgttcccgagaactacacatcccaacggtgcccgaacccggactgcgtcgatgcgcagggtcgccgatctcggtacgtttgctctcgtgtactctgagggtgatgcagctgaccgactggtgatctttggggacagagcggagaacccgcgtcaccagggtggaggaccaaactaccgtctcctccaatgccagcgatgtagggcggtcttccaccgggacggagtcggggctgccaacattgggagtatggggtggtgcctgctgcggagtgggttgcagctgtggggggagaactggatgggaccaggaggaaaaaaacttgcggaagcgaaaaatccctaaaaaaggggggatcaatgggatctacttgtagaaccctcgctttctccgtgatcaatctgacttctatctcctgtgtgcggtaaccacaaacaggcgcttgcgcttgcgcttccacgtccgcaaagaggcgcttggcgcttctgctcccctatggccccggcctgcttgagactccgtgtgtggactcgcatggtacagatcgacgggtctgaccgttgagaatgccggacaacgcgccggcgcgtgcgacagagcgcccgaagctttggagccggatcgggattgccggatttctcccctctcaacggtggaaagggcgtctacagatgcacatgtaccccctagtctgatcaagcttgcaccccgcggttctgccgtatccaacggtctgcgacgacgctggcacaagggcctttttcggcgaaagaggcgcttctcgcaactcgccgacggttcccgcagggatgctgggtaactctgggacggttgtaaccttcaaatggactgtatctaccgttttcaacaccagaatacgttcgtgggagaggcggcgaggccgacgactgccctggccgagtcttggagcacccgccccggcctctgcacggtcgaaaatcccaaaactctccctcatacgaccaaaaatcgtcaccgagatgctatgcttgatgtacggccccgcgccgagctctccggaacagtccgggacccaattcctgactttctcgccactcagtctcagtgttccaacttctaagcgcattgtgggtctggttacttctttcatcttgttgacagcatcagaactgacatgtaccatgttgacggattccgtcgtatcttcagaccgagctggcaaacatgattctgagccaggaaaagccggtgagttcagtgtgatgaagccatggcttgtcctgaacagttctctttgtgaatgcattcttctgaaatttgctgcttacagagaaatgactcggccgagggccggcaagcggtgagctcgagacttccaagccgaagaagcgcctgagccctctgctcaacactctgcagagccgagcaagggcagcggaccgcatgcgataccgagagcagcattgggagttctgaatgcgagaggtttgagagcccctcaaaggttgtctgaggaggagggaagaggaagagggagaggtggcaaagccggcttgctcctttttgatacgcgagcgaggtgcagcgaccgcggtgtctcttactcttgcgacactgcccacgggccgcttttcgagaaaggtgttccggcggcggccggccttaacaaaaccaaatccaggacgcgcgagaacgctcaagtcgagacaaggagacgctctcatgcgcgagggcactgaccttgacgggatcccagccctttgaatgcgctacaaagagtgtgtttcccagtgtccagccaagcaaacccgcggctgcagctgcgaggtgcgcaagttcaggagaaggtgcgcaagttcaggagattccaagacgtgacctcccgttgttcactcgttcgcacgcgtccaccaggttattgtatctgcaattttagctcgacggagcgaagccctgctcatgtatttgactatggagcatttgactgtgctgcattgcccacattcttgcagacacgggcaagtcagagaagaagaaaccgagcgcgagttgcgccacccgcaaataccctccggactgaaccgctgaagggccgacgacctgtccctgaccagtagaagtgtcgggatcccttgacttacgaccagcaggtcttgcatgtcgcccagaatcgtcaaaactgattcctcctggttgcgctcaaaagccggatggtcaggccgtgtagacccaaatcgcctgaaacttcgcaccctgggcccctataggtcaaagtccagccggccacaagctcagcccatttcaacggcggtagaggtctgccgagcgaggcgcttgtgggaaattggactagagctgtaagccttgtcgtgcagcatatcgacaatctgaacggtcaaaataatcgtgaaggtgtttgaagctgttcaggcgaaaaagatatccatagagcgcatgcttgctgagatcaggcaagcgcctcttagttgtaattaccgtcgtgcttgccagttccgacccagcctggctcaccagctcgagatacatgctggatcgctgacccttgtgctccgcccccctccagaatcttcttcttcggtatgtctgcagcggagtctgaagtcctcgacgcgaagttgccaagtcccccaagatgaaaattaacgttcttttgttcgtgcaggatatgatcaaggaatgatgggcggcgtcaacggcgctcttgactacgtgaccacgatgggactgggatacgtcacgccgggcgtagatggggccaagccgaccgccaccgtcacgcagtcgacgaagcaggtgagtcgtcggcaacgcatctatcttgtttttgtcccgccggccacgatacctttactgaactgctgtttgcatacagggaggaatcgtctcggcctactgtacgtcccgatcgtgtctccttcccgttttcaacctgacaccggtttctctccagacctcggaactcttttgggatgcttgctcggcgggtggctcggcgataggctcggtcgcaagaagaccatctggattgggtgcatttggatcactatcggagctcccttgcaggtgagtcggagttcactcttgccaccgttccgaaagccgcgatttcactttcgccaccgttccgaaatgaactcccgccaccgctccggaagctggcgctgacctccctctctctccgacaggcagctgcacagaacgtcccctggatggtcatggcgcggatcatcaccggagtcggcacgggccacctcaacgcgatcgtcccagtctggtccgccgaaacttccggtcatctctctcgcgggttcttcattgcgcttgaattcacgctcaacatattcggcgtggtcggtctatggttattcattcgtcttctgacccgcgtcctcgtggctgacgaagttgattcaccgccgccccaggttgtcgcatactggctcggttcgtttctcccgcgtctattgccgaaggagacggcgctgagtgaacgcgtcatacagagtatggactgtccttcatcggcgacgggaacacccagatccgctggcggttcccaatcgcgttccagctcgtgtaagtttcgcttacccgaccgtcgcagcagatcagacatactgatgtacgccggctctatagacctcttctcggcctcgcaatctgcaccttcttcatgcccggtacgcatttcgcctttttccggagcggacttcctcgctgactctcccgacaattgcagaatcgcctcgatggctcctcaaggcagggtatcgcgacgaggcgctgcatgtcctcactcgcttgcgctccgaagacggtcagatcaacgcggaagcccaggccgaatttgacgagatcgaccgagcgattcaaatcgacggtgcggcagaacccggctacatcgacatgacattccgctcgcacggcaagctgcatctgtcacgaagggtacgtcagattggcaaacagcgatgaaagctccgactgaccgaatcgctgttaccaacagactcagctcgcgatgtgagatcaatttgtctcctgctttccgttcctcgcgctgaccttttctctcgttctcagctggatccagatccttcaagagtggggcggtatcgccgctatcacgggtgagttccttatcgggctggtcggacgagaaaagcgcctgacgattcttttcccttcagtctaccaaccggtcatcttcggtctcgccggcttcgacgcttcgaaggcaggctgggtatcgggagtcaacacgatcacctacatgttttctacgtgagtattcaccttctccttgccacttggcgagacgtggtcgctgcaactgagtcgattttcttttgcagtcttatctgcgtcttcactctcgaccgtatcggtcgccgtgtcacgctcttctggggtacgttccacttggtcttttctttcttcggcttgctcttgaagcgatcactgacgaaacatgaccatgcgcaggcggcgcggttcaggctttcgcgctcatcatggcgggcgtcttcgtccaccttctcaccgttcaccccgaaaagacggctcagtacggaggtgctgctaccgctatggtgttccttgtgcgtcaagaaatgttgtctcactgtcacagactcggaatttgctgaccgggtctttcttctccagtacaccgcaactttcggcgcaacttgtgagaagtctcgccgcttcttctttgagcgaaatgaacctgacctttgtttcactacttcttaccgaaagggctcaccgtaccctggatctaccccgtgagtggcgatgccttccgccaagcgtagtcttcacattgctgacgccactcgtcttcaggccgaaatctggcccgtcaacgcacgagcgaaaggaaacgctatgggagtcgtcggatggtcgatcggtaacggatggtgcaccctcctggtccccgtcatgttcgacaagattaaggaggtcagtcccggtttttttgccgtccgtcgtcttcgctctgcctcaggtatgctgactgcctgcggtctacagaatgccctctacatcttcggcattgctaatattctcgctatcgctgtcgtgtgggcattctaccccgagaccgcgaaccgcactctcgaaggtgcgctcgtccgttcctcttccaaacgctcgcaaccccttctgactttcgagccttgccgtcttcacacagagatcgacttccttttcttcagcgacagctggttcgtgtggcacgccgaggcagagtactcgcgcctcaagaaggaactcgaggtcaccggcgaggtcccggacgatctcaagacgtcgacccacctcaaggagaagatcagcctcgacagcgccgcggcttgaacacaagagcactttccgtcggttctctagactcgtgtatatataaattctttgcctcgatcttcgcaatgtaccttcttgatgggagttcggtcctttcggtccttgatcctcttccaccttagacacattgttaccatgaggcgtctctccacgtcggaagtacggcacgctgccaacagtgcgggcgatgcgagataattgaatgggtcgcagagcaacttatgaagtctacgagatgtcaacattgacgcgattgacattcgggcgactccccgcttggcctcttcgctctcacccggcacgccaccgccacagtcctggggcctgcaagggggtcaacgtccttgcgttgcttgattgagaccggctggacgtgaaacggacgcgctctcaagcggcgccaccggcgacaagagatccgtgctggacgaggaccgtgtcgtcaaacctcgagcggtcgtgacaagatgcctgtggtcaccaacccgatcacacccacgctgagcgtctctgaactacgagcgctcgcgaaccggcacgcgctgccgcccatcgtggattctcaactcgccaagacggtgacgctgcgcacgacccgcccgcttcgcgcaggcaagacgcgccagtacagtctacccgaaatcgactttcaactcttggaggccttgggagacggcttactcgaggcgagcatatgccgagtcttgtacacgaacgtcacgagtcgggctgaccgttccgcagtgctgttctccgtgagttgggtttgcgtggtctttactgccgttcagggggtcgcgtggcttattagggtatgctccccatgcaggcttatcggagtgtactccgcaacaatgggctactcgcccagctctcgcacggctaccgccttcatctgacgatgtcgccgcctctcgaccccgcgggcacggcagcaggcgcgccgttctcggtcagcgtgaccaagattctcgccgactcgttcgaagcatacatcggagggttgacgcaggcatcgggcgagcaagtcgcgaggtcgtggctcgaaccactcttgatcgacctgatgggtctgatctatccggccgtggaaggaccggatgcggtttcccgcggtgagtgtcaaagatgcgctggcgttcccgcgctgcagagctgaagaccctttcctttttacaggccagcgtacgccccgtaccgaaccgaacgccacgcctcgcaccgaacccgtcgccgccgaacccgtcgcccagcgacctccgaagcgtccgcgcgacgacgcatagcaaacatggcagtgtcgctcttctcttttgcttgcttgactagcttgacttcgagcctgtgtgaattcgattcgaacagcaattctgcggcgagcttgcaccaagtcaccagagatccagaacgaaagagagactggctacgagagctgtcttcgttcagtggcttttggggtgccaagagtatagtagggcgtagaagaagctgaaaagagggaccgagaaagaacacgatgacaactctgtccatttcgctacacacgtctgcaaacccgttctacatgctcgtgtccacccggcaaagctcagtcgcgaccagcgcacacctcgccacgggaaaagatcccgagattgtctatatgatatccttgaaaaccggctcgaaacacttgtgtccttcagtggaagggcacgttgcgaatgcgaccgcccgagccaaattgccggtgcggcagcgcgacttcaaggtcgcgacgaacgcggcgagtcaggcgcttcgagtcggccttggcgagcgagcaacccttgaccggtccggggcagacggcgtcgatcgagcccgacttggtgacggcgttggtgacgcactgctggacctgcgagatgcacgagacgtacgcggcgccgtacgaagtctggttgttgaagaacgactcgagcgacgagttgagttcggcttgcgtgaggttgtgcgtgttcgcggtcgagttgttgagcagagtcgacgagtagtcgacgaggtcggtgaagaaggacgaggggaggtagccgtcgtactgctgcgcgatcgagaggatcgtcgtctgcgtgacgacgggagcggcggactgggtgatacattcctgagcggcggtggcgttgccggctgttgagaaggtcgacttgggtcagccatgcgatctcgacaacacgtccataaggtcatcgagacgcactggagatgagttccgcagcgcacgactgcaagatctcggcggcggtgaccgtgttgcccgagagcgtcgacgcgaccgagttgatcgcgttcgagatctgggcgccgacctgcgcgccgagctgagcgctcggggtcgtcgcgttctggatgttgtacgagaggatgttttcgacgctggtggtcaaggaagcgggcaagacgccgacaaactgctcgaggacgccgttcatggccgtctggagcgtcgtgtaggctccgccgggcttggtgaagcacgcgagcgaggaggtgttgccggcctgctggatcgcgtccgtgtagcactgcgagacctgctcgagagccgtgaccgagttgccggacagcgaagcgatgaccgactggatcgaagactggatctgggtgacgagggcctgctccgacgcgggcaggagcgtgccgagcaacggcgtgacggcgtcaaagacggacgagaggatcgtgttcggaaggatgccgacgaactgtgtgcgttcaagtcagtacgagcgcggaaaggcggacgcgcacgcgatgaaagctcacctgctcgaggatcgtgttgagcgtcgcctggagaccagccgagtcgctgccggtcggagtcaagcacgagtatccggagggcataccacccgcggcgagaacctccgagagacacttttcgagcgctgccgtcgtggtggcattcaagtcactctggctcatattggcggcagcaaaggcctcgtcgagagcctgcttgatgttgagggaggcagtgacggcgtccgaagttgtgatcagagtcgacgtcgagacttggagctcggtgatgttgcgagtgacggtgatgtagaccggagccggagtcggagcgaggagagccgagatggtgccgttggcggcgaccgctgtaccgttcacggatgcggtgctgttggcgacggcggtggcggtggcggtagcggtaatgttttcggccaagatggtcgtcaccgccggcttggtgtgagtgactgagggtacaaacgcgggatcagcgatcgcgcaacaaaacgacgcgaggcaaatcgggaccaactcgccagtgatggtcgtcgcgctaggtttgccgacttgcttctggatgacgctcgagatggctgtactctccgaaaggcgagtcagtacgagtgaaggggaccagagaagccataatttctgcgcaactcaccgccggaaagggcgcccgcgactgcaggcgggatgtacgagctgtcggcgaacgatccgacggcttcggcggcacccttggcgacagtctgcggcgaagcgccctggaccttgggcgccggcttcgacttgatcttggacgcgttcttggtccacgacttggacgaggcggacgagggagacttgggcttggaggcggtctgatccgacttgtggacgacgggtgcggcgttataagagttgtcttgcgaggaggtggaggacgacgagccggacgacttggacgacgacgacgacgacgacgacttgtgggaagcctgtttcttcttgctcgacgatgacgactttttcggcgacgggttgacgagcttctgaacctcagggacggtgtactcgcccggcttgtggatcacgcccgggtgatcggagcaaggttcgggcgacgcggcgaccaagagcgcgagtgacgagagggcgagcgaggtgaggctgaaggaacgcatgacggagtcgagttggtcttggccggtgtgtgtgagggggtggtagtacgagggagtgtgcgacgcgtcgggtgaaaggggacagggaaagaaagtgtgaaggtccgcgggacgaagcgagcgtgaatttaaaggaacgagtggaaggtccgcgggcgaagtgcgcggtgggggtccgagagccgctttgtgacgagagtgcaggaaaggaggagatggagaaggagagaaagcgagaaagagagaagggcgcaagacgcgaagaaagtcgcgtcgcgtcgtaaaagcgcgccgccgaaagattcacgtgcgcgtcgagatgatcggatcggcggccgacccgcatgcattatggccatcgcaactgtatgtattgcgaggctgcaaagcacacagagttgtacagaggccgagcgagcatcccgtccaacaaactcgggtcggttccagcaaatcgctcggagcgactcggaaggcgaggtaccagcgtagcctcagccacagtggacagcggactccgacgaagcctatcaggtcgtacgatgaagcatagtcggccggtcgctgagagttagagcggcggtctatgtgctgttccagggatggccttggatgacgtcggcggttgagctgcctggtctggcgaggacggcgggccgcgtgctatggcgaggagaggcatggtacgaataactggccgatgtgtccccgcagcaggcagtctagccggttgagtgatccggagcaaagtcgaggagagaaaaagagaagcgtcgctgctcccgac

SEQ ID NO: 51 - DNA, 21152 bp, unidentified
  misc_feature 1..21152: note = Fanzor polypeptide
  source 1..21152: mol_type = other DNA
ccggcgcgtcatcctcgcctccgacatctaccgcgggatactccttcagccggtctttcaggacaaccccatccctgatggcctcacccacgccaacgtcatggaccggtggagcgaggccggcggcatgttcgccgtctcactcttcaccgacattgccgtctttcgcctccttggaccttccctaatgttgtagactagtagaccttatttgttgtttgttgttagtcttattctcccccagacagactcgtcagctcgtgttacagagacgagtcagcagaagaggagagcaggcattggggacctttacacaccgcgtgtaaaaaaaatcccgcgaagtctgcaaacgggcttttctgtacggtcgcggggcccatctctgccctatactacgtatacacttatcgctacaacatacgcgactgctgcaactgtgtgccgtacccctcaacttcaccggacttgccattcggctgtgaaaattcctgagatgcagagggcactcgtctcaagcggatgcgagacgaggctactctgctgacagggagatgaccgtagagagacactcaacaataacactgaatcgagcgtagattgcgagatgtgagcggtgaagaagaaaagagaggggagcccgagggcgagctacgacaaagtgcgcccgagatcctcctccaacctccacttgccgcctcatccgaataacgtgtcgtcgtcttgatcttgagcccgagagtatggtagtagtctagggggagagatcaagtcagcgagggttcgaatgaaaaagcgagcgagtgaaaaggacttagatctggaaaaggccttgaaggagcgagagcgagacgagtctgcagaacgagtcctagcatgagacttaatggacgtagcgagagcgccacgcgttatatgactccgcctttagcaatcgccccactcccgacgttcagaccattctaaagacaggcaccctctgtgtcgcttgtacttacgaggcgctgtacggccgccgccaccttcttgtcaataactgcagtcggccttgcgcctgagaaggtcccgttctaacctctgcacacggccctacacactgtattcgggtaagataagagctggaccagaatcaagcgggttcaatccgctatatctgtccaatttttccgcagatttgcgttccgaaagacacagaacctccgtctcctttgaatcggcgagcggaatcgccttgttccgtcggaagcatgtcccatatggccgctttctgcttcattctgctctcaaaaggtaatgccaagtgactgaatgccgtagtcagtggcacgaatccctcacgagtcctccggcaagtattctgtctcgaagacgattttcggtgggtggcggagtggcggcacccaccaaaagcgctcgattgcttttagcgtgtcaatacggagcccataggagtcggcgttgtagtggtatgccgctacagctggtagctccagatatcacccgttatgcagctccatgtcccactctatcgtatatgcgttgaccgccttgattgcacgcatttgtgtctcatttgcgtatatagctcaatttgcacagaacacttgcaatacgtgagtaacgtagcggttaaagtgttagcgttcggttcggtatacactttttgtcagccgagcgttcgcttcccggtgagagcatagagacaacggttctgcgttcagacggccatacttatcgcacctcctctcagacgctacaggctgctcagacaccgtccagatgacccaagtaagccaggccgttcagacgctgtccagactgatgaatccctttggcacggttgctgatcgggccgctggcgccttggaaggccgctcatccaaggagatcttcatcgagcactaccactcaatgctaggacatcagtccgatcgaatcctgcgacactacatgcgtcagcattactggtggccagaaatggtgaaggaaatcgaggcttactgccgaacttgcgcatcctgccaagctagcaaacccgaacgagccgcaccgagaggaaagctacaccctatccagctcccgttcacagcatacgaagagatttcgattgatttcaccggaccgcaccctgtcagcattgatgcggacggaatcgcgagattacattttcaccgtgattgacgccgcctccggagaagtcaagctcattccgtgcatgaaggccggtttgacgagcgcaaaatgcgcccaaatcttcctcgagaaagtgtacccgcaatggggtactccgaagacgatcctgtcggaccaagacgtccgctgggtttccgcgttctggaaagcgttccacaacgctctcggaacgacgctgcacgtgtcaaccggagcggccccttgtcgagttggccgccgctccgattggccaactcggccgctccggccatctcgacaggggatccggagcttgtcccggcggccgctgcgatggctcgattccatgcagctgatttgttctaccgagcgcatgcgagagatttacagtcgaccaccctatactaccgtgatcttgtggcgcgcaaggggcgcggtgctgcgcgccgaaatctgtatggtattctcaaactcaaatgatccggatcggctggcgcggctgcaagaggcctccacttgattggttgcctcgagaacttgaagtagtcgctagatacggttgacttagccgtttaaatacaagctatagtctcgcaaatagcgatagggaggagaatagctaaggacagctagtgtcggtagaattcgcccgagggagaagaaggaagacaaaagtcacgacgagaactacgctcagagtgcggagaccgcgggtacatgtggggggaccgggacaggtacatagtcacgatggagatcacagaaaggccgtgcttgtcgatccagattcgagaggcgagagagggcaggaagtcggaggagcgaaggatgatcgcttcgctcagaggtgtgacttggcgaggtgactcagagagcgaccctttttagcggtcgcggcggcggtgcctttgcaggtacgcttgcggcgaaccgagatcttcgcggaggtcgtttcggccgtatagcgcgggagcgaggcgttcgcgagacgaggggatcgacggagcttttggggcgacgacgccacggcgaccactcccggcatgatcggctgttcggcgcgtggggtgtcatgacgaggggtaacgggagcttgatcgacctccggcgtcggtccggcgaagtgagcggcaggggcgaagagttcgggagattgagcgcgttcgtccgcgtcgctcgagctcgtcatcgacggcgtggggccatcgaagagacccaatcccgcagcgttgatcaccaccttgaggtacgcgtcatcgagactccgaatggcgggttgtccgggttgagcgggagcgtgaagggccaagtcgagatccggcacgaaaggttgaggatggtgttccccgctcgagctcgcgagcgcgttccttccgtagaggtccgcggtgccaaagccagggctatcgaggctgccttcgcgaggagagaattccgggctagtgacgggcgagtgcgtaggccgaaaaccaggcgaaggaggggacttgcgtccctcgtcggcccagcggacgaagtggcgggctgacgtggcaggaggaggcggcgcagccgactcttgcgagggcgcggctctcgcagcagcgctcgatctcgctcgcggcagcggcccttcgcctcgtgctacacatcgacaccgacgactgtgcaccccagggcacccgcccgatctctcgagtacgcccgactccgcttttgaggactcgacggcaggacctttgtcgacaacaatgcaagttggaggccctctccgctcggtcgcatgggcagcgacaccctctcactcgagagtccgcgcgcagcatgcacgcagggcaacgacggcgttcttcgacggcataggcatcatcaacctttgcccgagacggccgcaggcgctgcgatccgtcgacgatggcattggagggaggaggcgccggcacgctctcggctcgctcgggaggcgtcgtatcccaggtgggcagattccttttgagagacgcgtgtgaagagtaacatgtgctgatgcaaagactacgatgtcggcaaaaggcgaccgaccaactcggaccttgagactcgaactgtgggcccgctgcactcagaccttgggtgggtccgacccaaggtctgagtgactgaggggcggcttttggcggcatgcctcggttgagatcgagatcgcaacaagggttgctcagcacaggcttgttcgcggagatgaactgactccgagttgcaccacagtgtagtcgccgatcgcgtgacgaaatgacgaccccgacaccgctggtgagaacgttgtgccaaaaagtatccgcgggctttcggtcgctgtttcgccgaagcagtacgccaatctgacgcgcgtgataccgcactcggttgttccaagttgacgggacaagaggctcagaatacaaggcggtatgggtggcaagagtcgcgggaacgggtgggcgtgcgagcctcgaaggcaaactgctgcaccaagtctgcactgactacgtcggtacgaagagacgtgtcacgtacggtcaagaggatgagatcgaattcaggggcggcggggtattgatcgatcacacgagatcgaaagggaaccgtctcgcgctgacccggttatcgtcgtttcgaggctggcccagagccgcgaggctatcctgctggcgatgaatggctcatgcgcagtctcaagactgaacaaggagcccgcagtgctgatcgacgctcgactccggcgagcacagaagggaagccgctcggacgcggatgccgctctcgcgtgcaacatcgccacgacgcgcatcgtgatcgaactgcgaccttggtcgaagggcgactccagtcctgacgtgcgacggacaggcgaacttgctcgagctctccctcgtcgcaatggcctcctgacttaaaacggcgtgctgtcctcgtgaccgaccgtcgataagaggagcagatggcattgacggagctaacctcaagcgctcatcgctgactgcgcgagtgcgccattctttgctacgcttgctctggagcacgcgataagctcacaagctggcagcgggccgaaatcagagcttgagcgccaaagaacccgcatgcgacgctgcgaacggaacacgcgggtaatgaactgcgacttgcttcatgcgtgacagtcaccatagcgacgcttggagtgcccgcttggaggggaaaaagtcgccgcggacaccccgcgagtgggcggacgggcgaaaggacttctccctttctcgctctaacatttgcctttactgcaaacgcttgaaggagacctcgcctcgcaccaaagcttgctctaagcgctcatatcacccatttccaaccccgccggctgcctccgctctcaacctccgactctcgaggcgcacgaaccccttctcccgttgtcccctcgacgacaaccgccgaatgctgctgccgcgcacgcagctcttgcttgtgctcgcggcttccatcgtactcgcctcgttaaccgcccgcctcgccaactggacgggaacaggaaaacagcagtccttcggagtccgcggagccggcctcgtgcacggacccttgtgagtacattgagccaagttttaccgcgcggcaaaggaaactgatgcctacaatccacaacacagcgacatgggccagaagaccctcatggcgcacttgcggggcatcgcgcgcgagcagctccagacggcgcacgcgacgaccatgatggagaccgggaccggcatcaaggccacactcgggctggtcccgaggagctttggcggaagtgagttggacagctgcttactcatagccagcctcgactgaccagtggaccatcggaacagacgagtatgtcgttgtccgcgacctgaaccccgtacgattccagcttcgccaagggacgctccagtcggcgacgtgggtgagggacaagtccgccacgaacgtcgccaacaacctcgcagctgccgagcgagccaagatcgaagagatggaccgcgagatccgcgaggtcctgggcgccgagaccgtcatcatcaacattgtcgacggcgacaagaggccggaggcaaaggcagctaccctctccgaccgtcaccgtcgcttctcgcggaggcaccaccaggaatcgaagctgccctgcgggaagaagcgcgtcgagctcgaacagaccccgcccaacgactcggactggatccaccgcgctgtgagtcctttgtctggtccagtcacacacataacggagcgggagctcacgcaaactttcaaaacagggcgacgagaagacgatctactttgttgcgcccgacgaagcagatcgcctagtacagcatcttgtgacgcagtcgttcgacacaccaaagtacgacctccccgccaactctcccttcgccaacagcaacatcgatcggctcatcgacatcgtcaagcgatacccgccgtggcgtcgaattatccatacgcgcgacctcgatgcagtcatgcacacgacggcgtgcgaggcatggttcgtcctcctcacctcgtggtcaaaagtcgaggagggggcggtccttacctcggacgccacggtactcgaagacatgctcgagccgtacgttgccgagggagcgcagcggctgcattccgtccagcgcgatgtttctgctgccgctccctctgcaccaaggactggccgtggcggcgccctaggcaagaaggcgccgctgccagctcgtccaaacctccccgtgctcttgactcagctcggcgcacagtcggcattccgcccaacatccctcgacagattgccaaccgaacgacgccggggcgatacaatcgtcgtctttctccccggcgtcgacgctctcccaggcttcggcagagatcaatgtcgccgtgcgcgcgtgtcgagccttctgggaaacgactacaccggcagcggcatcaaaggcatctcttgggcgctcgtctcgagcggtctcggcgagtctttgctttcgatgagggaagaggactggtccgaccctcaaaagctcgagtcgcaggtctcttccctcgtctccctcctcgcctccaccgccgccagagccaagacgtggcgggctggaggcgactttggcgaggtcgccaagatctcgagcaagagcacgtcgatcgggcgcgagcagatcctggacctgatcgagtcggtgcgcgttattcgaggtgagaacgtcaactacgtcgcctcgacgttctaccacaacggcgatccgcgcggacccctgcagttcaagcaagctccgccgtcgactcgcccaaatcgctacgacgtcgactcccgccagccaagccatccctacctctctcgcccaggtccgcaacacgtcgtgccacaaggtctgaaccagtcgccgacgctgccgacgagcatcgtcaacccacgcctctcgaacccgctacaaccgtctcggacggtgcccgctccgggcgagaccgatccctcccgtccaaagatgtcgaagattcgtgttcggccgctgcagatgggaggaagcgggcagagcgtgttcatggctgcgcgaacgcatggtcccgagctcactcctctcgacgacaagaccatcgcgcgaatcatacaagcagacgccagccttcctgtcgaggtcaacgacgacgacgacgcggtcgactcggaactggagattgttcccgaagatgacgacgacgacgacgacgaagacgacttcacagcagtgccaaagcaaaaaggaaagctcaatcgtgtggagtcgtactttgcaacgatcacctcgccgggcaagaaccatgccgccgcgagtcgcaagatcagcgacatcacagagtcgccccgaccagtctcgaccgcttcggcttctgccaacaatgccggccgcagcggcgcacaacagaccgccacgcgtatcacgcgtctcacatcggcaagagctcctccgccagaaccgtcgaggcgcaaagatcgcgaaccagtgcccgcgccccggcagacccgactcgcggggaatcccgcgatcaccgaacaagaggcagctctcgcatcgccagacccgatgctcctcatcatgtcgctcgccgtcaagctcgggaatcgctttgtccacagtgcgtttgcgttcttgctggaactgctgctggaacagggggaggcagggatgatggcgacgagggatctgctactccagcggaaccgagcggcgcagtgcctcggtcgtcttgctgctggcggagcataccgtgcggcgggggagcagtggttcccgcggcaaacccttgttatctctgagctggagaaggtacgtccggtcatacggtcagaatcgagatggacaagagaactgactacagtctctgagcaggaggccgtcaactcggccctcgcctccggtctcgtgcctcctcctcgactctcggtcaaggcgttcacaatagcctacgctcccttccaaaccaacctgaccgaatggccgcgaacgcacacgcgagacgaactcgtcaacttgggccagttcgtcgcgcgcgacctgtccaagaacgcagcagaagcgctgagcaaagtcctgcggaaggcgcacaaggcgttctcgctcgatccggcatcggaggctgccctgcagtcggcaaacatcgaggcttccgctcgattccgcgcgggcctcgggaactggttgggcggggtgctcgcgactgctccgttcagccaggcgtcggctcacgcaggcgccgcgaacgaagaggacaagggactgccgagtcgagaaaagaccacgtcgtacaacttgcgaaagggcacgaccggcaagagcggcgacacgcttcagcaacagcacggcctcggcccgaagatcgacccgactgacccgcgcgaaccccccgctctcgacctcgggaaagagaccgaaaagtcgctcgagcagatgatcaaaaagctcgtcgactcggtcccgcctggcagcatgttcaatcgatcagatatgcatgacgcgctactgcaagacatcaccacgatcgcgcagcgccttctagcatgccgggaccggcatctcgagatggcgctggtgctgctcagatacaagaagatcgagaacgcgacgaccatggccttcgacgacgtccttgcagggaaaatgccagagatgggggccggaacgcttgccaaggggttgctagctctggtgatgagactgcgacagatgagaacgctatcggggatcgagctcataccggtgagctgactggcacggcggcgtcgagcatagtcaaagggagactgactggcttgtccttttgacagtatttcgacccgcaatgggtcgatgtagacctgtacaccctcctccagtccggccaccggcaccgcttcaaggtgctctgcacagatctcgaaagaacctgtaccaagatcgcatgcggcctcctcccgttcgtcgatgaagacgaagggagaagagtcgagctctttgacctcttcaggcgggtgttcgaagtgtggcggattgacgaggacgaccccgacaacagagacaaggactcgccttggtcctggatcgaggccgagaggacacggtcgacgagcatccgcctggtcgtcaagaaggagagcgtgtccctcgtcgccaacctcgatcgggtcctgcgcattgtgtttggcgtggaggagaccttctacacctacatgaggcggaccggagctcaagtcgaggtgatgaaccagctcttcgatcatcgaatgttgccgaacaagttcgttcccaccgggcacatgcgcatgtcctcaacaaaggtccagttcaccggagtcgacattacgaagatgaccaaacttggacgagaggcgctgccggagaagagtatggctgtctgatgccgaaaagaattgagctgcgctgactcgccctacccagatctcgacgcaggaaccgcatgggcgcacgtctcacaactaccgctcactcaactgaaggtcaaggagtactttgccaagatgatgccgtcctttcagcgtcgcgtcgtcaacggcgagatcgtgtttgtaccgatcgtcgccatcgcaaaacccgacgcagacgtgatgctctcggaacggcgcgatccattgccgcccagatccgctcctcaggaagggctctcgcgcaaagagcgacggcgcgagcggcagcggcaagacgccctggaccgagatcgctccccggtcgacctccgaacgccggtacgcgagaaggcgccaccaagtcgaacgcgaaaggggataccggtgtcttggccaaacctgcgattcgaggggggaaggaagttggtcaatgactttcttggagacaccccgctcgaccacatccactccgccagcatcgacaccggcgtcgtctgtccagtcgcgaccttcatctcgaatccggttcgggacggcttaccaacgcagcgtgccgaggcggtggcgacctattcgcgtgagactctgctcacccagcagcgtcagaccagccgccaagcttcacacctcaactcgtatctgtcgaaccagttcgactttacccgatgggcggatccagcttccacagatgttcgagcgtcgggtacgtcgccaatgccagaaccggatccgatgcaagaccctctgctggtgaccggtctgcacttgctcaagagcatgcactcggtcttcgacgggcggtcgatccagagcaaggtcgagcgcaaggccgaggtcagttcggtggcatctcagcacgtcgatctgatattgggtggcaaggatcgctggaccgaagaggaccgcaagacgcgcaaggtcgttgtcatggtcggctcagcggacgatctcgcgaaatcttccggaatgaagggtgctgtcaccgccaacgtccttgtgcgggaaatctctgccgagctcgcgcgccgcagggtcaacttcatgatctgcgttgttcccgagaactacacatcccaacggtgcccgaacccggactgcgtcgatgcgcagggtcgccgatctcggtacgtttgctctcgtgtactctgagggtgatgcagctgaccgactggtgatctttggggacagagcggagaacccgcgtcaccagggtggaggaccaaactaccgtctcctccaatgccagcgatgtagggcggtcttccaccgggacggagtcggggctgccaacattgggagtatggggtggtgcctgctgcggagtgggttgcagctgtggggggagaactggatgggaccaggaggaaaaaaacttgcggaagcgaaaaatccctaaaaaaggggggatcaatgggatctacttgtagaaccctcgctttctccgtgatcaatctgacttctatctcctgtgtgcggtaaccacaaacaggcgcttgcgcttgcgcttccacgtccgcaaagaggcgcttggcgcttctgctcccctatggccccggcctgcttgagactccgtgtgtggactcgcatggtacagatcgacgggtctgaccgttgagaatgccggacaacgcgccggcgcgtgcgacagagcgcccgaagctttggagccggatcgggattgccggatttctcccctctcaacggtggaaagggcgtctacagatgcacatgtaccccctagtctgatcaagcttgcaccccgcggttctgccgtatccaacggtctgcgacgacgctggcacaagggcctttttcggcgaaagaggcgcttctcgcaactcgccgacggttcccgcagggatgctgggtaactctgggacggttgtaaccttcaaatggactgtatctaccgttttcaacaccagaatacgttcgtgggagaggcggcgaggccgacgactgccctggccgagtcttggagcacccgccccggcctctgcacggtcgaaaatcccaaaactctccctcatacgaccaaaaatcgtcaccgagatgctatgcttgatgtacggccccgcgccgagctctccggaacagtccgggacccaattcctgactttctcgccactcagtctcagtgttccaacttctaagcgcattgtgggtctggttacttctttcatcttgttgacagcatcagaactgacatgtaccatgttgacggattccgtcgtatcttcagaccgagctggcaaacatgattctgagccaggaaaagccggtgagttcagtgtgatgaagccatggcttgtcctgaacagttctctttgtgaatgcattcttctgaaatttgctgcttacagagaaatgactcggccgagggccggcaagcggtgagctcgagacttccaagccgaagaagcgcctgagccctctgctcaacactctgcagagccgagcaagggcagcggaccgcatgcgataccgagagcagcattgggagttctgaatgcgagaggtttgagagcccctcaaaggttgtctgaggaggagggaagaggaagagggagaggtggcaaagccggcttgctcctttttgatacgcgagcgaggtgcagcgaccgcggtgtctcttactcttgcgacactgcccacgggccgcttttcgagaaaggtgttccggcggcggccggccttaacaaaaccaaatccaggacgcgcgagaacgctcaagtcgagacaaggagacgctctcatgcgcgagggcactgaccttgacgggatcccagccctttgaatgcgctacaaagagtgtgtttcccagtgtccagccaagcaaacccgcggctgcagctgcgaggtgcgcaagttcaggagaaggtgcgcaagttcaggagattccaagacgtgacctcccgttgttcactcgttcgcacgcgtccaccaggttattgtatctgcaattttagctcgacggagcgaagccctgctcatgtatttgactatggagcatttgactgtgctgcattgcccacattcttgcagacacgggcaagtcagagaagaagaaaccgagcgcgagttgcgccacccgcaaataccctccggactgaaccgctgaagggccgacgacctgtccctgaccagtagaagtgtcgggatcccttgacttacgaccagcaggtcttgcatgtcgcccagaatcgtcaaaactgattcctcctggttgcgctcaaaagccggatggtcaggccgtgtagacccaaatcgcctgaaacttcgcaccctgggcccctataggtcaaagtccagccggccacaagctcagcccatttcaacggcggtagaggtctgccgagcgaggcgcttgtgggaaattggactagagctgtaagccttgtcgtgcagcatatcgacaatctgaacggtcaaaataatcgtgaaggtgtttgaagctgttcaggcgaaaaagatatccatagagcgcatgcttgctgagatcaggcaagcgcctcttagttgtaattaccgtcgtgcgtgccagttccgacccagcctggctcaccagctcgagatacatgctggatcgctgacccttgtgctccgcccccctccagaatcttcttcttcggtatgtctgcagcggagtctgaagtcctcgacgcgaagttgccaagtcccccaagatgaaaattaacgttcttttgttcgtgcaggatatgatcaaggaatgatgggcggcgtcaacggcgctcttgactacgtgaccacgatgggactgggatacgtcacgccgggcgtagatggggccaagccgaccgccaccgtcacgcagtcgacgaagcaggtgagtcgtcggcaacgcatctatcttgtttttgtcccgccggccacgatacctttactgaactgctgtttgcatacagggaggaatcgtctcggcctactgtacgtcccgatcgtgtctccttcccgttttcaacctgacaccggtttctctccagacctcggaactcttttgggatgcttgctcggcgggtggctcggcgataggctcggtcgcaagaagaccatctggattgggtgcatttggatcactatcggagctcccttgcaggtgagtcggagttcactcttgccaccgttccgaaagccgcgatttcactttcgccaccgttccgaaatgaactcccgccaccgctccggaagctggcgctgacctccctctctctccgacaggcagctgcacagaacgtcccctggatggtcatggcgcggatcatcaccggagtcggcacgggccacctcaacgcgatcgtcccagtctggtccgccgaaacttccggtcatctctctcgcgggttcttcattgcgcttgaattcacgctcaacatattcggcgtggtcggtctatggttattcattcgtcttctgacccgcgtcctcgtggctgacgaagttgattcaccgccgccccaggttgtcgcatactggctcggttcgtttctcccgcgtctattgccgaaggagacggcgctgagtgaacgcgtcatacagagtatggactgtccttcatcggcgacgggaacacccagatccgctggcggttcccaatcgcgttccagctcgtgtaagtttcgcttacccgaccgtcgcagcagatcagacatactgatgtacgccggctctatagacctcttctcggcctcgcaatctgcaccttcttcatgcccggtacgcatttcgcctttttccggagcggacttcctcgctgactctcccgacaattgcagaatcgcctcgatggctcctcaaggcagggtatcgcgacgaggcgctgcatgtcctcactcgcttgcgctccgaagacggtcagatcaacgcggaagcccaggccgaatttgacgagatcgaccgagcgattcaaatcgacggtgcggcagaacccggctacatcgacatgacattccgctcgcacggcaagctgcatctgtcacgaagggtacgtcagattggcaaacagcgatgaaagctccgactgaccgaatcgctgttaccaacagactcagctcgcgatgtgagatcaatttgtctcctgctttccgttcctcgcgctgaccttttctctcgttctcagctggatccagatccttcaagagtggggcggtatcgccgctatcacgggtgagttccttatcgggctggtcggacgagaaaagcgcctgacgattcttttcccttcagtctaccaaccggtcatcttcggtctcgccggcttcgacgcttcgaaggcaggctgggtatcgggagtcaacacgatcacctacatgttttctacgtgagtattcaccttctccttgccacttggcgagacgtggtcgctgcaactgagtcgattttcttttgcagtcttatctgcgtcttcactctcgaccgtatcggtcgccgtgtcacgctcttctggggtacgttccacttggtcttttctttcttcggcttgctcttgaagcgatcactgacgaaacatgaccatgcgcaggcggcgcggttcaggctttcgcgctcatcatggcgggcgtcttcgtccaccttctcaccgttcaccccgaaaagacggctcagtacggaggtgctgctaccgctatggtgttccttgtgcgtcaagaaatgttgtctcactgtcacagactcggaatttgctgaccgggtctttcttttccagtacaccgcaactttcggcgcaacttgtgagaagtctcgccgcttcttctttgagcgaaatgaacctgacctttgtttcactacttcttaccgaaagggctcaccgtaccctggatctaccccgtgagtggcgatgccttccgccaagcgtagtcttcacattgctgacgccactcgtcttcaggccgaaatctggcccgtcaacgcacgagcgaaaggaaacgctatgggagtcgtcggatggtcgatcggtaacggatggtgcaccctcctggtccccgtcatgttcgacaagattaaggaggtcagtcccggtttttttgccgtccgtcgtcttcgctctgcctcaggtatgctgactgcctgcggtctacagaatgccctctacatcttcggcattgctaatattctcgctatcgctgtcgtgtgggcattctaccccgagaccgcgaaccgcactctcgaaggtgcgctcgtccgttcctcttccaaacgctcgcaaccccttctgactttcgagccttgccgtcttcacacagagatcgacttccttttcttcagcgacagctggttcgtgtggcacgccgaggcagagtactcgcgcctcaagaaggaactcgaggtcaccggcgaggtcccggacgatctcaagacgtcgacccacctcaaggagaagatcagcctcgacagcgccgcggcttgaacacaagagcactttccgtcggttctctagactcgtgtatatataaattctttgcctcgatcttcgcaatgtaccttcttgatgggagttcggtcctttcggtccttgatcctcttccaccttagacacattgttaccatgaggcgtctctccacgtcggaagtacggcacgctgccaacagtgcgggcgatgcgagataattgaatgggtcgcagagcaacttatgaagtctacgagatgtcaacattgacgcgattgacattcgggcgactccccgcttggcctcttcgctctcacccggcacgccaccgccacagtcctggggcctgcaagggggtcaacgtccttgcgttgcttgattgagaccggctggacgtgaaacggacgcgctctcaagcggcgccaccggcgacaagagatccgtgctggacgaggaccgtgtcgtcaaacctcgagcggtcgtgacaagatgcctgtggtcaccaacccgatcacacccacgctgagcgtctctgaactacgggcgctcgcgaaccggcacgcgctgccgcccatcgtggattctcaactcgccaagacggtgacgctgcgcacgacccgcccgcttcgcgcaggcaagacgcgccagtacagtctacccgaaatcgactttcaactcttggaggccttgggagacggcttactcgaggcgagcatatgccgagtcttgtacacgaacgtcacgagtcgggctgaccgttccgcagtgctgttctccgtgagttgggtttgcgtggtctttactgccgttcagggggtcgcgtggcttgttagggtatgctccccatgcaggcttatcggagtgtactccgcaacaatgggctactcgcccagctctcgcacggctaccgccttcatctgacgatgtcgccgcctctcgaccccgcgggcacggcagcaggcgcgccgttctcggtcagcgtgaccaagattctcgccgactcgttcgaagcatacatcggagggttgacgcaggcatcgggcgagcaagtcgcgaggtcgtggctcgaaccactcttgatcgacctgatgggtctgatctatccggccgtggaaggaccggatgcggtttcccgcggtgagtgtcaaagatgcgctggcgttcccgcgctgcagagctgaagaccctttcctttttacaggccagcgtacgccccgtaccgaaccgaacgccacgcctcgcaccgaacccgtcgccgccgaacccgtcgcccagcgacctccgaagcgtccgcgcgacgacgcatagcaaacatggcagtgtcgctcttctcttttgcttgcttgactagcttgacttcgagcctgtgtgaattcgattcgaacagcaattctgcggcgagcttgcaccaagtcaccagagatccagaacgaaagagagactggctacgagagctgtcttcgttcagtggcttttggggtgccaagagtatagtagggcgtagaagaagctgaaaagagggaccgagaaagaacacgatgacaactctgtccatttcgctacacacgtctgcaaacccgttctacatgctcgtgtccacccggcaaagctcagtcgcgaccagcgcacacctcgccacgggaaaagatcccgagattgtctatatgatatccttgaaaaccggctcgaaacacttgtgtccttcagtggaagggcacgttgcgaatgcgaccgcccgagccaaattgccggtgcggcagcgcgacttcaaggtcgcgacgaacgcggcgagtcaggcgcttcgagtcggccttggcgagcgagcaacccttgaccggtccggggcagacggcgtcgatcgagcccgacttggtgacggcgttggtgacgcactgctggacctgcgagatgcacgagacgtacgcggcgccgtacgaagtctggttgttgaagaacgactcgagcgacgagttgagttcggcttgcgtgaggttgtgcgcgttcgcggtcgagttgagcagagtggacgagtagtcgacgaggtcggcgaagaaggacgaggggaggtagccgtcgtactgctgtgcgatcgagaggatcgtcgtctgcgtgacgacgggagcggcggactgggtgatacattcctgagcggcggtggcgttgccggctgtcgagaaggtcgacttgggtcagctcattggatctcgaaagaagggcagaaggtcatcgagacgcactggatatgagttccgcagcgcacgactgcaagatctcggcggcggtgaccgtgttgcccgagagcgacgacgcgaccgagttgatcgcgttcgagatctgggcgccgacctgcgcgccgagctgagcgctcggggtcgtcgcgttctggatgttgtacgagaggatgttttcgacgctggtggtcaaggaagcgggcaagacgccgacaaactgctcgaggacgccgttcatggccgtctggagcgtcgtgtaggctccgccgggcttggtgaagcacgcgagcgaggaggtgttgccggcctgctggatcgcgtccgtgtagcactgcgagacctgctcgagagccgtgaccgagttgccggacagcgaagcgatgaccgactggatcgaagactggatctgagtgacgagggcctgctccgacgctggcaagagagtgccgagcaagggcgtaacggcgtcaaagacggacgagaggatcgtgttcggaaggatgccgacgaactgtgtgcgttcaagtcagtacgagcgcggaaaggcggacgcgcacgcgatgaaagctcacctgctcgaggatcgtgttgagcgtcgcctggagaccagccgagtcgctgccggtcggagtcaagcacgagtatccggagggcatgccgcccgccgcgagaacctccgagagacacttttcgagcgcggccgtcgtggtggcgttcaggtcgctctggctcagattcgcggcggcaaaagcctcgtcgagagcctgcttgatgttgagcgaggcagtgacggcgtccgaagttgtgatcagagtcgaagtcgagacttggagctcggtgatgttgcgagtgacggtgatgtaaaccggagccggagtcggagcgaggagagccgagatggtgccgttggcggcgaccgctgtaccgttcacggatgcggtgctgttggcgacggcactggcggtggcggtagcagtgatgttgttggccaagatggtcgttacggcaggcttggtgtgggtgactggagggagcgattcgggatcagcaatcgcgcgagaaagaagacgcgaagaaaatcgggaccaactcaccggtgatggtagtcgcgctaggcttgccgacttgcttctggatgacgctcgagatggctgtatcccccgaaacgcgagtcagtaaaggtggaagacagcaaggatttccgcgaaactcaccgccggaaagggcgcccgcgactgccggcgggatgtacgagctgttggcgaacgatccgacggcttcggcggcacccttggcgacagtctgcggcgaagcgccccggaccttgggcgccggcttcgacttgatcttggacgcgttcttggtccacgacttggacgagccggacgagggagacttgggcttggaggcggtctgatccgacttgttgacgacgggtgcggcgttattagagttgtcttgcgaggaggaggaggacgacgagcccgacgacttggacgacgacgacgacgacgacgacttgtgggaagcctgcttcttcttgctcgacgatgacgactttttcggcgacgggttgacgagcttctgaacctcgggtacggtgtactcgcccggcttgtggatcacgcccgggtgatcggagcaaggttcgggcgaggcggcgaccaagagcgcgagtgacgagagggcgagcgaggtgaggctgaaggaacgcatgacggagtcgagttggtcttggccggtgtgtgtgagggggtggtagtacgagggagtgtgcgacgcgtcgggtgaaaggggacagggaaagaaagtgtgaaggtccgcgggacgaagcgagcgtaaatttaaaggaacgagtggaaggtccgcgggcgaagtgcgcggtgggggtccgagagccgctttgtgacgagagtgcaggaaaggaggagatggagaaggagagaaagcgagaaagagagaagggcgcaagacgcgaagaaagtcgcgtcgcgtcgtaaaagcgcgccgccgaaagattcacgtgcgcgtcgagatgatcggatcggcggccgacccgcatgcattatggccatcgcaactgtatgtattgcgaggctgcaaagcacacagagttgtacagaggccgagcgagcatcccgtccaacaaactcgggtcggttccagcaaatcgctcggagcgactcggaaggcgaggtaccagcgtagcctcagccacaggggacagcggactccgacgaagcctatcaggtcgtacgatgaagcatagtcggccggtcgctgagagttagagcggcggtctatgtgctgttccagggatggccttggatgacgtcggcggttgagctgcctggtctggcgaggacggcgggccgcgtgctatggcgaggagaggcatggtacgaataactggccgatgtgtccccgcagcaggcagtctagccggttgagtgatccggagcaaagtccaacaaagtcgaggagagaaaaagagaagcgtcgctgctcccgac

SEQ ID NO: 52 - DNA, 21152 bp, unidentified
  misc_feature 1..21152: note = Fanzor polypeptide
  source 1..21152: mol_type = other DNA
ccggcgcgtcatcctcgcctccgacatctaccgcgggatactccttcagccggtctttcaggacaaccccatccctgatggcctcacccacgccaacgtcatggaccggtggagcgaggccggcggcatgttcgccgtctcactcttcaccgacattgccgtctttcgcctccttggaccttccctaatgttgtagactagtagaccttatttgttgtttgttgttagtcttattctcccccagacagactcgtcagctcgtgttacagagacgagtcagcagaagaggagagcaggcattggggacctttacacaccgcgtgtaaaaaaaatcccgcgaagtctgcaaacgggcttttctgtacggtcgcggggcccatctctgccctatactacgtatacacttatcgctacaacatacgcgactgctgcaactgtgtgccgtacccctcaacttcaccggacttgccattcggctgtgaaaattcctgagatgcagagggcactcgtctcaagcggatgcgagacgaggctactctgctgacagggagatgaccgtagagagacactcaacaataacactgaatcgagcgtagattgcgagatgtgagcggtgaagaagaaaagagaggggagcccgagggcgagctacgacaaagtgcgcccgagatcctcctccaacctccacttgccgcctcatccgaataacgtgtcgtcgtcttgatcttgagcccgagagtatggtagtagtctagggggagagatcaagtcagcgagggttcgaatgaaaaagcgagcgagtgaaaaggacttagatctggaaaaggccttgaaggagcgagagcgagacgagtctgcagaacgagtcctagcatgagacttaatggacgtagcgagagcgccacgcgttatatgactccgcctttagcaatcgccccactcccgacgttcagaccattctaaagacaggcaccctctgtgtcgcttgtacttacgaggcgctgtacggccgccgccaccttcttgtcaataactgcagtcggccttgcgcctgagaaggtcccgttctaacctctgcacacggccctacacactgtattcgggtaagataagagctggaccagaatcaagcgggttcaatccgctatatctgtccaatttttccgcagatttgcgttccgaaagacacagaacctccgtctcctttgaatcggcgagcggaatcgccttgttccgtcggaagcatgtcccatatggccgctttctgcttcattctgctctcaaaaggtaatgccaagtgactgaatgccgtagtcagtggcacgaatccctcacgagtcctccggcaagtattctgtctcgaagacgattttcggtgggtggcggagtggcggcacccaccaaaagcgctcgattgcttttagcgtgtcaatacggagcccataggagtcggcgttgtagtggtatgccgctacagctggtagctccagatatcacccgttatgcagctccatgtcccactctatcgtatatgcgttgaccgccttgattgcacgcatttgtgtctcatttgcgtatatagctcaatttgcacagaacacttgcaatacgtgagtaacgtagcggttaaagtgttagcgttcggttcggtatacactttttgtcagccgagcgttcgcttcccggtgagagcatagagacaacggttctgcgttcagacggccatacttatcgcacctcctctcagacgctacaggctgctcagacaccgtccagatgacccaagtaagccaggccgttcagacgctgtccagactgatgaatccctttggcacggttgctgatcgggccgctggcgccttggaaggccgctcatccaaggagatcttcatcgagcactaccactcaatgctaggacatcagtccgatcgaatcctgcgacactacatgcgtcagcattactggtggccagaaatggtgaaggaaatcgaggcttactgccgaacttgcgcatcctgccaagctagcaaacccgaacgagccgcaccgagaggaaagctacaccctatccagctcccgttcacagcatacgaagagatttcgattgatttcaccggaccgcaccctgtcagcattgatgcggacggaatcgcgagattacattttcaccgtgattgacgccgcctccggagaagtcaagctcattccgtgcatgaaggccggtttgacgagcgcaaaatgcgcccaaatcttcctcgagaaagtgtacccgcaatggggtactccgaagacgatcctgtcggaccaagacgtccgctgggtttccgcgttctggaaagcgttccacaacgctctcggaacgacgctgcacgtgtcaaccggagcggccccttgtcgagttggccgccgctccgattggccaactcggccgctccggccatctcgacaggggatccggagcttgtcccggcggccgctgcgatggctcgattccatgcagctgatttgttctaccgagcgcatgcgagagatttacagtcgaccaccctatactaccgtgatcttgtggcgcgcaaggggcgcggtgctgcgcgccgaaatctgtatggtattctcaaactcaaatgatccggatcggctggcgcggctgcaagaggcctccacttgattggttgcctcgagaacttgaagtagtcgctagatacggttgacttagccgtttaaatacaagctatagtctcgcaaatagcgatagggaggagaatagctaaggacagctagtgtcggtagaattcgcccgagggagaagaaggaagacaaaagtcacgacgagaactacgctcagagtgcggagaccgcgggtacatgtggggggaccgggacaggtacatagtcacgatggagatcacagaaaggccgtgcttgtcgatccagattcgagaggcgagagagggcaggaagtcggaggagcgaaggatgatcgcttcgctcagaggtgtgacttggcgaggtgactcagagagcgaccctttttagcggtcgcggcggcggtgcctttgcaggtacgcttgcggcgaaccgagatcttcgcggaggtcgtttcggccgtatagcgcgggagcgaggcgttcgcgagacgaggggatcgacggagcttttggggcgacgacgccacggcgaccactcccggcatgatcggctgttcggcgcgtggggtgtcatgacgaggggtaacgggagcttgatcgacctccggcgtcggtccggcgaagtgagcggcaggggcgaagagttcgggagattgagcgcgttcgtccgcgtcgctcgagctcgtcatcgacggcgtggggccatcgaagagacccaatcccgcagcgttgatcaccaccttgaggtacgcgtcatcgagactccgaatggcgggttgtccgggttgagcgggagcgtgaagggccaagtcgagatccggcacgaaaggttgaggatggtgttccccgctcgagctcgcgagcgcgttccttccgtagaggtccgcggtgccaaagccagggctatcgaggctgccttcgcgaggagagaattccgggctagtgacgggcgagtgcgtaggccgaaaaccaggcgaaggaggggacttgcgtccctcgtcggcccagcggacgaagtggcgggctgacgtggcaggaggaggcggcgcagccgactcttgcgagggcgcggctctcgcagcagcgctcgatctcgctcgcggcagcggcccttcgcctcgtgctacacatcgacaccgacgactgtgcaccccagggcacccgcccgatctctcgagtacgcccgactccgcttttgaggactcgacggcaggacctttgtcgacaacaatgcaagttggaggccctctccgctcggtcgcatgggcagcgacaccctctcactcgagagtccgcgcgcagcatgcacgcagggcaacgacggcgttcttcgacggcataggcatcatcaacctttgcccgagacggccgcaggcgctgcgatccgtcgacgatggcattggagggaggaggcgccggcacgctctcggctcgctcgggaggcgtcgtatcccaggtgggcagattccttttgagagacgcgtgtgaagagtaacatgtgctgatgcaaagactacgatgtcggcaaaaggcgaccgaccaactcggaccttgagactcgaactgtgggcccgctgcactcagaccttgggtgggtccgacccaaggtctgagtgactgaggggcggcttttggcggcatgcctcggttgagatcgagatcgcaacaagggttgctcagcacaggcttgttcgcggagatgaactgactccgagttgcaccacagtgtagtcgccgatcgcgtgacgaaatgacgaccccgacaccgctggtgagaacgttgtgccaaaaagtatccgcgggctttcggtcgctgtttcgccgaagcagtacgccaatctgacgcgcgtgataccgcactcggttgttccaagttgacgggacaagaggctcagaatacaaggcggtatgggtggcaagagtcgcgggaacgggtgggcgtgcgagcctcgaaggcaaactgctgcaccaagtctgcactgactacgtcggtacgaagagacgtgtcacgtacggtcaagaggatgagatcgaattcaggggcggcggggtattgatcgatcacacgagatcgaaagggaaccgtctcgcgctgacccggttatcgtcgtttcgaggctggcccagagccgcgaggctatcctgctggcgatgaatggctcatgcgcagtctcaagactgaacaaggagcccgcagtgctgatcgacgctcgactccggcgagcacagaagggaagccgctcggacgcggatgccgctctcgcgtgcaacatcgccacgacgcgcatcgtgatcgaactgcgaccttggtcgaagggcgactccagtcctgacgtgcgacggacaggcgaacttgctcgagctctccctcgtcgcaatggcctcctgacttaaaacggcgtgctgtcctcgtgaccgaccgtcgataagaggagcagatggcattgacggagctaacctcaagcgctcatcgctgactgcgcgagtgcgccattctttgctacgcttgctctggagcacgcgataagctcacaagctggcagcgggccgaaatcagagcttgagcgccaaagaacccgcatgcgacgctgcgaacggaacacgcgggtaatgaactgcgacttgcttcatgcgtgacagtcaccatagcgacgcttggagtgcccgcttggaggggaaaaagtcgccgcggacaccccgcgagtgggcggacgggcgaaaggacttctccctttctcgctctaacatttgcctttactgcaaacgcttgaaggagacctcgcctcgcaccaaagcttgctctaagcgctcatatcacccatttccaaccccgccggctgcctccgctctcaacctccgactctcgaggcgcacgaaccccttctcccgttgtcccctcgacgacaaccgccgaatgctgctgccgcgcacgcagctcttgcttgcgctcgcggcttccatcgtactcgcctcgttaaccgcccgcctcgccaactggacgggaacaggaaaacagcagtccttcggagtccgcggagccggcctcgtgcacggacccttgtgagtacattgagccaagttttaccgcgcggcaaaggaaactgatgcctacaatccacaacacagcgacatgggccagaagaccctcatggcgcacttgcggggcatcgcgcgcgagcagctccagacggcgcacgcgacgaccatgatggagaccgggaccggcatcaaggccacactcgggctggtcccgaggagctttggcggaagtgagttggacagctgcttactcatagccagcctcgactgaccagtggaccatcggaacagacgagtatgtcgttgtccgcgacctgaaccccgtacgattccagcttcgccaagggacgctccagtcggcgacgtgggtgagggacaagtccgccacgaacgtcgccaacaacctcgcagctgccgagcgagccaagatcgaagagatggaccgcgagatccgcgaggtcctgggcgccgagaccgtcatcatcaacattgtcgacggcgacaagaggccggaggcaaaggcagctaccctctccgaccgtcaccgtcgcttctcgcggaggcaccaccaggaatcgaagctgccctgcgggaagaagcgcgtcgagctcgaacagaccccgcccaacgactcggactggatccaccgcgctgtgagtcctttgtctggtccagtcacacacataacggagcgggagctcacgcaaactttcaaaacagggcgacgagaagacgatctactttgttgcgcccgacgaagcagatcgcctagtacagcatcttgtgacgcagtcgttcgacacaccaaagtacgacctccccgccaactctcccttcgccaacagcaacatcgatcggctcatcgacatcgtcaagcgatacccgccgtggcgtcgaattatccatacgcgcgacctcgatgcagtcatgcacacgacggcgtgcgaggcatggttcgtcctcctcacctcgtggtcaaaagtcgaggagggggcggtccttacctcggacgccacggtactcgaagacatgctcgagccgtacgttgccgagggagcgcagcggctgcattccgtccagcgcgatgtttctgctgccgctccctctgcaccaaggactggccgtggcggcgccctaggcaagaaggcgccgctgccagctcgtccaaacctccccgtgctcttgactcagctcggcgcacagtcggcattccgcccaacatccctcgacagattgccaaccgaacgacgccggggcgatacaatcgtcgtctttctccccggcgtcgacgctctcccaggcttcggcagagatcaatgtcgccgtgcgcgcgtgtcgagccttctgggaaacgactacaccggcagcggcatcaaaggcatctcttgggcgctcgtctcgagcggtctcggcgagtctttgctttcgatgagggaagaggactggtccgaccctcaaaagctcgagtcgcaggtctcttccctcgtctccctcctcgcctccaccgccgccagagccaagacgtggcgggctggaggcgactttggcgaggtcgccaagatctcgagcaagagcacgtcgatcgggcgcgagcagatcctggacctgatcgagtcggtgcgcgttattcgaggtgagaacgtcaactacgtcgcctcgacgttctaccacaacggcgatccgcgcggacccctgcagttcaagcaagctccgccgtcgactcgcccaaatcgctacgacgtcgactcccgccagccaagccatccctacctctctcgcccaggtccgcaacacgtcgtgccacaaggtctgaaccagtcgccgacgctgccgacgagcatcgtcaacccacgcctctcgaacccgctacaaccgtctcggacggtgcccgctccgggcgagaccgatccctcccgtccaaagatgtcgaagattcgtgttcggccgctgcagatgggaggaagcgggcagagcgtgttcatggctgcgcgaacgcatggtcccgagctcactcctctcgacgacaagaccatcgcgcgaatcatacaagcagacgccagccttcctgtcgaggtcaacgacgacgacgacgcggtcgactcggaactggagattgttcccgaagatgacgacgacgacgacgacgaagacgacttcacagcagtgccaaagcaaaaaggaaagctcaatcgtgtggagtcgtactttgcaacgatcacctcgccgggcaagaaccatgccgccgcgagtcgcaagatcagcgacatcacagagtcgccccgaccagtctcgaccgcttcggcttctgccaacaatgccggccgcagcggcgcacaacagaccgccacgcgtatcacgcgtctcacatcggcaagagctcctccgccagaaccgtcgaggcgcaaagatcgcgaaccagtgcccgcgccccggcagacccgactcgcggggaatcccgcgatcaccgaacaagaggcagctctcgcatcgccagacccgatgctcctcatcatgtcgctcgccgtcaagctcgggaatcgctttgtccacagtgcgtttgcgttcttgctggaactgctgctggaacagggggaggcagggatgatggcgacgagggatctgctactccagcggaaccgagcggcgcagtgcctcggtcgtcttgctgctggcggagcataccgtgcggcgggggagcagtggttcccgcggcaaacccttgttatctctgagctggagaaggtacgtccggtcatacggtcagaatcgagatggacaagagaactgactacagtctctgagcaggaggccgtcaactcggccctcgcctccggtctcgtgcctcctcctcgactctcggtcaaggcgttcacaatagcctacgctcccttccaaaccaacctgaccgaatggccgcgaacgcacacgcgagacgaactcgtcaacttgggccagttcgtcgcgcgcgacctgtccaagaacgcagcagaagcgctgagcaaagtcctgcggaaggcgcacaaggcgttctcgctcgatccggcatcggaggctgccctgcagtcggcaaacatcgaggcttccgctcgattccgcgcgggcctcgggaactggttgggcggggtgctcgcgactgctccgttcagccaggcgtcggctcacgcaggcgccgcgaacgaagaggacaagggactgccgagtcgagaaaagaccacgtcgtacaacttgcgaaagggcacgaccggcaagagcggcgacacgcttcagcaacagcacggcctcggcccgaagatcgacccgactgacccgcgcgaaccccccgctctcgacctcgggaaagagaccgaaaagtcgctcgagcagatgatcaaaaagctcgtcgactcggtcccgcctggcagcatgttcaatcgatcagatatgcatgacgcgctactgcaagacatcaccacgatcgcgcagcgccttctagcatgccgggaccggcatctcgagatggcgctggtgctgctcagatacaagaagatcgagaacgcgacgaccatggccttcgacgacgtccttgcagggaaaatgccagagatgggggccggaacgcttgccaaggggttgctagctctggtgatgagactgcgacagatgagaacgctatcggggatcgagctcataccggtgagctgactggcacggcggcgtcgagcatagtcaaagggagactgactggcttgtccttttgacagtatttcgacccgcaatgggtcgatgtagacctgtacaccctcctccagtccggccaccggcaccgcttcaaggtgctctgcacagatctcgaaagaacctgtaccaagatcgcatgcggcctcctcccgttcgtcgatgaagacgaagggagaagagtcgagctctttgacctcttcaggcgggtgttcgaagtgtggcggattgacgaggacgaccccgacaacagagacaaggactcgccttggtcctggatcgaggccgagaggacacggtcgacgagcatccgcctggtcgtcaagaaggagagcgtgtccctcgtcgccaacctcgatcgggtcctgcgcattgtgtttggcgtggaggagaccttctacacctacatgaggcggaccggagctcaagtcgaggtgatgaaccagctcttcgatcatcgaatgttgccgaacaagttcgttcccaccgggcacatgcgcatgtcctcaacaaaggtccagttcaccggagtcgacattacgaagatgaccaaacttggacgagaggcgctgccggagaagagtatggctgtctgatgccgaaaagaattgagctgcgctgactcgccctacccagatctcgacgcaggaaccgcatgggcgcacgtctcacaactaccgctcactcaactgaaggtcaaggagtactttgccaagatgatgccgtcctttcagcgtcgcgtcgtcaacggcgagatcgtgtttgtaccgatcgtcgccatcgcaaaacccgacgcagacgtgatgctctcggaacggcgcgatccattgccgcccagatccgctcctcaggaagggctctcgcgcaaagagcgacggcgcgagcggcagcggcaagacgccctggaccgagatcgctccccggtcgacctccgaacgccggtacgcgagaaggcgccaccaagtcgaacgcgaaaggggataccggtgtcttggccaaacctgcgattcgaggggggaaggaagttggtcaatgactttcttggagacaccccgctcgaccacatccactccgccagcatcgacaccggcgtcgtctgtccagtcgcgaccttcatctcgaatccggttcgggacggcttaccaacgcagcgtgccgaggcggtggcgacctattcgcgtgagactctgctcacccagcagcgtcagaccagccgccaagcttcacacctcaactcgtatctgtcgaaccagttcgactttacccgatgggcggatccagcttccacagatgttcgagcgtcgggtacgtcgccaatgccagaaccggatccgatgcaagaccctctgctggtgaccggtctgcacttgctcaagagcatgcactcggtcttcgacgggcggtcgatccagagcaaggtcgagcgcaaggccgaggtcagttcggtggcatctcagcacgtcgatctgatattgggtggcaaggatcgctggaccgaagaggaccgcaagacgcgcaaggtcgttgtcatggtcggctcagcggacgatctcgcgaaatcttccggaatgaagggtgctgtcaccgccaacgtccttgtgcgggaaatctctgccgagctcgcgcgccgcagggtcaacttcatgatctgcgttgttcccgagaactacacatcccaacggtgcccgaacccggactgcgtcgatgcgcagggtcgccgatctcggtacgtttgctctcgtgtactctgagggtgatgcagctgaccgactggtgatctttggggacagagcggagaacccgcgtcaccagggtggaggaccaaactaccgtctcctccaatgccagcgatgtagggcggtcttccaccgggacagagtcggggctgccaacattgggagtatggggtggtgcctgctgcggagtgggttgcagctgtggggggagaactggatgggaccaggaggaaaaaaacttgcggaagcgaaaaatccctaaaaaaggggggatcaatgggatctacttgtagaaccctcgctttctccgtgatcaatctgacttctatctcctgtgtgcggtaaccacaaacaggcgcttgcgcttgcgcttccacgtccgcaaagaggcgcttggcgcttctgctcccctatggccccggcctgcttgagactccgtgtgtggactcgcatggtacagatcgacgggtctgaccgttgagaatgccggacaacgcgccggcgcgtgcgacagagcgcccgaagctttggagccggatcgggattgccggatttctcccctctcaacggtggaaagggcgtctacagatgcacatgtaccccctagtctgatcaagcttgcaccccgcggttctgccgtatccaacggtctgcgacgacgctggcacaagggcctttttcggcgaaagaggcgcttctcgcaactcgccgacggttcccgcagggatgctgggtaactctgggacggttgtaaccttcaaatggactgtatctaccgttttcaacaccagaatacgttcgtgggagaggcggcgaggccgacgactgccctggccgagtcttggagcacccgccccggcctctgcacggtcgaaaatcccaaaactctccctcatacgaccaaaaatcgtcaccgagatgctatgcttgatgtacggccccgcgccgagctctccggaacagtccgggacccaattcctgactttctcgccactcagtctcagtgttccaacttctaagcgcattgtgggtctggttacttctttcatcttgttgacagcatcagaactgacatgtaccatgttgacggattccgtcgtatcttcagaccgagctggcaaacatgattctgagccaggaaaagccggtgagttcagtgtgatgaagccatggcttgtcctgaacagttctctttgtgaatgcattcttctgaaatttgctgcttacagagaaatgactcggccgagggccggcaagcggtgagctcgagacttccaagccgaagaagcgcctgagccctctgctcaacactctgcagagccgagcaagggcagcggaccgcatgcgataccgagagcagcattgggagttctgaatgcgagaggtttgagagcccctcaaaggttgtctgaggaggagggaagaggaagagggagaggtggcaaagccggcttgctcctttttgatacgcgagcgaggtgcagcgaccgcggtgtctcttactcttgcgacactgcccacgggccgcttttcgagaaaggtgttccggcggcggccggccttaacaaaaccaaatccaggacgcgcgagaacgctcaagtcgagacaaggagacgctctcatgcgcgagggcactgaccttgacgggatcccagccctttgaatgcgctacaaagagtgtgtttcccagtgtccagccaagcaaacccgcggctgcagctgcgaggtgcgcaagttcaggagaaggtgcgcaagttcaggagattccaagacgtgacctcccgttgttcactcgttcgcacgcgtccaccaggttattgtatctgcaattttagctcgacggagcgaagccctgctcatgtatttgactatggagcatttgactgtgctgcattgcccacattcttgcagacacgggcaagtcagagaagaagaaaccgagcgcgagttgcgccacccgcaaataccctccggactgaaccgctgaagggccgacgacctgtccctgaccagtagaagtgtcgggatcccttgacttacgaccagcaggtcttgcatgtcgcccagaatcgtcaaaactgattcctcctggttgcgctcaaaagccggatggtcaggccgtgtagacccaaatcgcctgaaacttcgcaccctgggcccctataggtcaaagtccagccggccacaagctcagcccatttcaacggcggtagaggtctgccgagcgaggcgcttgtgggaaattggactagagctgtaagccttgtcgtgcagcatatcgacaatctgaacggtcaaaataatcgtgaaggtgtttgaagctgttcaggcgaaaaagatatccatagagcgcatgcttgctgagatcaggcaagcgcctcttagttgtaattaccgtcgtgcgtgccagttccgacccagcctggctcaccagctcgagatacatgctggatcgctgacccttgtgctccgcccccctccagaatcttcttcttcggtatgtctgcagcggagtctgaagtcctcgacgcgaagttgccaagtcccccaagatgaaaattaacgttcttttgttcgtgcaggatatgatcaaggaatgatgggcggcgtcaacggcgctcttgactacgtgaccacgatgggactgggatacgtcacgccgggcgtagatggggccaagccgaccgccaccgtcacgcagtcgacgaagcaggtgagtcgtcggcaacgcatctatcttgtttttgtcccgccggccacgatacctttactgaactgctgtttgcatacagggaggaatcgtctcggcctactgtacgtcccgatcgtgtctccttcccgttttcaacctgacaccggtttctctccagacctcggaactcttttgggatgcttgctcggcgggtggctcggcgataggctcggtcgcaagaagaccatctggattgggtgcatttggatcactatcggagctcccttgcaggtgagtcggagttcactcttgccaccgttccgaaagccgcgatttcactttcgccaccgttccgaaatgaactcccgccaccgctccggaagctggcgctgacctccctctctctccgacaggcagctgcacagaacgtcccctggatggtcatggcgcggatcatcaccggagtcggcacgggccacctcaacgcgatcgtcccagtctggtccgccgaaacttccggtcatctctctcgcgggttcttcattgcgcttgaattcacgctcaacatattcggcgtggtcggtctatggttattcattcgtcttctgacccgcgtcctcgtggctgacgaagttgattcaccgccgccccaggttgtcgcatactggctcggttcgtttctcccgcgtctattgccgaaggagacggcgctgagtgaacgcgtcatacagagtatggactgtccttcatcggcgacgggaacacccagatccgctggcggttcccaatcgcgttccagctcgtgtaagtttcgcttacccgaccgtcgcagcagatcagacatactgatgtacgccggctctatagacctcttctcggcctcgcaatctgcaccttcttcatgcccggtacgcatttcgcctttttccggagcggacttcctcgctgactctcccgacaattgcagaatcgcctcgatggctcctcaaggcagggtatcgcgacgaggcgctgcatgtcctcactcgcttgcgctccgaagacggtcagatcaacgcggaagcccaggccgaatttgacgagatcgaccgagcgattcaaatcgacggtgcggcagaacccggctacatcgacatgacattccgctcgcacggcaagctgcatctgtcacgaagggtacgtcagattggcaaacagcgatgaaagctccgactgaccgaatcgctgttaccaacagactcagctcgcgatgtgagatcaatttgtctcctgctttccgttcctcgcgctgaccttttctctcgttctcagctggatccagatccttcaagagtggggcggtatcgccgctatcacgggtgagttccttatcgggctggtcggacgagaaaagcgcctgacgattcttttcccttcagtctaccaaccggtcatcttcggtctcgccggcttcgacgcttcgaaggcaggctgggtatcgggagtcaacacgatcacctacatgttttctacgtgagtattcaccttctccttgccacttggcgagacgtggtcgctgcaactgagtcgattttcttttgcagtcttatctgcgtcttcactctcgaccgtatcggtcgccgtgtcacgctcttctggggtacgttccacttggtcttttctttcttcggcttgctcttgaagcgatcactgacgaaacatgaccatgcgcaggcggcgcggttcaggctttcgcgctcatcatggcgggcgtcttcgtccaccttctcaccgttcaccccgaaaagacggctcagtacggaggtgctgctaccgctatggtgttccttgtgcgtcaagaaatgttgtctcactgtcacagactcggaatttgctgaccgggtctttcttctccagtacaccgcaactttcggcgcaacttgtgagaagtctcgccgcttcttctttgagcgaaatgaacctgacctttgtttcactacttcttaccgaaagggctcaccgtaccctggatctaccccgtgagtggcgatgccttccgccaagcgtagtcttcacattgctgacgccactcgtcttcaggccgaaatctggcccgtcaacgcacgagcgaaaggaaacgctatgggagtcgtcggatggtcgatcggtaacggatggtgcaccctcctggtccccgtcatgttcgacaagattaaggaggtcagtcccggtttttttgccgtccgtcgtcttcgctctgcctcaggtatgctgactgcctgcggtctacagaatgccctctacatcttcggcattgctaatattctcgctatcgctgtcgtgtgggcattctaccccgagaccgcgaaccgcactctcgaaggtgcgctcgtccgttcctcttccaaacgctcgcaaccccttctgactttcgagccttgccgtcttcacacagagatcgacttccttttcttcagcgacagctggttcgtgtggcacgccgaggcagagtactcgcgcctcaagaaggaactcgaggtcaccggcgaggtcccggacgatctcaagacgtcgacccacctcaaggagaagatcagcctcgacagcgccgcggcttgaacacaagagcactttccgtcggttctctagactcgtgtatatataaattctttgcctcgatcttcgcaatgtaccttcttgatgggagttcggtcctttcggtccttgatcctcttccaccttagacacattgttaccatgaggcgtctctccacgtcggaagtacggcacgctgccaacagtgcgggcgatgcgagataattgaatgggtcgcagagcaacttatgaagtctacgagatgtcaacattgacgcgattgacattcgggcgactccccgcttggcctcttcgctctcacccggcacgccaccgccacagtcctggggcctgcaagggggtcaacgtccttgcgttgcttgattgagaccggctggacgtgaaacggacgcgctctcaagcggcgccaccggcgacaagagatccgtgctggacgaggaccgtgtcgtcaaacctcgagcggtcgtgacaagatgcctgtggtcaccaacccgatcacacccacgctgagcgtctctgaactacgggcgctcgcgaaccggcacgcgctgccgcccatcgtggattctcaactcgccaagacggtgacgctgcgcacgacccgcccgcttcgcgcaggcaagacgcgccagtacagtctacccgaaatcgactttcaactcttggaggccttgggagacggcttactcgaggcgagcatatgccgagtcttgtacacgaacgtcacgagtcgggctgaccgttccgcagtgctgttctccgtgagttgggtttgcgtggtctttactgccgttcagggggtcgcgtggcttgttagggtatgctccccatgcaggcttatcggagtgtactccgcaacaatgggctactcgcccagctctcgcacggctaccgccttcatctgacgatgtcgccgcctctcgaccccgcgggcacggcagcaggcgcgccgttctcggtcagcgtgaccaagattctcgccgactcgttcgaagcatacatcggagggttgacgcaggcatcgggcgagcaagtcgcgaggtcgtggctcgaaccactcttgatcgacctgatgggtctgatctatccggccgtggaaggaccggatgcggtttcccgcggtgagtgtcaaagatgcgctggcgttcccgcgctgcagagctgaagaccctttcctttttacaggccagcgtacgccccgtaccgaaccgaacgccacgcctcgcaccgaacccgtcgccgccgaacccgtcgcccagcgacctccgaagcgtccgcgcgacgacgcatagcaaacatggcagtgtcgctcttctcttttgcttgcttgactagcttgacttcgagcctgtgtgaattcgattcgaacagcaattctgcggcgagcttgcaccaagtcaccagagatccagaacgaaagagagactggctacgagagctgtcttcgttcagtggcttttggggtgccaagagtatagtagggcgtagaagaagctgaaaagagggaccgagaaagaacacgatgacaactctgtccatttcgctacacacgtctgcaaacccgttctacatgctcgtgtccacccggcaaagctcagtcgcgaccagcgcacacctcgccacgggaaaagatcccgagattgtctatatgatatccttgaaaaccggctcgaaacacttgtgtccttcagtggaagggcacgttgcgaatgcgaccgcccgagccaaattgccggtgcggcagcgcgacttcaaggtcgcgacgaacgcggcgagtcaggcgcttcgagtcggccttggcgagcgagcaacccttgaccggtccggggcagacggcgtcgatcgagcccgacttggtgacggcgttggtgacgcactgctggacctgcgagatgcacgagacgtacgcagcgccgtacgaagtctggttgttgaagaacgactcgagcgacgagttgagttcggcttgcgtgaggttgtgcgcgttcgcggtcgagttgagcagagtggacgagtagtcgacgaggtcggcgaagaaggacgaggggaggtagccgtcgtactgctgtgcgatcgagaggatcgtcgtctgcgtgacgacgggagcggcggactgggtgatacattcctgagcggcggtggcgttgccggctgtcgagaaggtcgacttgggtcagctcattggatctcgaaagaagggcagaaggtcatcgagacgcactggatatgagttccgcagcgcacgactgcaagatctcggcggcggtgaccgtgttgcccgagagcgacgacgcgaccgagttgatcgcgttcgagatctgggcgccgacctgcgcgccgagctgagcgctcggggtcgtcgcgttctggatgttgtacgagaggatgttttcgacgctggtggtcaaggaagcgggcaagacgccgacaaactgctcgaggacgccgttcatggccgtctggagcgtcgtgtaggctccgccgggcttggtgaagcacgcgagcgaggaggtgttgccggcctgctggatcgcgtccgtgtagcactgcgagacctgctcgagagccgtgaccgagttgccggacagcgaagcgatgaccgactggatcgaagactggatctgagtgacgagggcctgctccgacgctggcaagagagtgccgagcaagggcgtaacggcgtcaaagacggacgagaggatcgtgttcggaaggatgccgacgaactgtgtgcgttcaagtcagtacgagcgcggaaaggcggacgcgcacgcgatgaaagctcacctgctcgaggatcgtgttgagcgtcgcctggagaccagccgagtcgctgccggtcggagtcaagcacgagtatccggagggcatgccgcccgccgcgagaacctccgagagacacttttcgagcgcggccgtcgtggtggcgttcaggtcgctctggctcagattcgcggcggcaaaagcctcgtcgagagcctgcttgatgttgagcgaggcagtgacggcgtccgaagttgtgatcagagtcgaagtcgagacttggagctcggtgatgttgcgagtgacggtgatgtaaaccggagccggagtcggagcgaggagagccgagatggtgccgttggcggcgaccgctgtaccgttcacggatgcggtgctgttggcgacggcactggcggtggcggtagcagtgatgttgttggccaagatggtcgttacggcaggcttggtgtgggtgactggagggagcgattcgggatcagcaatcgcgcgagaaagaagacgcgaagaaaatcgggaccaactcaccggtgatggtagtcgcgctaggcttgccgacttgcttctggatgacgctcgagatggctgtatcccccgaaacgcgagtcagtaaaggtggaagacagcaaggatttccgcgaaactcaccgccggaaagggcgcccgcgactgccggcgggatgtacgagctgttggcgaacgatccgacggcttcggcggcacccttggcgacagtctgcggcgaagcgccccggaccttgggcgccggcttcgacttgatcttggacgcgttcttggtccacgacttggacgagccggacgagggagacttgggcttggaggcggtctgatccgacttgttgacgacgggtgcggcgttattagagttgtcttgcgaggaggaggaggacgacgagcccgacgacttggacgacgacgacgacgacgacgacttgtgggaagcctgcttcttcttgctcgacgatgacgactttttcggcgacgggttgacgagcttctgaacctcgggtacggtgtactcgcccggcttgtggatcacgcccgggtgatcggagcaaggttcgggcgaggcggcgaccaagagcgcgagtgacgagagggcgagcgaggtgaggctgaaggaacgcatgacggagtcgagttggtcttggccggtgtgtgtgagggggtggtagtacgagggagtgtgcgacgcgtcgggtgaaaggggacagggaaagaaagtgtgaaggtccgcgggacgaagcgagcgtaaatttaaaggaacgagtggaaggtccgcgggcgaagtgcgcggtgggggtccgagagccgctttgtgacgagagtgcaggaaaggaggagatggagaaggagagaaagcgagaaagagagaagggcgcaagacgcgaagaaagtcgcgtcgcgtcgtaaaagcgcgccgccgaaagattcacgtgcgcgtcgagatgatcggatcggcggccgacccgcatgcattatggccatcgcaactgtatgtattgcgaggctgcaaagcacacagagttgtacagaggccgagcgagcatcccgtccaacaaactcgggtcggttccagcaaatcgctcggagcgactcggaaggcgaggtaccagcgtagcctcagccacaggggacagcggactccgacgaagcctatcaggtcgtacgatgaagcatagtcggccggtcgctgagagttagagcggcggtctatgtgctgttccagggatggccttggatgacgtcggcggttgagctgcctggtctggcgaggacggcgggccgcgtgctatggcgaggagaggcatggtacgaataactggccgatgtgtccccgcagcaggcagtctagccggttgagtgatccggagcaaagtccaacaaagtcgaggagagaaaaagagaagcgtcgctgctcccgac

SEQ ID NO: 53 - DNA, 21152 bp, unidentified; identical to SEQ ID NO: 52
  misc_feature 1..21152: note = Fanzor polypeptide
  source 1..21152: mol_type = other DNA

SEQ ID NO: 54 - DNA, 21152 bp, unidentified; identical to SEQ ID NO: 52
  misc_feature 1..21152: note = Fanzor polypeptide
  source 1..21152: mol_type = other DNA

SEQ ID NO: 55 - DNA, 21152 bp, Rhodotorula sp.
  source 1..21152: mol_type = other DNA
cgtccgcgccggcgcgtcatcctcgcctccgacatctaccgcgggatactccttcagccggtctttcaggacaaccccatccctgatggcctcacccacgccaacgtcatggaccggtggagcgaggccggcggcatgttcgccgtctcactcttcaccgacattgccgtctttcgcctccttggaccttccctaatgttgtagactagtagaccttatttgttgtttgttgttagtcttattctcccccagacagactcgtcagctcgtgttacagagacgagtcagcagaagaggagagcaggcattggggacctttacacaccgcgtgtaaaaaaaatcccgcgaagtctgcaaacgggcttttctgtacggtcgcggggcccatctctgccctatactacgtatacacttatcgctacaacatacgcgactgctgcaactgtgtgccgtacccctcaacttcaccggacttgccattcggctgtgaaaattcctgagatgcagagggcactcgtctcaagcggatgcgagacgaggctactctgctgacagggagatgaccgtagagagacactcaacaataacactgaatcgagcgtagattgcgagatgtgagcggtgaagaagaaaagagaggggagcccgagggcgagctacgacaaagtgcgcccgagatcctcctccaacctccacttgccgcctcatccgaataacgtgtcgtcgtcttgatcttgagcccgagagtatggtagtagtctagggggagagatcaagtcagcgagggttcgaatgaaaaagcgagcgagtgaaaaggacttagatctggaaaaggccttgaaggagcgagagcgagacgagtctgcagaacgagtcctagcatgagacttaatggacgtagcgagagcgccacgcgttatatgactccgcctttagcaatcgccccactcccgacgttcagaccattctaaagacaggcaccctctgtgtcgcttgtacttacgaggcgctgtacggccgccgccaccttcttgtcaataactgcagtcggccttgcgcctgagaaggtcccgttctaacctctgcacacggccctacacactgtattcgggtaagataagagctggaccagaatcaagcgggttcaatccgctatatctgtccaatttttccgcagatttgcgttccgaaagacacagaacctccgtctcctttgaatcggcgagcggaatcgccttgttccgtcggaagcatgtcccatatggccgctttctgcttcattctgctctcaaaaggtaatgccaagtgactgaatgccgtagtcagtggcacgaatccctcacgagtcctccggcaagtattctgtctcgaagacgattttcggtgggtggcggagtggcggcacccaccaaaagcgctcgattgcttttagcgtgtcaatacggagcccataggagtcggcgttgtagtggtatgccgctacagctggtagctccagatatcacccgttatgcagctccatgtcccactctatcgtatatgcgttgaccgccttgattgcacgcatttgtgtctcatttgcgtatatagctcaatttgcacagaacacttgcaatacgtgagtaacgtagcggttaaagtgttagcgttcggttcggtatacactttttgtcagccgagcgttcgcttcccggtgagagcatagagacaacggttctgcgttcagacggccatacttatcgcacctcctctcagacgctacaggctgctcagacaccgtccagatgacccaagtaagccaggccgttcagacgctgtccagactgatgaatccctttggcacggttgctgatcgggccgctggcgccttggaaggccgctcatccaaggagatcttcatcgagcactaccactcaatgctaggacatcagtccgatcgaatcctgcgacactacatgcgtcagcattactggtggccagaaatggtgaaggaaatcgaggcttactgccgaacttgcgcatcctgccaagctagcaaacccgaacgagccgcaccgagaggaaagctacaccctatccagctcccgttcacagcatacgaagagatttcgattgatttcaccggaccgcaccctgtcagcattgatgcggacggaatcgcgagattacattttcaccgtgattgacgccgcctccggagaagtcaagctcattccgtgcatgaaggccggtttgacgagcgcaaaatgcgcccaaatcttcctcgagaaagtgtacccgcaatggggtactccgaagacgatcctgtcggaccaagacgtccgctgggtttccgcgttctggaaagcgttccacaacgctctcggaacgacgctgcacgtgtcaaccggagcggccccttgtcgagttggccgccgctccgattggccaactcggccgctccggccatctcgacaggggatccggagcttgtcccggcggccgctgcgatggctcgattccatgcagctgatttgttctaccgagcgcatgcgagagatttacagtcgaccaccctatactaccgtgatcttgtggcgcgcaaggggcgcggtgctgcgcgccgaaatctgtatggtattctcaaactcaaatgatccggatcggctggcgcggctgcaagaggcctccacttgattggttgcctcgagaacttgaagtagtcgctagatacggttgacttagccgtttaaatacaagctatagtctcgcaaatagcgatagggaggagaatagctaaggacagctagtgtcggtagaattcgcccgagggagaagaaggaagacaaaagtcacgacgagaactacgctcagagtgcggagaccgcgggtacatgtggggggaccgggacaggtacatagtcacgatggagatcacagaaaggccgtgcttgtcgatccagattcgagaggcgagagagggcaggaagtcggaggagcgaaggatgatcgcttcgctcagaggtgtgacttggcgaggtgactcagagagcgaccctttttagcggtcgcggcggcggtgcctttgcaggtacgcttgcggcgaaccgagatcttcgcggaggtcgtttcggccgtatagcgcgggagcgaggcgttcgcgagacgaggggatcgacggagcttttggggcgacgacgccacggcgaccactcccggcatgatcggctgttcggcgcgtggggtgtcatgacgaggggtaacgggagcttgatcgacctccggcgtcggtccggcgaagtgagcggcaggggcgaagagttcgggagattgagcgcgttcgtccgcgtcgctcgagctcgtcatcgacggcgtggggccatcgaagagacccaatcccgcagcgttgatcaccaccttgaggtacgcgtcatcgagactccgaatggcgggttgtccgggttgagcgggagcgtgaagggccaagtcgagatccggcacgaaaggttgaggatggtgttccccgctcgagctcgcgagcgcgttccttccgtagaggtccgcggtgccaaagccagggctatcgaggctgccttcgcgaggagagaattccgggctagtgacgggcgagtgcgtaggccgaaaaccaggcgaaggaggggacttgcgtccctcgtcggcccagcggacgaagtggcgggctgacgtggcaggaggaggcggcgcagccgactcttgcgagggcgcggctctcgcagcagcgctcgatctcgctcgcggcagcggcccttcgcctcgtgctacacatcgacaccgacgactgtgcaccccagggcacccgcccgatctctcgagtacgcccgactccgcttttgaggactcgacggcaggacctttgtcgacaacaatgcaagttggaggccctctccgctcggtcgcatgggcagcgacaccctctcactcgagagtccgcgcgcagcatgcacgcagggcaacgacggcgttcttcgacggcataggcatcatcaacctttgcccgagacggccgcaggcgctgcgatccgtcgacgatggcattggagggaggaggcgccggcacgctctcggctcgctcgggaggcgtcgtatcccaggtgggcagattccttttgagagacgcgtgtgaagagtaacatgtgctgatgcaaagactacgatgtcggcaaaaggcgaccgaccaactcggaccttgagactcgaactgtgggcccgctgcactcagaccttgggtccgacccaaggtctgagtgactgaggggcggcttttggcggcatgcctcggttgagatcgagatcgcaacaagggttgctcagcacaggcttgttcgcggagatgaactgactccgagttgcaccacagtgtagtcgccgatcgcgtgacgaaatgacgaccccgacaccgctggtgagaacgttgtgccaaaaagtatccgcgggctttcggtcgctgtttcgccgaagcagtacgccaatctgacgcgcgtgataccgcactcggttgttccaagttgacgggacaagaggctcagaatacaaggcggtatgggtggcaagagtcgcgggaacgggtgggcgtgcgagcctcgaaggcaaactgctgcaccaagtctgcactgactacgtcggtacgaagagatgtgtcacgtacggtcaagaggatgagatcgaattcaggggcggcggggtattgatcgatcacacgagatcgaaagggaaccgtctcgcgctgacccggttatcgtcgtttcgaggctggcccagagccgcgaggctatcctgctggcgatgaatggctcatgcgcagtctcaagactgaacaaggagcccgcagtgctgatcgacgctcgactccggcgagcacagaagggaagccgctcggacgcggatgccgctctcgcgtgcaacatcgccacgacgcgcatcgtgatcgaactgcgaccttggtcgaagggcgactccagtcctgacgtgcgacggacaggcgaacttgctcgagctctccctcgtcgcaatggcctcctgacttaaaacggcgtgctgtcctcgtgaccgaccgtcgataagaggagcagatggcattgacggagctaacctcaagcgctcatcgctgactgcgcgagtgcgccattctttgctacgcttgctctggagcacgcgataagctcacaagctggcagcgggccgaaatcagagcttgagcgccaaagaacccgcatgcgacgctgcgaacggaacacgcgggtaatgaactgcgacttgcttcatgcgtgacagtcaccatagcgacgcttggagtgcccgcttggaggggaaaaagtcgccgcggacaccccgcgagtgggcggacgggcgaaaggacttctccctttctcgctctaacatttgcctttactgcaaacgcttgaaggagacctcgcctcgcaccaaagcttgctctaagcgctcatatcacccatttccaaccccgccggctgcctccgctctcaacctccgactctcgaggcgcacgaaccccttctcccgttgtcccctcgacgacaaccgccgaatgctgctgccgcgcacgcagctcttgcttgcgctcgcggcttccatcgtactcgcctcgttaaccgcccgcctcgccaactggacgggaacaggaaaacagcagtccttcggagtccgcggagccggcctcgtgcacggacccttgtgagtacattgagccagttttaccgcgcggcaaaggaaactgatgcctacaatccacaacacagcgacatgggccagaagaccctcatggcgcacttgcggggcatcgcgcgcgagcagctccagacggcgcacgcgacgaccatgatggagaccgggaccggcatcaaggccacactcgggctggtcccgaggagctttggcggaagtgagttggacagctgcttactcatagccagcctcgactgaccagtggaccatcggaacagacgagtatgtcgttgtccgcgacctgaaccccgtacgattccagcttcgccaagggacgctccagtcggcgacgtgggtgagggacaagtccgccacgaacgtcgccaacaacctcgcagctgccgagcgagccaagatcgaagagatggaccgcgagatccgcgaggtcctgggcgccgagaccgtcatcatcaacattgtcgacggcgacaagaggccggaggcaaaggcagctaccctctccgaccgtcaccgtcgcttctcgcggaggcaccaccaggaatcgaagctgccctgcgggaagaagcgcgtcgagctcgaacagaccccgcccaacgactcggactggatccaccgcgctgtgagtcctttgtctggtccagtcacacacataacggagcgggagctcacgcaaactttcaaaacagggcgacgagaagacgatctactttgttgcgcccgacgaagcagatcgcctagtacagcatcttgtgacgcagtcgttcgacacaccaaagtacgacctccccgccaactctcccttcgccaacagcaacatcgatcggctcatcgacatcgtcaagcgatacccgccgtggcgtcgaattatccatacgcgcgacctcgatgcagtcatgcacacgacggcgtgcgaggcatggttcgtcctcctcacctcgtggtcaaaagtcgaggagggggcggtccttacctcggacgccacggtactcgaagacatgctcgagccgtacgttgccgagggagcgcagcggctgcattccgtccagcgcgatgtttctgctgccgctccctctgcaccaaggactggccgtggcggcgccctaggcaagaaggcgccgctgccagctcgtccaaacctccccgtgctcttgactcagctcggcgcacagtcggcattccgcccaacatccctcgacagattgccaaccgaacgacgccggggcgatacaatcgtcgtctttctccccggcgtcgacgctctcccaggcttcggcagagatcaatgtcgccgtgcgcgcgtgtcgagccttctgggaaacgactacaccggcagcggcatcaaaggcatctcttgggcgctcgtctcgagcggtctcggcgagtctttgctttcgatgagggaagaggactggtccgaccctcaaaagctcgagtcgcaggtctcttccctcgtctccctcctcgcctccaccgccgccagagccaagacgtggcgggctggaggcgactttggcgaggtcgccaagatctcgagcaagagcacgtcgatcgggcgcgagcagatcctggacctgatcgagtcggtgcgcgttattcgaggtgagaacgtcaactacgtcgcctcgacgttctaccacaacggcgatccgcgcggacccctgcagttcaagcaagctccgccgtcgactcgcccaaatcgctacgacgtcgactcccgccagccaagccatccctacctctctcgcccaggtccgcaacacgtcgtgccacaaggtctgaaccagtcgccgacgctgccgacgagcatcgtcaacccacgcctctcgaacccgctacaaccgtctcggacggtgcccgctccgggcgagaccgatccctcccgtccaaagatgtcgaagattcgtgttcggccgctgcagatgggaggaagcgggcagagcgtgttcatggctgcgcgaacgcatggtcccgagctcactcctctcgacgacaagaccatcgcgcgaatcatacaagcagacgccagccttcctgtcgaggtcaacgacgacgacgacgcggtcgactcggaactggagattgttcccgaagatgacgacgacgacgacgacgaagacgacttcacagcagtgccaaagcaaaaaggaaagctcaatcgtgtggagtcgtactttgcaacgatcacctcgccgggcaagaaccatgccgccgcgagtcgcaagatcagcgacatcacagagtcgccccgaccagtctcgaccgcttcggcttctgccaacaatgccggccgcagcggcgcacaacagaccgccacgcgtatcacgcgtctcacatcggcaagagctcctccgccagagccgtcgaggcgcaaagatcgcgaaccagtgcccgcgccccggcagacccgactcgcggggaatcccgcgatcaccgaacaagaggcagctctcgcatcgccagacccgatgctcctcatcatgtcgctcgccgtcaagctcgggaatcgctttgtccacagtgcgtttgcgttcttgctggaactgctgctggaacagggggaggcagggatgatggcgacgagggatctgctactccagcggaaccgagcggcgcagtgcctcggtcgtcttgctgctggcggagcataccgtgcggcgggggagcagtggttcccgcggcaaacccttgttatctctgagctggagaaggtacgtccggtcatacggtcagaatcgagatggacaagagaactgactacagtctctgagcaggaggccgtcaactcggccctcgcctccggtctcgtgcctcctcctcgactctcggtcaaggcgttcacaatagcctacgctcccttccaaaccaacctgaccgaatggccgcgaacgcacacgcgagacgaactcgtcaacttgggccagttcgtcgcgcgcgacctgtccaagaacgcagcagaagcgctgagcaaagtcctgcggaaggcgcacaaggcgttctcgctcgatccggcatcggaggctgccctgcagtcggcaaacatcgaggcttccgctcgattccgcgcgggcctcgggaactggttgggcggggtgctcgcgactgctccgttcagccaggcgtcggctcacgcaggcgccgcgaacgaagaggacaagggactgccgagtcgagaaaagaccacgtcgtacaacttgcgaaagggcacgaccggcaagagcggcgacacgcttcagcaacagcacggcctcggcccgaagatcgacccgactgacccgcgcgaaccccccgctctcgacctcgggaaagagaccgaaaagtcgctcgagcagatgatcaaaaagctcgtcgactcggtcccgcctggcagcatgttcaatcgatcagatatgcatgacgcgctactgcaagacatcaccacgatcgcgcagcgccttctagcatgccgggaccggcatctcgagatggcgctggtgctgctcagatacaagaagatcgagaacgcgacgaccatggccttcgacgacgtccttgcagggaaaatgccagagatgggggccggaacgcttgccaaggggttgctagctctggtgatgagactgcgacagatgagaacgctatcggggatcgagctcataccggtgagctgactggcacggcggcgtcgagcatagtcaaagggagactgactggcttgtccttttgacagtatttcgacccgcaatgggtcgatgtagacctgtacaccctcctccagtccggccaccggcaccgcttcaaggtgctctgcacagatctcgaaagaacctgtaccaagatcgcatgcggcctcctcccgttcgtcgatgaagacgaagggagaagagtcgagctctttgacctcttcaggcgggtgttcgaagtgtggcggattgacgaggacgaccccgacaacagagacaaggactcgccttggtcctggatcgaggccgagaggacacggtcgacgagcatccgcctggtcgtcaagaaggagagcgtgtccctcgtcgccaacctcgatcgggtcctgcgcattgtgtttggcgtggaggagaccttctacacctacatgaggcggaccggagctcaagtcgaggtgatgaaccagctcttcgatcatcgaatgttgccgaacaagttcgttcccaccgggcacatgcgcatgtcctcaacaaaggtccagttcaccggagtcgacattacgaagatgaccaaacttggacgagaggcgctgccggagaagagtatggctgtctgatgccgaaaagaattgagctgcgctgactcgccctacccagatctcgacgcaggaaccgcatgggcgcacgtctcacaactaccgctcactcaactgaaggtcaaggagtactttgccaagatgatgccgtcctttcagcgtcgcgtcgtcaacggcgagatcgtgtttgtaccgatcgtcgccatcgcaaaacccgacgcagacgtgatgctctcggaacggcgcgatccattgccgcccagatccgctcctcaggaagggctctcgcgcaaagagcgacggcgcgagcggcagcggcaagacgccctggaccgagatcgctccccggtcgacctccgaacgccggtacgcgagaaggcgccaccaagtcgaacgcgaaaggggataccggtgtcttggccaaacctgcgattcgaggggggaaggaagttggtcaatgactttcttggagacaccccgctcgaccacatccactccgccagcatcgacaccggcgtcgtctgtccagtcgcgaccttcatctcgaatccggttcgggacggcttaccaacgcagcgtgccgaggcggtggcgacctattcgcgtgagactctgctcacccagcagcgtcagaccagccgccaagcttcacacctcaactcgtatctgtcgaaccagttcgactttacccgatgggcggatccagcttccacagatgttcgagcgtcgggtacgtcgccaatgccagaaccggatccgatgcaagaccctctgctggtgaccggtctgcacttgctcaagagcatgcactcggtcttcgacgggcggtcgatccagagcaaggtcgagcgcaaggccgaggtcagttcggtggcatctcagcacgtcgatctgatattgggtggcaaggatcgctggaccgaagaggaccgcaagacgcgcaaggtcgttgtcatggtcggctcagcggacgatctcgcgaaatcttccggaatgaagggtgctgtcaccgccaacgtccttgtgcgggaaatctctgccgagctcgcgcgccgcagggtcaacttcatgatctgcgttgttcccgagaactacacatcccaacggtgcccgaacccggactgcgtcgatgcgcagggtcgccgatctcggtacgtttgctctcgtgtactctgagggtgatgcagctgaccgactggtgatctttggggacagagcggagaacccgcgtcaccagggtggaggaccaaactaccgtctcctccaatgccagcgatgtagggcggtcttccaccgggacggagtcggggctgccaacattgggagtatggggtggtgcctgctgcggagtgggttgcagctgtggggggagaactggatgggaccaggaggaaaaaaacttgcggaagcgaaaaatccctaaaaaaggggggatcaatgggatctacttgtagaaccctcgctttctccgtgatcaatctgacttctatctcctgtgtgcggtaaccacaaacaggcgcttgcgcttgcgcttccacgtccgcaaagaggcgcttggcgcttctgctcccctatggccccggcctgcttgagactccgtgtgtggactcgcatggtacagatcgacgggtctgaccgttgagaatgccggacaacgcgccggcgcgtgcgacagagcgcccgaagctttggagccggatcgggattgccggatttctcccctctcaacggtggaaagggcgtctacagatgcacatgtaccccctagtctgatcaagcttgcaccccgcggttctgccgtatccaacggtctgcgacgacgctggcacaagggcctttttcggcgaaagaggcgcttctcgcaactcgccgacggttcccgcagggatgctgggtaactctgggacggttgtaaccttcaaatggactgtatctaccgttttcaacaccagaatacgttcgtgggagaggcggcgaggccgacgactgccctggccgagtcttggagcacccgccccggcctctgcacggtcgaaaatcccaaaactctccctcatacgaccaaaaatcgtcaccgagatgctatgcttgatgtacggccccgcgccgagctctccggaacagtccgggacccaattcctgactttctcgccactcagtctcagtgttccaacttctaagcgcattgtgggtctggttacttctttcatcttgttgacagcatcagaactgacatgtaccatgttgacggattccgtcgtatcttcagaccgagctggcaaacatgattctgagccaggaaaagccggtgagttcagtgtgatgaagccatggcttgtcctgaacagttctctttgtgaatgcattcttctgaaatttgctgcttacagagaaatgactcggccgagggccggcaagcggtgagctcgagacttccaagccgaagaagcgcctgagccctctgctcaacactctgcagagccgagcaagggcagcggaccgcatgcgataccgagagcagcattgggagttctgaatgcgagaggtttgagagcccctcaaaggttgtctgaggaggagggaagaggaagagggagaggtggcaaagccggcttgctcctttttgatacgcgagcgaggtgcagcgaccgcggtgtctcttactcttgcgacactgcccacgggccgcttttcgagaaaggtgttccggcggcggccggccttaacaaaaccaaatccaggacgcgcgagaacgctcaagtcgagacaaggagacgctctcatgcgcgagggcactgaccttgacgggatcccagccctttgaatgcgctacaaagagtgtgtttcccagtgtccagccaagcaaacccgcggctgcagctgcgaggtgcgcaagttcaggagaaggtgcgcaagttcaggagattccaagacgtgacctcccgttgttcactcgttcgcacgcgtccaccaggttattgtatctgcaattttagctcgacggagcgaagccctgctcatgtatttgactatggagcatttgactgtgctgcattgcccacattcttgcagacacgggcaagtcagagaagaagaaaccgagcgcgagttgcgccacccgcaaataccctccggactgaaccgctgaagggccgacgacctgtccctgaccagtagaagtgtcgggatcccttgacttacgaccagcaggtcttgcatgtcgcccagaatcgtcaaaactgattcctcctggttgcgctcaaaagccggatggtcaggccgtgtagacccaaatcgcctgaaacttcgcaccctgggcccctataggtcaaagtccagccggccacaagctcagcccatttcaacggcggtagaggtctgccgagcgaggcgcttgtgggaaattggactagagctgtaagccttgtcgtgcagcatatcgacaatctgaacggtcaaaataatcgtgaaggtgtttgaagctgttcaggcgaaaaagatatccatagagcgcatgcttgctgagatcaggcaagcgcctcttagttgtaattaccgtcgtgcttgccagttccgacccagcctggctcaccagctcgagatacatgctggatcgctgacccttgtgctccgcccccctccagaatcttcttcttcggtatgtctgcagcggagtctgaagtcctcgacgcgaagttgccaagtcccccaagatgaaaattaacgttcttttgttcgtgcaggatatgatcaaggaatgatgggcggcgtcaacggcgctcttgactacgtgaccacgatgggactgggatacgtcacgccgggcgtagatggggccaagccgaccgccaccgtcacgcagtcgacgaagcaggtgagtcgtcggcaacgcatctatcttgtttttgtcccgccggccacgatacctttactgaactgctgtttgcatacagggaggaatcgtctcggcctactgtacgtcccgatcgtgtctccttcccgttttcaacctgacaccggtttctctccagacctcggaactcttttgggatgcttgctcggcgggtggctcggcgataggctcggtcgcaagaagaccatctggattgggtgcatttggatcactatcggagctcccttgcaggtgagtcggagttcactcttgccaccgttccgaaagccgcgatttcactttcgccaccgttccgaaatgaactcccgccaccgctccggaagctggcgctgacctccctctctctccgacaggcagctgcacagaacgtcccctggatggtcatggcgcggatcatcaccggagtcggcacgggccacctcaacgcgatcgtcccagtctggtccgccgaaacttccggtcatctctctcgcgggttcttcattgcgcttgaattcacgctcaacatattcggcgtggtcggtctatggttattcattcgtcttctgacccgcgtcctcgtggctgacgaagttgattcaccgccgccccaggttgtcgcatactggctcggttcgtttctcccgcgtctattgccgaaggagacggcgctgagtgaacgcgtcatacagagtatggactgtccttcatcggcgacgggaacacccagatccgctggcggttcccaatcgcgttccagctcgtgtaagtttcgcttacccgaccgtcgcagcagatcagacatactgatgtacgccggctctatagacctcttctcggcctcgcaatctgcaccttcttcatgcccggtacgcatttcgcctttttccggagcggacttcctcgctgactctcccgacaattgcagaatcgcctcgatggctcctcaaggcagggtatcgcgacgaggcgctgcatgtcctcactcgcttgcgctccgaagacggtcagatcaacgcggaagcccaggccgaatttgacgagatcgaccgagcgattcaaatcgacggtgcggcagaacccggctacatcgacatgacattccgctcgcacggcaagctgcatctgtcacgaagggtacgtcagattggcaaacagcgatgaaagctccgactgaccgaatcgctgttaccaacagactcagctcgcgatgtgagatcaatttgtctcctgctttccgttcctcgcgctgaccttttctctcgttctcagctggatccagatccttcaagagtggggcggtatcgccgctatcacgggtgagttccttatcgggctggtcggacgagaaaagcgcctgacgattcttttcccttcagtctaccaaccggtcatcttcggtctcgccggcttcgacgcttcgaaggcaggctgggtatcgggagtcaacacgatcacctacatgttttctacgtgagtattcaccttctccttgccacttggcgagacgtggtcgctgcaactgagtcgattttcttttgcagtcttatctgcgtcttcactctcgaccgtatcggtcgccgtgtcacgctcttctggggtacgttccacttggtcttttctttcttcggcttgctcttgaagcgatcactgacgaaacatgaccatgcgcaggcggcgcggttcaggctttcgcgctcatcatggcgggcgtcttcgtccaccttctcaccgttcaccccgaaaagacggctcagtacggaggtgctgctaccgctatggtgttccttgtgcgtcaagaaatgttgtctcactgtcacagactcggaatttgctgaccgggtctttcttctccagtacaccgcaactttcggcgcaacttgtgagaagtctcgccgcttcttctttgagcgaaatgaacctgacctttgtttcactacttcttaccgaaagggctcaccgtaccctggatctaccccgtgagtggcgatgccttccgccaagcgtagtcttcacattgctgacgccactcgtcttcaggccgaaatctggcccgtcaacgcacgagcgaaaggaaacgctatgggagtcgtcggatggtcgatcggtaacggatggtgcaccctcctggtccccgtcatgttcgacaagattaaggaggtcagtcccggtttttttgccgtccgtcgtcttcgctctgcctcaggtatgctgactgcctgcggtctacagaatgccctctacatcttcggcattgctaatattctcgctatcgctgtcgtgtgggcattctaccccgagaccgcgaaccgcactctcgaaggtgcgctcgtccgttcctcttccaaacgctcgcaaccccttctgactttcgagccttgccgtcttcacacagagatcgacttccttttcttcagcgacagctggttcgtgtggcacgccgaggcagagtactcgcgcctcaagaaggaactcgaggtcaccggcgaggtcccggacgatctcaagacgtcgacccacctcaaggagaagatcagcctcgacagcgccgcggcttgaacacaagagcactttccgtcggttctctagactcgtgtatatataaattctttgcctcgatcttcgcaatgtaccttcttgatgggagttcggtcctttcggtccttgatcctcttccaccttagacacattgttaccatgaggcgtctctccacgtcggaagtacggcacgctgccaacagtgcgggcgatgcgagataattgaatgggtcgcagagcaacttatgaagtctacgagatgtcaacattgacgcgattgacattcgggcgactccccgcttggcctcttcgctctcacccggcacgccaccgccacagtcctggggcctgcaagggggtcaacgtccttgcgttgcttgattgagaccggctggacgtgaaacggacgcgctctcaagcggcgccaccggcgacaagagatccgtgctggacgaggaccgtgtcgtcaaacctcgagcggtcgtgacaagatgcctgtggtcaccaacccgatcacacccacgctgagcgtctctgaactacgagcgctcgcgaaccggcacgcgctgccgcccatcgtggattctcaactcgccaagacggtgacgctgcgcacgacccgcccgcttcgcgcaggcaagacgcgccagtacagtctacccgaaatcgactttcaactcttggaggccttgggagacggcttactcgaggcgagcatatgccgagtcttgtacacgaacgtcacgagtcgggctgaccgttccgcagtgctgttctccgtgagttgggtttgcgtggtctttactgccgttcagggggtcgcgtggcttattagggtatgctccccatgcaggcttatcggagtgtactccgcaacaatgggctactcgcccagctctcgcacggctaccgccttcatctgacgatgtcgccgcctctcgaccccgcgggcacggcagcaggcgcgccgttctcggtcagcgtgaccaagattctcgccgactcgttcgaagcatacatcggagggttgacgcaggcatcgggcgagcaagtcgcgaggtcgtggctcgaaccactcttgatcgacctgatgggtctgatctatccggccgtggaaggaccggatgcggtttcccgcggtgagtgtcaaagatgcgctggcgttcccgcgctgcagagctgaagaccctttcctttttacaggccagcgtacgccccgtaccgaaccgaacgccacgcctcgcaccgaacccgtcgccgccgaacccgtcgcccagcgacctccgaagcgtccgcgcgacgacgcatagcaaacatggcagtgtcgctcttctcttttgcttgcttgactagcttgacttcgagcctgtgtgaattcgattcgaacagcaattctgcggcgagcttgcaccaagtcaccagagatccagaacgaaagagagactggctacgagagctgtcttcgttcagtggcttttggggtgccaagagtatagtagggcgtagaagaagctgaaaagagggaccgagaaagaacacgatgacaactctgtccatttcgctacacacgtctgcaaacccgttctacatgctcgtgtccacccggcaaagctcagtcgcgaccagcgcacacctcgccacgggaaaagatcccgagattgtctatatgatatccttgaaaaccggctcgaaacacttgtgtccttcagtggaagggcacgttgcgaatgcgaccgcccgagccaaattgccggtgcggcagcgcgacttcaaggtcgcgacgaacgcggcgagtcaggcgcttcgagtcggccttggcgagcgagcaacccttgaccggtccggggcagacggcgtcgatcgagcccgacttggtgacggcgttggtgacgcactgctggacctgcgagatgcacgagacgtacgcggcgccgtacgaagtctggttgttgaagaacgactcgagcgacgagttgagttcggcttgcgtgaggttgtgcgtgttcgcggtcgagttgttgagcagagtcgacgagtagtcgacgaggtcggtgaagaaggacgaggggaggtagccgtcgtactgctgcgcgatcgagaggatcgtcgtctgcgtgacgacgggagcggcggactgggtgatacattcctgagcggcggtggcgttgccggctgttgagaaggtcgacttgggtcagccatgcgatctcgacaacacgtccataaggtcatcgagacgcactggagatgagttccgcagcgcacgactgcaagatctcggcggcggtgaccgtgttgcccgagagcgtcgacgcgaccgagttgatcgcgttcgagatctgggcgccgacctgcgcgccgagctgagcgctcggggtcgtcgcgttctggatgttgtacgagaggatgttttcgacgctggtggtcaaggaagcgggcaagacgccgacaaactgctcgaggacgccgttcatggccgtctggagcgtcgtgtaggctccgccgggcttggtgaagcacgcgagcgaggaggtgttgccggcctgctggatcgcgtccgtgtagcactgcgagacctgctcgagagccgtgaccgagttgccggacagcgaagcgatgaccgactggatcgaagactggatctgggtgacgagggcctgctccgacgcgggcaggagcgtgccgagcaacggcgtgacggcgtcaaagacggacgagaggatcgtgttcggaaggatgccgacgaactgtgtgcgttcaagtcagtacgagcgcggaaaggcggacgcgcacgcgatgaaagctcacctgctcgaggatcgtgttgagcgtcgcctggagaccagccgagtcgctgccggtcggagtcaagcacgagtatccggagggcataccacccgcggcgagaacctccgagagacacttttcgagcgctgccgtcgtggtggcattcaagtcactctggctcatattggcggcagcaaaggcctcgtcgagagcctgcttgatgttgagggaggcagtgacggcgtccgaagttgtgatcagagtcgacgtcgagacttggagctcggtgatgttgcgagtgacggtgatgtagaccggagccggagtcggagcgaggagagccgagatggtgccgttggcggcgaccgctgtaccgttcacggatgcggtgctgttggcgacggcggtggcggtggcggtagcggtaatgttttcggccaagatggtcgtcaccgccggcttggtgtgagtgactgagggtacaaacgcgggatcagcgatcgcgcaacaaaacgacgcgaggcaaatcgggaccaactcgccagtgatggtcgtcgcgctaggtttgccgacttgcttctggatgacgctcgagatggctgtactctccgaaaggcgagtcagtacgagtgaaggggaccagagaagccataatttctgcgcaactcaccgccggaaagggcgcccgcgactgcaggcgggatgtacgagctgtcggcgaacgatccgacggcttcggcggcacccttggcgacagtctgcggcgaagcgccctggaccttgggcgccggcttcgacttgatcttggacgcgttcttggtccacgacttggacgaggcggacgagggagacttgggcttggaggcggtctgatccgacttgtggacgacgggtgcggcgttataagagttgtcttgcgaggaggtggaggacgacgagccggacgacttggacgacgacgacgacgacgacgacttgtgggaagcctgtttcttcttgctcgacgatgacgactttttcggcgacgggttgacgagcttctgaacctcagggacggtgtactcgcccggcttgtggatcacgcccgggtgatcggagcaaggttcgggcgacgcggcgaccaagagcgcgagtgacgagagggcgagcgaggtgaggctgaaggaacgcatgacggagtcgagttggtcttggccggtgtgtgtgagggggtggtagtacgagggagtgtgcgacgcgtcgggtgaaaggggacagggaaagaaagtgtgaaggtccgcgggacgaagcgagcgtgaatttaaaggaacgagtggaaggtccgcgggcgaagtgcgcggtgggggtccgagagccgctttgtgacgagagtgcaggaaaggaggagatggagaaggagagaaagcgagaaagagagaagggcgcaagacgcgaagaaagtcgcgtcgcgtcgtaaaagcgcgccgccgaaagattcacgtgcgcgtcgagatgatcggatcggcggccgacccgcatgcattatggccatcgcaactgtatgtattgcgaggctgcaaagcacacagagttgtacagaggccgagcgagcatcccgtccaacaaactcgggtcggttccagcaaatcgctcggagcgactcggaaggcgaggtaccagcgtagcctcagccacagtggacagcggactccgacgaagcctatcaggtcgtacgatgaagcatagtcggccggtcgctgagagttagagcggcggtctatgtgctgttccagggatggccttggatgacgtcggcggttgagctgcctggtctggcgaggacggcgggccgcgtgctatggcgaggagaggcatggtacgaataactggccgatgtgtccccgcagcaggcagtctagccggttgagtgatccggagcaaagtcgaggagagaaaaagagaagcgtcgctgctccc

SEQ ID NO: 56 - DNA, 21152 bp, Rhodotorula sp.
  source 1..21152: mol_type = other DNA
gcgccggcgcgtcatcctcgcctccgacatctaccgcgggatactccttcagccggtctttcaggacaaccccatccctgatggcctcacccacgccaacgtcatggaccggtggagcgaggccggcggcatgttcgccgtctcactcttcaccgacattgccgtctttcgcctccttggaccttccctaatgttgtagactagtagaccttatttgttgtttgttgttagtcttattctcccccagacagactcgtcagctcgtgttacagagacgagtcagcagaagaggagagcaggcattggggacctttacacaccgcgtgtaaaaaaaatcccgcgaagtctgcaaacgggcttttctgtacggtcgcggggcccatctctgccctatactacgtatacacttatcgctacaacatacgcgactgctgcaactgtgtgccgtacccctcaacttcaccggacttgccattcggctgtgaaaattcctgagatgcagagggcactcgtctcaagcggatgcgagacgaggctactctgctgacagggagatgaccgtagagagacactcaacaataacactgaatcgagcgtagattgcgagatgtgagcggtgaagaagaaaagagaggggagcccgagggcgagctacgacaaagtgcgcccgagatcctcctccaacctccacttgccgcctcatccgaataacgtgtcgtcgtcttgatcttgagcccgagagtatggtagtagtctagggggagagatcaagtcagcgagggttcgaatgaaaaagcgagcgagtgaaaaggacttagatctggaaaaggccttgaaggagcgagagcgagacgagtctgcagaacgagtcctagcatgagacttaatggacgtagcgagagcgccacgcgttatatgactccgcctttagcaatcgccccactcccgacgttcagaccattctaaagacaggcaccctctgtgtcgcttgtacttacgaggcgctgtacggccgccgccaccttcttgtcaataactgcagtcggccttgcgcctgagaaggtcccgttctaacctctgcacacggccctacacactgtattcgggtaagataagagctggaccagaatcaagcgggttcaatccgctatatctgtccaatttttccgcagatttgcgttccgaaagacacagaacctccgtctcctttgaatcggcgagcggaatcgccttgttccgtcggaagcatgtcccatatggccgctttctgcttcattctgctctcaaaaggtaatgccaagtgactgaatgccgtagtcagtggcacgaatccctcacgagtcctccggcaagtattctgtctcgaagacgattttcggtgggtggcggagtggcggcacccaccaaaagcgctcgattgcttttagcgtgtcaatacggagcccataggagtcggcgttgtagtggtatgccgctacagctggtagctccagatatcacccgttatgcagctccatgtcccactctatcgtatatgcgttgaccgccttgattgcacgcatttgtgtctcatttgcgtatatagctcaatttgcacagaacacttgcaatacgtgagtaacgtagcggttaaagtgttagcgttcggttcggtatacactttttgtcagccgagcgttcgcttcccggtgagagcatagagacaacggttctgcgttcagacggccatacttatcgcacctcctctcagacgctacaggctgctcagacaccgtccagatgacccaagtaagccaggccgttcagacgctgtccagactgatgaatccctttggcacggttgctgatcgggccgctggcgccttggaaggccgctcatccaaggagatcttcatcgagcactaccactcaatgctaggacatcagtccgatcgaatcctgcgacactacatgcgtcagcattactggtggccagaaatggtgaaggaaatcgaggcttactgccgaacttgcgcatcctgccaagctagcaaacccgaacgagccgcaccgagaggaaagctacaccctatccagctcccgttcacagcatacgaagagatttcgattgatttcaccggaccgcaccctgtcagcattgatgcggacggaatcgcgagattacattttcaccgtgattgacgccgcctccggagaagtcaagctcattccgtgcatgaaggccggtttgacgagcgcaaaatgcgcccaaatcttcctcgagaaagtgtacccgcaatggggtactccgaagacgatcctgtcggaccaagacgtccgctgggtttccgcgttctggaaagcgttccacaacgctctcggaacgacgctgcacgtgtcaaccggagcggccccttgtcgagttggccgccgctccgattggccaactcggccgctccggccatctcgacaggggatccggagcttgtcccggcggccgctgcgatggctcgattccatgcagctgatttgttctaccgagcgcatgcgagagatttacagtcgaccaccctatactaccgtgatcttgtggcgcgcaaggggcgcggtgctgcgcgccgaaatctgtatggtattctcaaactcaaatgatccggatcggctggcgcggctgcaagaggcctccacttgattggttgcctcgagaacttgaagtagtcgctagatacggttgacttagccgtttaaatacaagctatagtctcgcaaatagcgatagggaggagaatagctaaggacagctagtgtcggtagaattcgcccgagggagaagaaggaagacaaaagtcacgacgagaactacgctcagagtgcggagaccgcgggtacatgtggggggaccgggacaggtacatagtcacgatggagatcacagaaaggccgtgcttgtcgatccagattcgagaggcgagagagggcaggaagtcggaggagcgaaggatgatcgcttcgctcagaggtgtgacttggcgaggtgactcagagagcgaccctttttagcggtcgcggcggcggtgcctttgcaggtacgcttgcggcgaaccgagatcttcgcggaggtcgtttcggccgtatagcgcgggagcgaggcgttcgcgagacgaggggatcgacggagcttttggggcgacgacgccacggcgaccactcccggcatgatcggctgttcggcgcgtggggtgtcatgacgaggggtaacgggagcttgatcgacctccggcgtcggtccggcgaagtgagcggcaggggcgaagagttcgggagattgagcgcgttcgtccgcgtcgctcgagctcgtcatcgacggcgtggggccatcgaagagacccaatcccgcagcgttgatcaccaccttgaggtacgcgtcatcgagactccgaatggcgggttgtccgggttgagcgggagcgtgaagggccaagtcgagatccggcacgaaaggttgaggatggtgttccccgctcgagctcgcgagcgcgttccttccgtagaggtccgcggtgccaaagccagggctatcgaggctgccttcgcgaggagagaattccgggctagtgacgggcgagtgcgtaggccgaaaaccaggcgaaggaggggacttgcgtccctcgtcggcccagcggacgaagtggcgggctgacgtggcaggaggaggcggcgcagccgactcttgcgagggcgcggctctcgcagcagcgctcgatctcgctcgcggcagcggcccttcgcctcgtgctacacatcgacaccgacgactgtgcaccccagggcacccgcccgatctctcgagtacgcccgactccgcttttgaggactcgacggcaggacctttgtcgacaacaatgcaagttggaggccctctccgctcggtcgcatgggcagcgacaccctctcactcgagagtccgcgcgcagcatgcacgcagggcaacgacggcgttcttcgacggcataggcatcatcaacctttgcccgagacggccgcaggcgctgcgatccgtcgacgatggcattggagggaggaggcgccggcacgctctcggctcgctcgggaggcgtcgtatcccaggtgggcagattccttttgagagacgcgtgtgaagagtaacatgtgctgatgcaaagactacgatgtcggcaaaaggcgaccgaccaactcggaccttgagactcgaactgtgggcccgctgcactcagaccttgggtgggtccgacccaaggtctgagtgactgaggggcggcttttggcggcatgcctcggttgagatcgagatcgcaacaagggttgctcagcacaggcttgttcgcggagatgaactgactccgagttgcaccacagtgtagtcgccgatcgcgtgacgaaatgacgaccccgacaccgctggtgagaacgttgtgccaaaaagtatccgcgggctttcggtcgctgtttcgccgaagcagtacgccaatctgacgcgcgtgataccgcactcggttgttccaagttgacgggacaagaggctcagaatacaaggcggtatgggtggcaagagtcgcgggaacgggtgggcgtgcgagcctcgaaggcaaactgctgcaccaagtctgcactgactacgtcggtacgaagagacgtgtcacgtacggtcaagaggatgagatcgaattcaggggcggcggggtattgatcgatcacacgagatcgaaagggaaccgtctcgcgctgacccggttatcgtcgtttcgaggctggcccagagccgcgaggctatcctgctggcgatgaatggctcatgcgcagtctcaagactgaacaaggagcccgcagtgctgatcgacgctcgactccggcgagcacagaagggaagccgctcggacgcggatgccgctctcgcgtgcaacatcgccacgacgcgcatcgtgatcgaactgcgaccttggtcgaagggcgactccagtcctgacgtgcgacggacaggcgaacttgctcgagctctccctcgtcgcaatggcctcctgacttaaaacggcgtgctgtcctcgtgaccgaccgtcgataagaggagcagatggcattgacggagctaacctcaagcgctcatcgctgactgcgcgagtgcgccattctttgctacgcttgctctggagcacgcgataagctcacaagctggcagcgggccgaaatcagagcttgagcgccaaagaacccgcatgcgacgctgcgaacggaacacgcgggtaatgaactgcgacttgcttcatgcgtgacagtcaccatagcgacgcttggagtgcccgcttggaggggaaaaagtcgccgcggacaccccgcgagtgggcggacgggcgaaaggacttctccctttctcgctctaacatttgcctttactgcaaacgcttgaaggagacctcgcctcgcaccaaagcttgctctaagcgctcatatcacccatttccaaccccgccggctgcctccgctctcaacctccgactctcgaggcgcacgaaccccttctcccgttgtcccctcgacgacaaccgccgaatgctgctgccgcgcacgcagctcttgcttgcgctcgcggcttccatcgtactcgcctcgttaaccgcccgcctcgccaactggacgggaacaggaaaacagcagtccttcggagtccgcggagccggcctcgtgcacggacccttgtgagtacattgagccaagttttaccgcgcggcaaaggaaactgatgcctacaatccacaacacagcgacatgggccagaagaccctcatggcgcacttgcggggcatcgcgcgcgagcagctccagacggcgcacgcgacgaccatgatggagaccgggaccggcatcaaggccacactcgggctggtcccgaggagctttggcggaagtgagttggacagctgcttactcatagccagcctcgactgaccagtggaccatcggaacagacgagtatgtcgttgtccgcgacctgaaccccgtacgattccagcttcgccaagggacgctccagtcggcgacgtgggtgagggacaagtccgccacgaacgtcgccaacaacctcgcagctgccgagcgagccaagatcgaagagatggaccgcgagatccgcgaggtcctgggcgccgagaccgtcatcatcaacattgtcgacggcgacaagaggccggaggcaaaggcagctaccctctccgaccgtcaccgtcgcttctcgcggaggcaccaccaggaatcgaagctgccctgcgggaagaagcgcgtcgagctcgaacagaccccgcccaacgactcggactggatccaccgcgctgtgagtcctttgtctggtccagtcacacacataacggagcgggagctcacgcaaactttcaaaacagggcgacgagaagacgatctactttgttgcgcccgacgaagcagatcgcctagtacagcatcttgtgacgcagtcgttcgacacaccaaagtacgacctccccgccaactctcccttcgccaacagcaacatcgatcggctcatcgacatcgtcaagcgatacccgccgtggcgtcgaattatccatacgcgcgacctcgatgcagtcatgcacacgacggcgtgcgaggcatggttcgtcctcctcacctcgtggtcaaaagtcgaggagggggcggtccttacctcggacgccacggtactcgaagacatgctcgagccgtacgttgccgagggagcgcagcggctgcattccgtccagcgcgatgtttctgctgccgctccctctgcaccaaggactggccgtggcggcgccctaggcaagaaggcgccgctgccagctcgtccaaacctccccgtgctcttgactcagctcggcgcacagtcggcattccgcccaacatccctcgacagattgccaaccgaacgacgccggggcgatacaatcgtcgtctttctccccggcgtcgacgctctcccaggcttcggcagagatcaatgtcgccgtgcgcgcgtgtcgagccttctgggaaacgactacaccggcagcggcatcaaaggcatctcttgggcgctcgtctcgagcggtctcggcgagtctttgctttcgatgagggaagaggactggtccgaccctcaaaagctcgagtcgcaggtctcttccctcgtctccctcctcgcctccaccgccgccagagccaagacgtggcgggctggaggcgactttggcgaggtcgccaagatctcgagcaagagcacgtcgatcgggcgcgagcagatcctggacctgatcgagtcggtgcgcgttattcgaggtgagaacgtcaactacgtcgcctcgacgttctaccacaacggcgatccgcgcggacccctgcagttcaagcaagctccgccgtcgactcgcccaaatcgctacgacgtcgactcccgccagccaagccatccctacctctctcgcccaggtccgcaacacgtcgtgccacaaggtctgaaccagtcgccgacgctgccgacgagcatcgtcaacccacgcctctcgaacccgctacaaccgtctcggacggtgcccgctccgggcgagaccgatccctcccgtccaaagatgtcgaagattcgtgttcggccgctgcagatgggaggaagcgggcagagcgtgttcatggctgcgcgaacgcatggtcccgagctcactcctctcgacgacaagaccatcgcgcgaatcatacaagcagacgccagccttcctgtcgaggtcaacgacgacgacgacgcggtcgactcggaactggagattgttcccgaagatgacgacgacgacgacgacgaagacgacttcacagcagtgccaaagcaaaaaggaaagctcaatcgtgtggagtcgtactttgcaacgatcacctcgccgggcaagaaccatgccgccgcgagtcgcaagatcagcgacatcacagagtcgccccgaccagtctcgaccgcttcggcttctgccaacaatgccggccgcagcggcgcacaacagaccgccacgcgtatcacgcgtctcacatcggcaagagctcctccgccagaaccgtcgaggcgcaaagatcgcgaaccagtgcccgcgccccggcagacccgactcgcggggaatcccgcgatcaccgaacaagaggcagctctcgcatcgccagacccgatgctcctcatcatgtcgctcgccgtcaagctcgggaatcgctttgtccacagtgcgtttgcgttcttgctggaactgctgctggaacagggggaggcagggatgatggcgacgagggatctgctactccagcggaaccgagcggcgcagtgcctcggtcgtcttgctgctggcggagcataccgtgcggcgggggagcagtggttcccgcggcaaacccttgttatctctgagctggagaaggtacgtccggtcatacggtcagaatcgagatggacaagagaactgactacagtctctgagcaggaggccgtcaactcggccctcgcctccggtctcgtgcctcctcctcgactctcggtcaaggcgttcacaatagcctacgctcccttccaaaccaacctgaccgaatggccgcgaacgcacacgcgagacgaactcgtcaacttgggccagttcgtcgcgcgcgacctgtccaagaacgcagcagaagcgctgagcaaagtcctgcggaaggcgcacaaggcgttctcgctcgatccggcatcggaggctgccctgcagtcggcaaacatcgaggcttccgctcgattccgcgcgggcctcgggaactggttgggcggggtgctcgcgactgctccgttcagccaggcgtcggctcacgcaggcgccgcgaacgaagaggacaagggactgccgagtcgagaaaagaccacgtcgtacaacttgcgaaagggcacgaccggcaagagcggcgacacgcttcagcaacagcacggcctcggcccgaagatcgacccgactgacccgcgcgaaccccccgctctcgacctcgggaaagagaccgaaaagtcgctcgagcagatgatcaaaaagctcgtcgactcggtcccgcctggcagcatgttcaatcgatcagatatgcatgacgcgctactgcaagacatcaccacgatcgcgcagcgccttctagcatgccgggaccggcatctcgagatggcgctggtgctgctcagatacaagaagatcgagaacgcgacgaccatggccttcgacgacgtccttgcagggaaaatgccagagatgggggccggaacgcttgccaaggggttgctagctctggtgatgagactgcgacagatgagaacgctatcggggatcgagctcataccggtgagctgactggcacggcggcgtcgagcatagtcaaagggagactgactggcttgtccttttgacagtatttcgacccgcaatgggtcgatgtagacctgtacaccctcctccagtccggccaccggcaccgcttcaaggtgctctgcacagatctcgaaagaacctgtaccaagatcgcatgcggcctcctcccgttcgtcgatgaagacgaagggagaagagtcgagctctttgacctcttcaggcgggtgttcgaagtgtggcggattgacgaggacgaccccgacaacagagacaaggactcgccttggtcctggatcgaggccgagaggacacggtcgacgagcatccgcctggtcgtcaagaaggagagcgtgtccctcgtcgccaacctcgatcgggtcctgcgcattgtgtttggcgtggaggagaccttctacacctacatgaggcggaccggagctcaagtcgaggtgatgaaccagctcttcgatcatcgaatgttgccgaacaagttcgttcccaccgggcacatgcgcatgtcctcaacaaaggtccagttcaccggagtcgacattacgaagatgaccaaacttggacgagaggcgctgccggagaagagtatggctgtctgatgccgaaaagaattgagctgcgctgactcgccctacccagatctcgacgcaggaaccgcatgggcgcacgtctcacaactaccgctcactcaactgaaggtcaaggagtactttgccaagatgatgccgtcctttcagcgtcgcgtcgtcaacggcgagatcgtgtttgtaccgatcgtcgccatcgcaaaacccgacgcagacgtgatgctctcggaacggcgcgatccattgccgcccagatccgctcctcaggaagggctctcgcgcaaagagcgacggcgcgagcggcagcggcaagacgccctggaccgagatcgctccccggtcgacctccgaacgccggtacgcgagaaggcgccaccaagtcgaacgcgaaaggggataccggtgtcttggccaaacctgcgattcgaggggggaaggaagttggtcaatgactttcttggagacaccccgctcgaccacatccactccgccagcatcgacaccggcgtcgtctgtccagtcgcgaccttcatctcgaatccggttcgggacggcttaccaacgcagcgtgccgaggcggtggcgacctattcgcgtgagactctgctcacccagcagcgtcagaccagccgccaagcttcacacctcaactcgtatctgtcgaaccagttcgactttacccgatgggcggatccagcttccacagatgttcgagcgtcgggtacgtcgccaatgccagaaccggatccgatgcaagaccctctgctggtgaccggtctgcacttgctcaagagcatgcactcggtcttcgacgggcggtcgatccagagcaaggtcgagcgcaaggccgaggtcagttcggtggcatctcagcacgtcgatctgatattgggtggcaaggatcgctggaccgaagaggaccgcaagacgcgcaaggtcgttgtcatggtcggctcagcggacgatctcgcgaaatcttccggaatgaagggtgctgtcaccgccaacgtccttgtgcgggaaatctctgccgagctcgcgcgccgcagggtcaacttcatgatctgcgttgttcccgagaactacacatcccaacggtgcccgaacccggactgcgtcgatgcgcagggtcgccgatctcggtacgtttgctctcgtgtactctgagggtgatgcagctgaccgactggtgatctttggggacagagcggagaacccgcgtcaccagggtggaggaccaaactaccgtctcctccaatgccagcgatgtagggcggtcttccaccgggacggagtcggggctgccaacattgggagtatggggtggtgcctgctgcggagtgggttgcagctgtggggggagaactggatgggaccaggaggaaaaaaacttgcggaagcgaaaaatccctaaaaaaggggggatcaatgggatctacttgtagaaccctcgctttctccgtgatcaatctgacttctatctcctgtgtgcggtaaccacaaacaggcgcttgcgcttgcgcttccacgtccgcaaagaggcgcttggcgcttctgctcccctatggccccggcctgcttgagactccgtgtgtggactcgcatggtacagatcgacgggtctgaccgttgagaatgccggacaacgcgccggcgcgtgcgacagagcgcccgaagctttggagccggatcgggattgccggatttctcccctctcaacggtggaaagggcgtctacagatgcacatgtaccccctagtctgatcaagcttgcaccccgcggttctgccgtatccaacggtctgcgacgacgctggcacaagggcctttttcggcgaaagaggcgcttctcgcaactcgccgacggttcccgcagggatgctgggtaactctgggacggttgtaaccttcaaatggactgtatctaccgttttcaacaccagaatacgttcgtgggagaggcggcgaggccgacgactgccctggccgagtcttggagcacccgccccggcctctgcacggtcgaaaatcccaaaactctccctcatacgaccaaaaatcgtcaccgagatgctatgcttgatgtacggccccgcgccgagctctccggaacagtccgggacccaattcctgactttctcgccactcagtctcagtgttccaacttctaagcgcattgtgggtctggttacttctttcatcttgttgacagcatcagaactgacatgtaccatgttgacggattccgtcgtatcttcagaccgagctggcaaacatgattctgagccaggaaaagccggtgagttcagtgtgatgaagccatggcttgtcctgaacagttctctttgtgaatgcattcttctgaaatttgctgcttacagagaaatgactcggccgagggccggcaagcggtgagctcgagacttccaagccgaagaagcgcctgagccctctgctcaacactctgcagagccgagcaagggcagcggaccgcatgcgataccgagagcagcattgggagttctgaatgcgagaggtttgagagcccctcaaaggttgtctgaggaggagggaagaggaagagggagaggtggcaaagccggcttgctcctttttgatacgcgagcgaggtgcagcgaccgcggtgtctcttactcttgcgacactgcccacgggccgcttttcgagaaaggtgttccggcggcggccggccttaacaaaaacaaatccaggacgcgcgagaacgctcaagtcgagacaaggagacgctctcatgcgcgagggcactgaccttgacgggatcccagccctttgaatgcgctacaaagagtgtgtttcccagtgtccagccaagcaaacccgcggctgcagctgcgaggtgcgcaagttcaggagaaggtgcgcaagttcaggagattccaagacgtgacctcccgttgttcactcgttcgcacgcgtccaccaggttattgtatctgcaattttagctcgacggagcgaagccctgctcatgtatttgactatggagcatttgactgtgctgcattgcccacattcttgcagacacgggcaagtcagagaagaagaaaccgagcgcgagttgcgccacccgcaaataccctccggactgaaccgctgaagggccgacgacctgtccctgaccagtagaagtgtcgggatcccttgacttacgaccagcaggtcttgcatgtcgcccagaatcgtcaaaactgattcctcctggttgcgctcaaaagccggatggtcaggccgtgtagacccaaatcgcctgaaacttcgcaccctgggcccctataggtcaaagtccagccggccacaagctcagcccatttcaacggcggtagaggtctgccgagcgaggcgcttgtgggaaattggactagagctgtaagccttgtcgtgcagcatatcgacaatgtgaacggtcaaaataatcgtgaaggtgtttgaagctgttcaggcgaaaaagatatccatagagcgcatgcttgctgagatcaggcaagcgcctcttagttgtaattaccgtcgtgcgtgccagttccgacccagcctggctcaccagctcgagatacatgctggatcgctgacccttgtgctccgcccccctccagaatcttcttcttcggtatgtctgcagcggagtccgaagtcctcgacgcgaagttgccaagtccaagatggaaattgacgttcttttgttcgtgcaggctatgatcaaggaatgatgggcggcgtcaacggcgctcttgactacgtgaccacgatgggactgggatacgtcacgccgggcgtagatggggccaagccgaccgccaccgtcacgcagtcgacgaagcaggtgagtcgtcggcaacgcatctatcttgtttttgtcccgccggccatgatacctttactgaactgctgtttgcatacagggaggaatcgtctcggcctactgtacgtcccgatcctgcttccctccctttcctttgctgactcgggtccatctctagatctcggaactcttttgggctgcttgctgggcggctggctcggcgataggcttggtcgcaagaagacgatctggatagggtgtgtttggattttcgtcggtgctcccttgcaggtgagtcagagttcattcttaccaccgttccaaaagcccggagtttgcttttgccaccgttccggaagccgaggctgacctccctctcttgcataggcagctgcacagaacgtcccctggatggtcatggcgcggatcatcaccggagtcggcacggggcacctcaacgcgatcgtccccgtctggtccgccgaaacttccggtcatctctctcgcgggttcttcattgcgcttgaattcactctgaatattgcgggggtcggtgagtctattaatactttctctcctctggcacgcgctctcgttgctgactgattgctcttccgcaacttcagttgtcgcgtactggctcggttcgttcctttcacgtctaatgtcgaaggaactacagcactgactgtactgacctgatacagagtatggactgtctttcatcggcgacgggaacacccagatccgctggcggttcccaatcgcgttccagctcgtgtaagtttcgcttacccgaccgtcgcagcagatcagacatactgatgtatgccggctctatagacctcttctcggcctcgcaatctgcaccttcttcatgcccggtacgcatttcaccttgttccggagcggacttcctcgctgactctcccggacaattgcagaatcgcctcgatggctcctcaaggcaggatatcgcgacgaggcgctgcatgtcctcactcgcctgcgctccgaagacggtcagatcaacgcggaagcccaggccgaatttgacgagatcgaccgagcgattcaaatcgacggcgcggcagaacccggctacatcgacatgacattccgctcgcacggcaagctgcatctgtcacgaagggtacgtcagattggcaaacagcgatgaaagctcggactgaccgaatcgcttttaccaacagactcagctcgcgatgtgagatcagtttgtctcctgctttccgttcctcgcgctgaccttttctttcgttctcagctggatccagatccttcaagagtggggcggtattgccgctatcacgggtgagagttccttatcgggctggtcggacgagaaaagcgcctgacgattcttttcccttcagtctaccaaccggtcatcttcggtctcgccggtttcgacgcgtcgaaggcaggttgggtatcgggagtcaacacgatcacctacatgttctcgacgtgcgtattccccttctccttgccgttccgagccgtgatcgccgagactgagccgtttttccctcgcagcctcatttgcgtcttcactctcgaccgtatcggtcgccgtgtcacgttgttctggggtacgttccacttggtcttgttttcgtggtcttgctctcgcaagcggctactgatctgattcctctatgcacaggtggcgcggttcaggctttcgcgctcatcatggcgggcgtcttcgtccacctgctcaccgttcaccccgaaaagacggctcagtacggaggtgctgccaccgctatggtgttcctggtacgtcgacaatttttctgatcgcggatctaaagtgagaattcgctgacgcagtctttctgcctgcagtacaccgcaactttcggcgcaacttgtaagaagtctcgccgcttcttcttcgagcgaaatggacctgacctttgtttcactacttcttaccgaaagggctcaccgtaccctggatctaccccgtgggtggcgatgccttccgccaagcgtaagtcttcacattgctgacgccactcgtatttaggccgaaatctggccggtcaacgcacgagcgaaaggaaacgctatgggagtcgtcggatggtcgatcggtaacggatggtgcaccctcctggtccccgtcatgtttgacaagatcaaagaggtcagtcccggcttttttttgccgtccgtcgtcttcgctctgcctcaggtatgctgattgcctgcggtctacagaatgccctctacatcttcggcattgctaacatcctcgctattgctgtcgtgtgggcattctaccccgagaccgccaaccgcactctcgaaggtgcgctcgtccgttcctttcccgaacgctcgcaaccccttctgactttcgaaccttgccgccttcacacagagatcgacttccttttcttcagcgacagctggttcgtgtggcacgccgaggcagagtattcgcgcctcaagaaggaactcgaggtcaccggcgaggtcccagacgatctcaagacgtcgacccacctcaaggagaagatcagcctcgacagcgccgcggcttgaacacaagagcacttgctgtcgattctctagactcgtgtatatataaattcttttttgcctcgatcttcgcaatgtaccctcttgatgggagttcggtcctttcggtccttgatcctcttccaccttagacacattgttaccatgaggcgtctctccacgtcggaagtacggcacgctgccaacagtgcgggcgatgcgagagaaggggtcgcagagcaacttatgaagtctacgagatgtcaacattgacgcgattgacattcgggcgactccccgcttggcctcttcgctctcacccagcacgccaccgccacagtcctggggcctgcaagggggtcaacgtccttgagttgcttgattgagaccggctggacgtgaaacggacgcgctctcaagcggcgccaccggcgacaagagatccgtgctggacgaggaccgtgtcgtcaaacctcgagcggtcgtgacaagatgcctgtggtcaccaacccgatcacacccacgctgagcgtctctgaactacgagcgctcgcgaaccggcacgcgctgccgcccatcgtggattctcaactcgccaagacggtgacgctgcgcacgacccgcccgcttcgcgcaggcaagacgcgccagtacagtctacccgaaatcgactttcaactcttggaggccttgggagacggcttactcgaggcgagcatatgccgagtcttgtacacgaacgtcacgagtcgggctgaccgttccgcagtgctgttctccgtgagttgggtttgcgtggtctttactgccgttcagggggtcgcgtggcttattagggtatgctccccatgcaggcttatcggagtgtactccgcaacaatgggctactcgcccagctctcgcacggctaccgccttcatctgacgatgtcgccgcctctcgaccccgcgggcacggcagcaggcgcgccgttctcggccagcgtgaccaagattctcgccgactcgttcgaagcatacatcggagggttgacgcaggcatcgggcgagcaagtcgcgaggtcgtggctcgaaccactcttgatcgacctgatgggtctgatctatccggccgtggaaggaccggatgcggtttcccgcggtgagtgtcaaagatgcgctggcgttcccgcgctgcagagctgaagaccctttcctttttgcaggccagcgtacgccccgtaccgaaccgaacgccacgcctcgcaccgaacccgtcgccgccgaacccgtcgcccagcgacctccgaagcgtccgcgcgacgacgcatagcaaacatggcagtgtcgctcttctcttttgcttgcttgactagcttgacttcgagcctgtgtcaattcgattcgaacagcaattctgcggcgagcttgcaccaagtcaccagagatccagaacgaaagagagactggctacgagagctgtcttcgttcagtggcttttggggtgccaagagtatagtagggcgtagaagaagctgaaaagagggaccgagaaagaacacgatgacaactctgtccatttcgctacacacgtctgcaaacccgttctacatgctcgtgtccacccggcaaagctcagtcgcgaccagcgcacacctcgccacgggaaaagatcccgagattgtctatatgatatccttgaaaaccggctcgaaacacttgtgtccttcagtggaagggcacgttgcgaatgcgaccgcccgagccaaattgccggtgcggcagcgcgacttcaaggtcgcgacgaacgcggcgagtcaggcgcttcgagtcggccttggcgagcgagcaacccttgaccggaccggggcagacggcgtcgatcgagcccgacttggtgacggcgttggtgacgcactgctggacctgcgagatgcacgagacgtacgcggcgccgtacgaagtctggttgttgaagaacgactcgagcgacgagttgagttcggcttgcgtgaggttgtgcgcgttcgcggtcgagttgttgagcagagtcgacgagtagtcgacgaggtcggtgaagaaggacgaggggaggtagccgtcgtactgctgcgcgatcgagaggatcgtcgtctgcgtgacgacgggagcggcggactgggtgatacattcctgagcggcggtggcgttgccggctgttgagaaggtcgacttgggtcagccatgcgatctcgacaacacgtccataaggtcgtcgcgacgcactggagatgagttcggcagcgcacgactgcaagatctcggcggcagtgaccgtgttgcccgagagcgacgacgcgaccgagttgatcgcgttcgagatctgggcgccgacctgcgcgccgagctgagcgctcggggtcgtcgcgtgctggatgttgtacgagaggatgttttcgacgctggtggtcaaagaagcgggcaagacgccgacaaactgctcgaggacgccgttcatggccatctggagcgtcgtgtaggctccgccgggcttggtgaagcacgcgagcgaggaggtgttgccggcctgctggatcgcgtccgtgtagcactgcgagacctgctcgagagccgtgaccgagttgccggacagcgaagcgatgaccgactggatcgaagactggatctgggtgacgagggcctgctccgacgcgggcaggagcgtgccgagcaacggcgtgacggcgtcaaagacggacgagaggatcgtgttcggaaggatgccgacaaactgcgaccgtctcaggtcagtatgggcgcgagaggtgaaacgcgcgcgcgcgagacaaaagcgcacctgctcgaggatggtgttgagagtcgcctggaggccggccgagtcgctgccagtcggagtcaagcacgagtacccggagggcataccgcctgcggcgagaacctccgagagacacttttcgagcgctgccgtcgtggtggcattcaagtcactctggctcaagttggcggcagcaaaggcctcgtcgagagcctgcttgatgttgagcgaggcggtgacggcgtccgaagttgtgatcagagtcgacgtcgagacttggagctcggtgatgttgcgagtgacggtgatgtaaaccggagccggagtcggagcgaggagagcggagatggtgccgttggcggcgaccgctgtaccgttcacggatgcggtgctgttggcgacggcggtggcggtggcggtagcggtaatgttttcggccaagatggtcgtcaccgccggcttggtgtgagtgactgagggtacaaacgcgggatcagcaatcgcgcgagaaagaagacgcgaagaaaatcgggaccaactcaccggtgatggtagtcgcgctaggcttgccgacttgcttctggatgacgctcgagatggctgtatcccccgaaacgcgagtcagtaaaggtggaagacagcaaggatttccgcgaaactcaccgccggaaagggcgcccgcgactgccggcgggatgtacgagctgttggcgaacgatccgacggcttcggcggcacccttggcgacagtctgcggcgaagcgccctggaccttgggcgccggcttcgacttgatcttggacgcgttcttggtccacgacttggacgaggcggacgagggagacttgggcttggaggcggtctgatccgacttgtggacgacgggtgcggcgttataagagttgtcttgcgaggaggtggaggacgacgagccggacgacttggacgacgacgacgacgacgacgacttgtgggaagcctgtttcttcttgctcgacgatgacgactttttcggcgacgggttgacgagcttctgaacctcagggacggtgtactcgcccggcttgtggatcacgcccgggtgatcggagcaaggttcgggcgacgcggcgaccaagagcgcgagtgacgagagggcgagcgaggtgaggctgaaggaacgcatgacggagtcgagttggtcttggccggtgtgtgtgagggggtggtagtacgagggagtgtgcgacgcgtcgggtgaaaggggacagggaaagaaagtgtgaaggtccgcgggacgaagcgagcgtgaatttaaaggaacgagtggaaggtccgcgggcgaagtgcgcggtgggggtccgagagccgctttgtgacgagagtgcaggaaaggaggagatggagaaggagagaaagcgagaaagagagaagggcgcaagacgcgaagaaagtcgcgtcgcgtcgtaaaagcgcgccgccgaaagattcacgtgcgcgtcgagatgatcggatcggcggccgacccgcatgcattatggccatcgcaactgtatgtattgcgaggctgcaaagcacacagagttgtacagaggccgagcgagcatcccgtccaacaaactcgggtcggttccagcaaatcgctcggagcgactcggaaggcgaggtaccagcgtagcctcagccacaggggacagcggactccgacgaagcctatcaggtcgtacgatgaagcatagtcggccggtcgctgagagttagagcggcggtctatgtgctgttgcagggatggccttggatgacgtcggcggttgagctgcctggtctggcgaggacggcgggccgcgtgctatggcgaggagaggcatggtacgaataactggccgatgtgtccccgcagcaggcagtctagccggttgagtgatccggagcaaagtcgaggagagaaaaagagaagcgtcgctgctcccgacccgcttctcccaacttgtcgtt

SEQ ID NO: 57 - DNA, 21152 bp, Rhodotorula sp.; identical to SEQ ID NO: 55
  source 1..21152: mol_type = other DNA

SEQ ID NO: 58 - DNA, 21152 bp, unidentified; identical to SEQ ID NO: 55
  misc_feature 1..21152: note = Fanzor polypeptide
  source 1..21152: mol_type = other DNA

SEQ ID NO: 59 - DNA, 21152 bp, Rhodotorula sp.
  source 1..21152: mol_type = other DNA
gcgccggcgcgtcatcctcgcctccgacatctaccgcgggatactccttcagccggtctttcaggacaaccccatccctgatggcctcacccacgccaacgtcatggaccggtggagcgaggccggcggcatgttcgccgtctcactcttcaccgacattgccgtctttcgcctccttggaccttccctaatgttgtagactagtagaccttatttgttgtttgttgttagtcttattctcccccagacagactcgtcagctcgtgttacagagacgagtcagcagaagaggagagcaggcattggggacctttacacaccgcgtgtaaaaaaaatcccgcgaagtctgcaaacgggcttttctgtacggtcgcggggcccatctctgccctatactacgtatacacttatcgctacaacatacgcgactgctgcaactgtgtgccgtacccctcaacttcaccggacttgccattcggctgtgaaaattcctgagatgcagagggcactcgtctcaagcggatgcgagacgaggctactctgctgacagggagatgaccgtagagagacactcaacaataacactgaatcgagcgtagattgcgagatgtgagcggtgaagaagaaaagagaggggagcccgagggcgagctacgacaaagtgcgcccgagatcctcctccaacctccacttgccgcctcatccgaataacgtgtcgtcgtcttgatcttgagcccgagagtatggtagtagtctagggggagagatcaagtcagcgagggttcgaatgaaaaagcgagcgagtgaaaaggacttagatctggaaaaggccttgaaggagcgagagcgagacgagtctgcagaacgagtcctagcatgagacttaatggacgtagcgagagcgccacgcgttatatgactccgcctttagcaatcgccccactcccgacgttcagaccattctaaagacaggcaccctctgtgtcgcttgtacttacgaggcgctgtacggccgccgccaccttcttgtcaataactgcagtcggccttgcgcctgagaaggtcccgttctaacctctgcacacggccctacacactgtattcgggtaagataagagctggaccagaatcaagcgggttcaatccgctatatctgtccaatttttccgcagatttgcgttccgaaagacacagaacctccgtctcctttgaatcggcgagcggaatcgccttgttccgtcggaagcatgtcccatatggccgctttctgcttcattctgctctcaaaaggtaatgccaagtgactgaatgccgtagtcagtggcacgaatccctcacgagtcctccggcaagtattctgtctcgaagacgattttcggtgggtggcggagtggcggcacccaccaaaagcgctcgattgcttttagcgtgtcaatacggagcccataggagtcggcgttgtagtggtatgccgctacagctggtagctccagatatcacccgttatgcagctccatgtcccactctatcgtatatgcgttgaccgccttgattgcacgcatttgtgtctcatttgcgtatatagctcaatttgcacagaacacttgcaatacgtgagtaacgtagcggttaaagtgttagcgttcggttcggtatacactttttgtcagccgagcgttcgcttcccggtgagagcatagagacaacggttctgcgttcagacggccatacttatcgcacctcctctcagacgctacaggctgctcagacaccgtccagatgacccaagtaagccaggccgttcagacgctgtccagactgatgaatccctttggcacggttgctgatcgggccgctggcgccttggaaggccgctcatccaaggagatcttcatcgagcactaccactcaatgctaggacatcagtccgatcgaatcctgcgacactacatgcgtcagcattactggtggccagaaatggtgaaggaaatcgaggcttactgccgaacttgcgcatcctgccaagctagcaaacccgaacgagccgcaccgagaggaaagctacaccctatccagctcccgttcacagcatacgaagagatttcgattgatttcaccggaccgcaccctgtcagcattgatgcggacggaatcgcgagattacattttcaccgtgattgacgccgcctccggagaagtcaagctcattccgtgcatgaaggccggtttgacgagcgcaaaatgcgcccaaatcttcctcgagaaagtgtacccgcaatggggtactccgaagacgatcctgtcggaccaagacgtccgctgggtttccgcgttctggaaagcgttccacaacgctctcggaacgacgctgcacgtgtcaaccggagcggccccttgtcgagttggccgccgctccgattggccaactcggccgctccggccatctcgacaggggatccggagcttgtcccggcggccgctgcgatggctcgattccatgcagctgatttgttctaccgagcgcatgcgagagatttacagtcgaccaccctatactaccgtgatcttgtggcgcgcaaggggcgcggtgctgcgcgccgaaatctgtatggtattctcaaactcaaatgatccggatcggctggcgcggctgcaagaggcctccacttgattggttgcctcgagaacttgaagtagtcgctagatacggttgacttagccgtttaaatacaagctatagtctcgcaaatagcgatagggaggagaatagctaaggacagctagtgtcggtagaattcgcccgagggagaagaaggaagacaaaagtcacgacgagaactacgctcagagtgcggagaccgcgggtacatgtggggggaccgggacaggtacatagtcacgatggagatcacagaaaggccgtgcttgtcgatccagattcgagaggcgagagagggcaggaagtcggaggagcgaaggatgatcgcttcgctcagaggtgtgacttggcgaggtgactcagagagcgaccctttttagcggtcgcggcggcggtgcctttgcaggtacgcttgcggcgaaccgagatcttcgcggaggtcgtttcggccgtatagcgcgggagcgaggcgttcgcgagacgaggggatcgacggagcttttggggcgacgacgccacggcgaccactcccggcatgatcggctgttcggcgcgtggggtgtcatgacgaggggtaacgggagcttgatcgacctccggcgtcggtccggcgaagtgagcggcaggggcgaagagttcgggagattgagcgcgttcgtccgcgtcgctcgagctcgtcatcgacggcgtggggccatcgaagagacccaatcccgcagcgttgatcaccaccttgaggtacgcgtcatcgagactccgaatggcgggttgtccgggttgagcgggagcgtgaagggccaagtcgagatccggcacgaaaggttgaggatggtgttccccgctcgagctcgcgagcgcgttccttccgtagaggtccgcggtgccaaagccagggctatcgaggctgccttcgcgaggagagaattccgggctagtgacgggcgagtgcgtaggccgaaaaccaggcgaaggaggggacttgcgtccctcgtcggcccagcggacgaagtggcgggctgacgtggcaggaggaggcggcgcagccgactcttgcgagggcgcggctctcgcagcagcgctcgatctcgctcgcggcagcggcccttcgcctcgtgctacacatcgacaccgacgactgtgcaccccagggcacccgcccgatctctcgagtacgcccgactccgcttttgaggactcgacggcaggacctttgtcgacaacaatgcaagttggaggccctctccgctcggtcgcatgggcagcgacaccctctcactcgagagtccgcgcgcagcatgcacgcagggcaacgacggcgttcttcgacggcataggcatcatcaacctttgcccgagacggccgcaggcgctgcgatccgtcgacgatggcattggagggaggaggcgccggcacgctctcggctcgctcgggaggcgtcgtatcccaggtgggcagattccttttgagagacgcgtgtgaagagtaacatgtgctgatgcaaagactacgatgtcggcaaaaggcgaccgaccaactcggaccttgagactcgaactgtgggcccgctgcactcagaccttgggtgggtccgacccaaggtctgagtgactgaggggcggcttttggcggcatgcctcggttgagatcgagatcgcaacaagggttgctcagcacaggcttgttcgcggagatgaactgactccgagttgcaccacagtgtagtcgccgatcgcgtgacgaaatgacgaccccgacaccgctggtgagaacgttgtgccaaaaagtatccgcgggctttcggtcgctgtttcgccgaagcagtacgccaatctgacgcgcgtgataccgcactcggttgttccaagttgacgggacaagaggctcagaatacaaggcggtatgggtggcaagagtcgcgggaacgggtgggcgtgcgagcctcgaaggcaaactgctgcaccaagtctgcactgactacgtcggtacgaagagacgtgtcacgtacggtcaagaggatgagatcgaattcaggggcggcggggtattgatcgatcacacgagatcgaaagggaaccgtctcgcgctgacccggttatcgtcgtttcgaggctggcccagagccgcgaggctatcctgctggcgatgaatggctcatgcgcagtctcaagactgaacaaggagcccgcagtgctgatcgacgctcgactccggcgagcacagaagggaagccgctcggacgcggatgccgctctcgcgtgcaacatcgccacgacgcgcatcgtgatcgaactgcgaccttggtcgaagggcgactccagtcctgacgtgcgacggacaggcgaacttgctcgagctctccctcgtcgcaatggcctcctgacttaaaacggcgtgctgtcctcgtgaccgaccgtcgataagaggagcagatggcattgacggagctaacctcaagcgctcatcgctgactgcgcgagtgcgccattctttgctacgcttgctctggagcacgcgataagctcacaagctggcagcgggccgaaatcagagcttgagcgccaaagaacccgcatgcgacgctgcgaacggaacacgcgggtaatgaactgcgacttgcttcatgcgtgacagtcaccatagcgacgcttggagtgcccgcttggaggggaaaaagtcgccgcggacaccccgcgagtgggcggacgggcgaaaggacttctccctttctcgctctaacatttgcctttactgcaaacgcttgaaggagacctcgcctcgcaccaaagcttgctctaagcgctcatatcacccatttccaaccccgccggctgcctccgctctcaacctccgactctcgaggcgcacgaaccccttctcccgttgtcccctcgacgacaaccgccgaatgctgctgccgcgcacgcagctcttgcttgcgctcgcggcttccatcgtactcgcctcgttaaccgcccgcctcgccaactggacgggaacaggaaaacagcagtccttcggagtccgcggagccggcctcgtgcacggacccttgtgagtacattgagccaagttttaccgcgcggcaaaggaaactgatgcctacaatccacaacacagcgacatgggccagaagaccctcatggcgcacttgcggggcatcgcgcgcgagcagctccagacggcgcacgcgacgaccatgatggagaccgggaccggcatcaaggccacactcgggctggtcccgaggagctttggcggaagtgagttggacagctgcttactcatagccagcctcgactgaccagtggaccatcggaacagacgagtatgtcgttgtccgcgacctgaaccccgtacgattccagcttcgccaagggacgctccagtcggcgacgtgggtgagggacaagtccgccacgaacgtcgccaacaacctcgcagctgccgagcgagccaagatcgaagagatggaccgcgagatccgcgaggtcctgggcgccgagaccgtcatcatcaacattgtcgacggcgacaagaggccggaggcaaaggcagctaccctctccgaccgtcaccgtcgcttctcgcggaggcaccaccaggaatcgaagctgccctgcgggaagaagcgcgtcgagctcgaacagaccccgcccaacgactcggactggatccaccgcgctgtgagtcctttgtctggtccagtcacacacataacggagcgggagctcacgcaaactttcaaaacagggcgacgagaagacgatctactttgttgcgcccgacgaagcagatcgcctagtacagcatcttgtgacgcagtcgttcgacacaccaaagtacgacctccccgccaactctcccttcgccaacagcaacatcgatcggctcatcgacatcgtcaagcgatacccgccgtggcgtcgaattatccatacgcgcgacctcgatgcagtcatgcacacgacggcgtgcgaggcatggttcgtcctcctcacctcgtggtcaaaagtcgaggagggggcggtccttacctcggacgccacggtactcgaagacatgctcgagccgtacgttgccgagggagcgcagcggctgcattccgtccagcgcgatgtttctgctgccgctccctctgcaccaaggactggccgtggcggcgccctaggcaagaaggcgccgctgccagctcgtccaaacctccccgtgctcttgactcagctcggcgcacagtcggcattccgcccaacatccctcgacagattgccaaccgaacgacgccggggcgatacaatcgtcgtctttctccccggcgtcgacgctctcccaggcttcggcagagatcaatgtcgccgtgcgcgcgtgtcgagccttctgggaaacgactacaccggcagcggcatcaaaggcatctcttgggcgctcgtctcgagcggtctcggcgagtctttgctttcgatgagggaagaggactggtccgaccctcaaaagctcgagtcgcaggtctcttccctcgtctccctcctcgcctccaccgccgccagagccaagacgtggcgggctggaggcgactttggcgaggtcgccaagatctcgagcaagagcacgtcgatcgggcgcgagcagatcctggacctgatcgagtcggtgcgcgttattcgaggtgagaacgtcaactacgtcgcctcgacgttctaccacaacggcgatccgcgcggacccctgcagttcaagcaagctccgccgtcgactcgcccaaatcgctacgacgtcgactcccgccagccaagccatccctacctctctcgcccaggtccgcaacacgtcgtgccacaaggtctgaaccagtcgccgacgctgccgacgagcatcgtcaacccacgcctctcgaacccgctacaaccgtctcggacggtgcccgctccgggcgagaccgatccctcccgtccaaagatgtcgaagattcgtgttcggccgctgcagatgggaggaagcgggcagagcgtgttcatggctgcgcgaacgcatggtcccgagctcactcctctcgacgacaagaccatcgcgcgaatcatacaagcagacgccagccttcctgtcgaggtcaacgacgacgacgacgcggtcgactcggaactggagattgttcccgaagatgacgacgacgacgacgacgaagacgacttcacagcagtgccaaagcaaaaaggaaagctcaatcgtgtggagtcgtactttgcaacgatcacctcgccgggcaagaaccatgccgccgcgagtcgcaagatcagcgacatcacagagtcgccccgaccagtctcgaccgcttcggcttctgccaacaatgccggccgcagcggcgcacaacagaccgccacgcgtatcacgcgtctcacatcggcaagagctcctccgccagaaccgtcgaggcgcaaagatcgcgaaccagtgcccgcgccccggcagacccgactcgcggggaatcccgcgatcaccgaacaagaggcagctctcgcatcgccagacccgatgctcctcatcatgtcgctcgccgtcaagctcgggaatcgctttgtccacagtgcgtttgcgttcttgctggaactgctgctggaacagggggaggcagggatgatggcgacgagggatctgctactccagcggaaccgagcggcgcagtgcctcggtcgtcttgctgctggcggagcataccgtgcggcgggggagcagtggttcccgcggcaaacccttgttatctctgagctggagaaggtacgtccggtcatacggtcagaatcgagatggacaagagaactgactacagtctctgagcaggaggccgtcaactcggccctcgcctccggtctcgtgcctcctcctcgactctcggtcaaggcgttcacaatagcctacgctcccttccaaaccaacctgaccgaatggccgcgaacgcacacgcgagacgaactcgtcaacttgggccagttcgtcgcgcgcgacctgtccaagaacgcagcagaagcgctgagcaaagtcctgcggaaggcgcacaaggcgttctcgctcgatccggcatcggaggctgccctgcagtcggcaaacatcgaggcttccgctcgattccgcgcgggcctcgggaactggttgggcggggtgctcgcgactgctccgttcagccaggcgtcggctcacgcaggcgccgcgaacgaagaggacaagggactgccgagtcgagaaaagaccacgtcgtacaacttgcgaaagggcacgaccggcaagagcggcgacacgcttcagcaacagcacggcctcggcccgaagatcgacccgactgacccgcgcgaaccccccgctctcgacctcgggaaagagaccgaaaagtcgctcgagcagatgatcaaaaagctcgtcgactcggtcccgcctggcagcatgttcaatcgatcagatatgcatgacgcgctactgcaagacatcaccacgatcgcgcagcgccttctagcatgccgggaccggcatctcgagatggcgctggtgctgctcagatacaagaagatcgagaacgcgacgaccatggccttcgacgacgtccttgcagggaaaatgccagagatgggggccggaacgcttgccaaggggttgctagctctggtgatgagactgcgacagatgagaacgctatcggggatcgagctcataccggtgagctgactggcacggcggcgtcgagcatagtcaaagggagactgactggcttgtccttttgacagtatttcgacccgcaatgggtcgatgtagacctgtacaccctcctccagtccggccaccggcaccgcttcaaggtgctctgcacagatctcgaaagaacctgtaccaagatcgcatgcggcctcctcccgttcgtcgatgaagacgaagggagaagagtcgagctctttgacctcttcaggcgggtgttcgaagtgtggcggattgacgaggacgaccccgacaacagagacaaggactcgccttggtcctggatcgaggccgagaggacacggtcgacgagcatccgcctggtcgtcaagaaggagagcgtgtccctcgtcgccaacctcgatcgggtcctgcgcattgtgtttggcgtggaggagaccttctacacctacatgaggcggaccggagctcaagtcgaggtgatgaaccagctcttcgatcatcgaatgttgccgaacaagttcgttcccaccgggcacatgcgcatgtcctcaacaaaggtccagttcaccggagtcgacattacgaagatgaccaaacttggacgagaggcgctgccggagaagagtatggctgtctgatgccgaaaagaattgagctgcgctgactcgccctacccagatctcgacgcaggaaccgcatgggcgcacgtctcacaactaccgctcactcaactgaaggtcaaggagtactttgccaagatgatgccgtcctttcagcgtcgcgtcgtcaacggcgagatcgtgtttgtaccgatcgtcgccatcgcaaaacccgacgcagacgtgatgctctcggaacggcgcgatccattgccgcccagatccgctcctcaggaagggctctcgcgcaaagagcgacggcgcgagcggcagcggcaagacgccctggaccgagatcgctccccggtcgacctccgaacgccggtacgcgagaaggcgccaccaagtcgaacgcgaaaggggataccggtgtcttggccaaacctgcgattcgaggggggaaggaagttggtcaatgactttcttggagacaccccgctcgaccacatccactccgccagcatcgacaccggcgtcgtctgtccagtcgcgaccttcatctcgaatccggttcgggacggcttaccaacgcagcgtgccgaggcggtggcgacctattcgcgtgagactctgctcacccagcagcgtcagaccagccgccaagcttcacacctcaactcgtatctgtcgaaccagttcgactttacccgatgggcggatccagcttccacagatgttcgagcgtcgggtacgtcgccaatgccagaaccggatccgatgcaagaccctctgctggtgaccggtctgcacttgctcaagagcatgcactcggtcttcgacgggcggtcgatccagagcaaggtcgagcgcaaggccgaggtcagttcggtggcatctcagcacgtcgatctgatattgggtggcaaggatcgctggaccgaagaggaccgcaagacgcgcaaggtcgttgtcatggtcggctcagcggacgatctcgcgaaatcttccggaatgaagggtgctgtcaccgccaacgtccttgtgcgggaaatctctgccgagctcgcgcgccgcagggtcaacttcatgatctgcgttgttcccgagaactacacatcccaacggtgcccgaacccggactgcgtcgatgcgcagggtcgccgatctcggtacgtttgctctcgtgtactctgagggtgatgcagctgaccgactggtgatctttggggacagagcggagaacccgcgtcaccagggtggaggaccaaactaccgtctcctccaatgccagcgatgtagggcggtcttccaccgggacagagtcggggctgccaacattgggagtatggggtggtgcctgctgcggagtgggttgcagctgtggggggagaactggatgggaccaggaggaaaaaaacttgcggaagcgaaaaatccctaaaaaaggggggatcaatgggatctacttgtagaaccctcgctttctccgtgatcaatctgacttctatctcctgtgtgcggtaaccacaaacaggcgcttgcgcttgcgcttccacgtccgcaaagaggcgcttggcgcttctgctcccctatggccccggcctgcttgagactccgtgtgtggactcgcatggtacagatcgacgggtctgaccgttgagaatgccggacaacgcgccggcgcgtgcgacagagcgcccgaagctttggagccggatcgggattgccggatttctcccctctcaacggtggaaagggcgtctacagatgcacatgtaccccctagtctgatcaagcttgcaccccgcggttctgccgtatccaacggtctgcgacgacgctggcacaagggcctttttcggcgaaagaggcgcttctcgcaactcgccgacggttcccgcagggatgctgggtaactctgggacggttgtaaccttcaaatggactgtatctaccgttttcaacaccagaatacgttcgtgggagaggcggcgaggccgacgactgccctggccgagtcttggagcacccgccccggcctctgcacggtcgaaaatcccaaaactctccctcatacgaccaaaaatcgtcaccgagatgctatgcttgatgtacggccccgcgccgagctctccggaacagtccgggacccaattcctgactttctcgccactcagtctcagtgttccaacttctaagcgcattgtgggtctggttacttctttcatcttgttgacagcatcagaactgacatgtaccatgttgacggattccgtcgtatcttcagaccgagctggcaaacatgattctgagccaggaaaagccggtgagttcagtgtgatgaagccatggcttgtcctgaacagttctctttgtgaatgcattcttctgaaatttgctgcttacagagaaatgactcggccgagggccggcaagcggtgagctcgagacttccaagccgaagaagcgcctgagccctctgctcaacactctgcagagccgagcaagggcagcggaccgcatgcgataccgagagcagcattgggagttctgaatgcgagaggtttgagagcccctcaaaggttgtctgaggaggagggaagaggaagagggagaggtggcaaagccggcttgctcctttttgatacgcgagcgaggtgcagcgaccgcggtgtctcttactcttgcgacactgcccacgggccgcttttcgagaaaggtgttccggcggcggccggccttaacaaaaccaaatccaggacgcgcgagaacgctcaagtcgagacaaggagacgctctcatgcgcgagggcactgaccttgacgggatcccagccctttgaatgcgctacaaagagtgtgtttcccagtgtccagccaagcaaacccgcggctgcagctgcgaggtgcgcaagttcaggagaaggtgcgcaagttcaggagattccaagacgtgacctcccgttgttcactcgttcgcacgcgtccaccaggttattgtatctgcaattttagctcgacggagcgaagccctgctcatgtatttgactatggagcatttgactgtgctgcattgcccacattcttgcagacacgggcaagtcagagaagaagaaaccgagcgcgagttgcgccacccgcaaataccctccggactgaaccgctgaagggccgacgacctgtccctgaccagtagaagtgtcgggatcccttgacttacgaccagcaggtcttgcatgtcgcccagaatcgtcaaaactgattcctcctggttgcgctcaaaagccggatggtcaggccgtgtagacccaaatcgcctgaaacttcgcaccctgggcccctataggtcaaagtccagccggccacaagctcagcccatttcaacggcggtagaggtctgccgagcgaggcgcttgtgggaaattggactagagctgtaagccttgtcgtgcagcatatcgacaatctgaacggtcaaaataatcgtgaaggtgtttgaagctgttcaggcgaaaaagatatccatagagcgcatgcttgctgagatcaggcaagcgcctcttagttgtaattaccgtcgtgcgtgccagttccgacccagcctggctcaccagctcgagatacatgctggatcgctgacccttgtgctccgcccccctccagaatcttcttcttcggtatgtctgcagcggagtctgaagtcctcgacgcgaagttgccaagtcccccaagatgaaaattaacgttcttttgttcgtgcaggatatgatcaaggaatgatgggcggcgtcaacggcgctcttgactacgtgaccacgatgggactgggatacgtcacgccgggcgtagatggggccaagccgaccgccaccgtcacgcagtcgacgaagcaggtgagtcgtcggcaacgcatctatcttgtttttgtcccgccggccacgatacctttactgaactgctgtttgcatacagggaggaatcgtctcggcctactgtacgtcccgatcgtgtctccttcccgttttcaacctgacaccggtttctctccagacctcggaactcttttgggatgcttgctcggcgggtggctcggcgataggctcggtcgcaagaagaccatctggattgggtgcatttggatcactatcggagctcccttgcaggtgagtcggagttcactcttgccaccgttccgaaagccgcgatttcactttcgccaccgttccgaaatgaactcccgccaccgctccggaagctggcgctgacctccctctctctccgacaggcagctgcacagaacgtcccctggatggtcatggcgcggatcatcaccggagtcggcacgggccacctcaacgcgatcgtcccagtctggtccgccgaaacttccggtcatctctctcgcgggttcttcattgcgcttgaattcacgctcaacatattcggcgtggtcggtctatggttattcattcgtcttctgacccgcgtcctcgtggctgacgaagttgattcaccgccgccccaggttgtcgcatactggctcggttcgtttctcccgcgtctattgccgaaggagacggcgctgagtgaacgcgtcatacagagtatggactgtccttcatcggcgacgggaacacccagatccgctggcggttcccaatcgcgttccagctcgtgtaagtttcgcttacccgaccgtcgcagcagatcagacatactgatgtacgccggctctatagacctcttctcggcctcgcaatctgcaccttcttcatgcccggtacgcatttcgcctttttccggagcggacttcctcgctgactctcccgacaattgcagaatcgcctcgatggctcctcaaggcagggtatcgcgacgaggcgctgcatgtcctcactcgcttgcgctccgaagacggtcagatcaacgcggaagcccaggccgaatttgacgagatcgaccgagcgattcaaatcgacggtgcggcagaacccggctacatcgacatgacattccgctcgcacggcaagctgcatctgtcacgaagggtacgtcagattggcaaacagcgatgaaagctccgactgaccgaatcgctgttaccaacagactcagctcgcgatgtgagatcaatttgtctcctgctttccgttcctcgcgctgaccttttctctcgttctcagctggatccagatccttcaagagtggggcggtatcgccgctatcacgggtgagttccttatcgggctggtcggacgagaaaagcgcctgacgattcttttcccttcagtctaccaaccggtcatcttcggtctcgccggcttcgacgcttcgaaggcaggctgggtatcgggagtcaacacgatcacctacatgttttctacgtgagtattcaccttctccttgccacttggcgagacgtggtcgctgcaactgagtcgattttcttttgcagtcttatctgcgtcttcactctcgaccgtatcggtcgccgtgtcacgctcttctggggtacgttccacttggtcttttctttcttcggcttgctcttgaagcgatcactgacgaaacatgaccatgcgcaggcggcgcggttcaggctttcgcgctcatcatggcgggcgtcttcgtccaccttctcaccgttcaccccgaaaagacggctcagtacggaggtgctgctaccgctatggtgttccttgtgcgtcaagaaatgttgtctcactgtcacagactcggaatttgctgaccgggtctttcttctccagtacaccgcaactttcggcgcaacttgtgagaagtctcgccgcttcttctttgagcgaaatgaacctgacctttgtttcactacttcttaccgaaagggctcaccgtaccctggatctaccccgtgagtggcgatgccttccgccaagcgtagtcttcacattgctgacgccactcgtcttcaggccgaaatctggcccgtcaacgcacgagcgaaaggaaacgctatgggagtcgtcggatggtcgatcggtaacggatggtgcaccctcctggtccccgtcatgttcgacaagattaaggaggtcagtcccggtttttttgccgtccgtcgtcttcgctctgcctcaggtatgctgactgcctgcggtctacagaatgccctctacatcttcggcattgctaatattctcgctatcgctgtcgtgtgggcattctaccccgagaccgcgaaccgcactctcgaaggtgcgctcgtccgttcctcttccaaacgctcgcaaccccttctgactttcgagccttgccgtcttcacacagagatcgacttccttttcttcagcgacagctggttcgtgtggcacgccgaggcagagtactcgcgcctcaagaaggaactcgaggtcaccggcgaggtcccggacgatctcaagacgtcgacccacctcaaggagaagatcagcctcgacagcgccgcggcttgaacacaagagcactttccgtcggttctctagactcgtgtatatataaattctttgcctcgatcttcgcaatgtaccttcttgatgggagttcggtcctttcggtccttgatcctcttccaccttagacacattgttaccatgaggcgtctctccacgtcggaagtacggcacgctgccaacagtgcgggcgatgcgagataattgaatgggtcgcagagcaacttatgaagtctacgagatgtcaacattgacgcgattgacattcgggcgactccccgcttggcctcttcgctctcacccggcacgccaccgccacagtcctggggcctgcaagggggtcaacgtccttgcgttgcttgattgagaccggctggacgtgaaacggacgcgctctcaagcggcgccaccggcgacaagagatccgtgctggacgaggaccgtgtcgtcaaacctcgagcggtcgtgacaagatgcctgtggtcaccaacccgatcacacccacgctgagcgtctctgaactacgggcgctcgcgaaccggcacgcgctgccgcccatcgtggattctcaactcgccaagacggtgacgctgcgcacgacccgcccgcttcgcgcaggcaagacgcgccagtacagtctacccgaaatcgactttcaactcttggaggccttgggagacggcttactcgaggcgagcatatgccgagtcttgtacacgaacgtcacgagtcgggctgaccgttccgcagtgctgttctccgtgagttgggtttgcgtggtctttactgccgttcagggggtcgcgtggcttgttagggtatgctccccatgcaggcttatcggagtgtactccgcaacaatgggctactcgcccagctctcgcacggctaccgccttcatctgacgatgtcgccgcctctcgaccccgcgggcacggcagcaggcgcgccgttctcggtcagcgtgaccaagattctcgccgactcgttcgaagcatacatcggagggttgacgcaggcatcgggcgagcaagtcgcgaggtcgtggctcgaaccactcttgatcgacctgatgggtctgatctatccggccgtggaaggaccggatgcggtttcccgcggtgagtgtcaaagatgcgctggcgttcccgcgctgcagagctgaagaccctttcctttttacaggccagcgtacgccccgtaccgaaccgaacgccacgcctcgcaccgaacccgtcgccgccgaacccgtcgcccagcgacctccgaagcgtccgcgcgacgacgcatagcaaacatggcagtgtcgctcttctcttttgcttgcttgactagcttgacttcgagcctgtgtgaattcgattcgaacagcaattctgcggcgagcttgcaccaagtcaccagagatccagaacgaaagagagactggctacgagagctgtcttcgttcagtggcttttggggtgccaagagtatagtagggcgtagaagaagctgaaaagagggaccgagaaagaacacgatgacaactctgtccatttcgctacacacgtctgcaaacccgttctacatgctcgtgtccacccggcaaagctcagtcgcgaccagcgcacacctcgccacgggaaaagatcccgagattgtctatatgatatccttgaaaaccggctcgaaacacttgtgtccttcagtggaagggcacgttgcgaatgcgaccgcccgagccaaattgccggtgcggcagcgcgacttcaaggtcgcgacgaacgcggcgagtcaggcgcttcgagtcggccttggcgagcgagcaacccttgaccggtccggggcagacggcgtcgatcgagcccgacttggtgacggcgttggtgacgcactgctggacctgcgagatgcacgagacgtacgcagcgccgtacgaagtctggttgttgaagaacgactcgagcgacgagttgagttcggcttgcgtgaggttgtgcgcgttcgcggtcgagttgagcagagtggacgagtagtcgacgaggtcggcgaagaaggacgaggggaggtagccgtcgtactgctgtgcgatcgagaggatcgtcgtctgcgtgacgacgggagcggcggactgggtgatacattcctgagcggcggtggcgttgccggctgtcgagaaggtcgacttgggtcagctcattggatctcgaaagaagggcagaaggtcatcgagacgcactggatatgagttccgcagcgcacgactgcaagatctcggcggcggtgaccgtgttgcccgagagcgacgacgcgaccgagttgatcgcgttcgagatctgggcgccgacctgcgcgccgagctgagcgctcggggtcgtcgcgttctggatgttgtacgagaggatgttttcgacgctggtggtcaaggaagcgggcaagacgccgacaaactgctcgaggacgccgttcatggccgtctggagcgtcgtgtaggctccgccgggcttggtgaagcacgcgagcgaggaggtgttgccggcctgctggatcgcgtccgtgtagcactgcgagacctgctcgagagccgtgaccgagttgccggacagcgaagcgatgaccgactggatcgaagactggatctgagtgacgagggcctgctccgacgctggcaagagagtgccgagcaagggcgtaacggcgtcaaagacggacgagaggatcgtgttcggaaggatgccgacgaactgtgtgcgttcaagtcagtacgagcgcggaaaggcggacgcgcacgcgatgaaagctcacctgctcgaggatcgtgttgagcgtcgcctggagaccagccgagtcgctgccggtcggagtcaagcacgagtatccggagggcatgccgcccgccgcgagaacctccgagagacacttttcgagcgcggccgtcgtggtggcgttcaggtcgctctggctcagattcgcggcggcaaaagcctcgtcgagagcctgcttgatgttgagcgaggcagtgacggcgtccgaagttgtgatcagagtcgaagtcgagacttggagctcggtgatgttgcgagtgacggtgatgtaaaccggagccggagtcggagcgaggagagccgagatggtgccgttggcggcgaccgctgtaccgttcacggatgcggtgctgttggcgacggcactggcggtggcggtagcagtgatgttgttggccaagatggtcgttacggcaggcttggtgtgggtgactggagggagcgattcgggatcagcaatcgcgcgagaaagaagacgcgaagaaaatcgggaccaactcaccggtgatggtagtcgcgctaggcttgccgacttgcttctggatgacgctcgagatggctgtatcccccgaaacgcgagtcagtaaaggtggaagacagcaaggatttccgcgaaactcaccgccggaaagggcgcccgcgactgccggcgggatgtacgagctgttggcgaacgatccgacggcttcggcggcacccttggcgacagtctgcggcgaagcgccccggaccttgggcgccggcttcgacttgatcttggacgcgttcttggtccacgacttggacgagccggacgagggagacttgggcttggaggcggtctgatccgacttgttgacgacgggtgcggcgttattagagttgtcttgcgaggaggaggaggacgacgagcccgacgacttggacgacgacgacgacgacgacgacttgtgggaagcctgcttcttcttgctcgacgatgacgactttttcggcgacgggttgacgagcttctgaacctcgggtacggtgtactcgcccggcttgtggatcacgcccgggtgatcggagcaaggttcgggcgaggcggcgaccaagagcgcgagtgacgagagggcgagcgaggtgaggctgaaggaacgcatgacggagtcgagttggtcttggccggtgtgtgtgagggggtggtagtacgagggagtgtgcgacgcgtcgggtgaaaggggacagggaaagaaagtgtgaaggtccgcgggacgaagcgagcgtaaatttaaaggaacgagtggaaggtccgcgggcgaagtgcgcggtgggggtccgagagccgctttgtgacgagagtgcaggaaaggaggagatggagaaggagagaaagcgagaaagagagaagggcgcaagacgcgaagaaagtcgcgtcgcgtcgtaaaagcgcgccgccgaaagattcacgtgcgcgtcgagatgatcggatcggcggccgacccgcatgcattatggccatcgcaactgtatgtattgcgaggctgcaaagcacacagagttgtacagaggccgagcgagcatcccgtccaacaaactcgggtcggttccagcaaatcgctcggagcgactcggaaggcgaggtaccagcgtagcctcagccacaggggacagcggactccgacgaagcctatcaggtcgtacgatgaagcatagtcggccggtcgctgagagttagagcggcggtctatgtgctgttccagggatggccttggatgacgtcggcggttgagctgcctggtctggcgaggacggcgggccgcgtgctatggcgaggagaggcatggtacgaataactggccgatgtgtccccgcagcaggcagtctagccggttgagtgatccggagcaaagtccaacaaagtcgaggagagaaaaagagaagcgtcgctgctccc

SEQ ID NO: 60 - DNA, 21152 bp, Rhodotorula sp.; identical to SEQ ID NO: 59
  source 1..21152: mol_type = other DNA

SEQ ID NO: 61 - DNA, 21152 bp, Rhodotorula sp.; identical to SEQ ID NO: 59
  source 1..21152: mol_type = other DNA

SEQ ID NO: 62 - DNA, 21152 bp, Rhodotorula sp.; identical to SEQ ID NO: 59
  source 1..21152: mol_type = other DNA

SEQ ID NO: 63 - DNA, 21152 bp, Rhodotorula sp.; identical to SEQ ID NO: 59
  source 1..21152: mol_type = other DNA

SEQ ID NO: 64 - DNA, 21152 bp, Rhodotorula sp.; identical to SEQ ID NO: 59
  source 1..21152: mol_type = other DNA

SEQ ID NO: 65 - DNA, 21152 bp, Rhodotorula sp.; identical to SEQ ID NO: 59
  source 1..21152: mol_type = other DNA

SEQ ID NO: 66 - DNA, 21152 bp, Rhodotorula sp.
  source 1..21152: mol_type = other DNA
ggtaagtagtgctcaccgcccctaacctgcagttctcttccgaatccgacatggccaagtacgccgaagtgcgagaaaagcaacgccacgtcgacgccgtcgtcgaacgcggctttgctgacccgggactcgcccgcggcgtctgggtcgggttcaccttcaaggcgaagaaggacgtcgaacgcgcgttgcgcgaacagctggcggcgaacgagcaggacgaaaccttgcaggttctcttctgagatgccgtcccgtctctcggttactatcggacacaagccccctcgaccgattccacgccgtgctgtacataacaatctcgctcacgcctaatcgctcgatttacaaacctcactcgcccaaagacactgtttttcttctcgcgctcacgttttctctccgttcccgactcccgccgtgccatttcgttgtacacctacagtttgcctccgtttcgcccgaagctcttcgcctcctcactcgctcttgctcccttcgactgcaccgcctgtactttccgctctctgcgtgccgtgcctgtcctgtacagtagttctctcgccgtcatgcatctctcgccgtcatgcattctctcgtccagaatcgaaatgcgaatcggaaagcgggcagagcacgttggaacctcgatgcagtgataaagacagcaactacttgagcggggagggactgggtagagacaacaacaaaagaacatagagtcgtggagatgaaaagcgatagatcaagcggatgcctcgtcctggaacggcgacctcctcgcgctgccgagccactttgcttcgggggagctgtcactcgcgttcctctgactgcgtccgccacccggcttcgctttaccgccctcgagccaagccggatctccgccgcagctgtaccaactaatgcgcctcaagcgatcttcgagttcgtcccgctcctcgctcagctcgcggaccatgtcgttcccggtccggaggcagtcggccagcgacctttcgcgcgcgcggaggagttcgagttcggcgtccttgtcctgcaagctcatgcgcagcatgcggttctccatctcggtctgttgcagagagcgagagagttcttcgttgtccgtaaggcgggcgccgtccgtgtgcgtcgtttcttgaaacgagatgctggtaggcgtgcaaagatcgaaagccggcgaatgctccattgacgctccttcgccttgacggggctcgatcgacggaagctgaatcgagagcgaagaacggcgccagcggaggccaatgcggtcgccagcttcactcaaagtcgacgtactcgaccgccatgggtgactcggctgcgcatccgatggcaggtcttgcatcaaaggaaccgtcttcgcgttctggttcgcctcggccggactcgcgaactcgatggtgaccgtcggcacctgcgagaccggacggcgcggagtcgtacgagcggcatcttcggtgcgagacgagatcacgagtgaggtggggcgactggcgacggttcgacgaacgcgaccgacgacgtgggacgaggctttccgcagcaagcgccagcccttcgcgtcgacctcctccgccgccgggatcgagcctttcggcgtcaagacctgcttgttgacagccgacgcgcgcggcgtcgccgtgcattcgttcggttcttcgggatcttcgtacacctcgaaagtcggcttggtacgagcaggggaacgcccgcgccccttgacacgctcaccagcgggtccagaggcgcctttctcgaggatcgcgccaaacgtgaacaagcccggcgagacgggaggtttccccgccaaggcacgctcgaacgacgtgtacccgtcggaacgcttgaggaggctcgaatgcgcagagtgcgtcgagctcggcgagcgctcgtcttccgtgtccacctccgcgacggcgtccgtgacggaccagcgaattgtgatcgggtgcggtcgcgagcgtcgagtacgaggctggaccgtcgctgcagggtcggctggagccttctcaacccgactcggcgcactggcggtcgatttctggcggacgtgcggggcggtaaagatcgagcggagtcgctggtggatcgaagccttggagcgaacctgtcgagttggcggacccgaatccgaagccgcggctgcatcagcagcaggcggaagcgcttcaggagcggtggcgctccccgacgacgtcggcgcagtctcgacggaaatcctcgaggaggaatcaactccgtcgatgcgtatcatgcccctcgaatacagttcacgcagcgaaggggacacagagggcgacaacttgaggacgcctgggacgattgctggacggtcgtctgcgagagcggcggtctgcggcgtcgccaggtccagcgcgagaccaaggtcgctctgcttttccagcttcggagaatccggcgagttggtgccggacgtgaccgtcgacgagggcttcgggaagacgaagccttcagtgagcagcgcgttccactcgcgattggcgggagcgtccgaggcggaggagatgacggcttttcccggtcggcctccggcctggctcgggcccttccggttgaagttttcggggagtatgttaccagactctgtgacgctgcgtcgcggaccaaagacgagcgcgtcgctggtctccttctcgtcgagaggcggaagcggaaaagcgatggccggggacgaggacgagcgacgcgtagatgccgttgacgcatacgccgattcgcacgaaggaccagagctgtcgaagcacgatttgagaagctgttgttgctcgtcctctttggcgacgaggctcggcgtccggtacccgaggaaaacgaggtagaaaacgcgagcatgcgtactgtcaggagggaccggaggatgacgacaacgattgtcaatatcgcgatggaaggcttcatcgcgcaaaacccgaaagaggggtgactcacttgagcggcaacctgatctgcctctcgaccaccttggtgtcctcgatccccaacaacatggcaacgtcgctgacaatgtcttcgacgagcggctcattcacttcgtatgcagctcgcggagggtcgacccgctcgaagacgcggaaagcggcgtgaggcggagggtcgatcggctggacgatgaatgggtgcgcgagcagctttggggcgacgacgccacggcgaccactcccggcatgatcggctgttcggcgcgtggggtgtcatgacgaggggtaacgggagcttgatcgacctccggcgtcggtccggcgaagtgagcggcaggggcgaagagttcgggagattgagcgcgttcgtccgcgtcgctcgagctcgtcatcgacggcgtggggccatcgaagagacccaatcccgcagcgttgatcaccaccttgaggtacgcgtcatcgagactccgaatggcgggttgtccgggttgagcgggagcgtgaagggccaagtcgagatccggcacgaaaggttgaggatggtgttccccgctcgagctcgcgagcgcgttccttccgtagaggtccgcggtgccaaagccagggctatcgaggctgccttcgcgaggagagaattccgggctagtgacgggcgagtgcgtaggccgaaaaccaggcgaaggaggggacttgcgtccctcgtcggcccagcggacgaagtggcgggctgacgtggcaggaggaggcggcgcagccgactcttgcgagggcgcggctctcgcagcagcgctcgatctcgctcgcggcagcggcccttcgcctcgtgctacacatcgacaccgacgactgtgcaccccagggcacccgcccgatctctcgagtacgcccgactccgcttttgaggactcgacggcaggacctttgtcgacaacaatgcaagttggaggccctctccgctcggtcgcatgggcagcgacaccctctcactcgagagtccgcgcgcagcatgcacgcagggcaacgacggcgttcttcgacggcataggcatcatcaacctttgcccgagacggccgcaggcgctgcgatccgtcgacgatggcattggagggaggaggcgccggcacgctctcggctcgctcgggaggcgtcgtatcccaggtgggcagattccttttgagagacgcgtgtgaagagtaacatgtgctgatgcaaagactacgatgtcggcaaaaggcgaccgaccaactcggaccttgagactcgaactgtgggcccgctgcactcagaccttgggtgggtccgacccaaggtctgagtgactgaggggcggcttttggcggcatgcctcggttgagatcgagatcgcaacaagggttgctcagcacaggcttgttcgcggagatgaactgactccgagttgcaccacagtgtagtcgccgatcgcgtgacgaaatgacgaccccgacaccgctggtgagaacgttgtgccaaaaagtatccgcgggctttcggtcgctgtttcgccgaagcagtacgccaatctgacgcgcgtgataccgcactcggttgttccaagttgacgggacaagaggctcagaatacaaggcggtatgggtggcaagagtcgcgggaacgggtgggcgtgcgagcctcgaaggcaaactgctgcaccaagtctgcactgactacgtcggtacgaagagacgtgtcacgtacggtcaagaggatgagatcgaattcaggggcggcggggtattgatcgatcacacgagatcgaaagggaaccgtctcgcgctgacccggttatcgtcgtttcgaggctggcccagagccgcgaggctatcctgctggcgatgaatggctcatgcgcagtctcaagactgaacaaggagcccgcagtgctgatcgacgctcgactccggcgagcacagaagggaagccgctcggacgcggatgccgctctcgcgtgcaacatcgccacgacgcgcatcgtgatcgaactgcgaccttggtcgaagggcgactccagtcctgacgtgcgacggacaggcgaacttgctcgagctctccctcgtcgcaatggcctcctgacttaaaacggcgtgctgtcctcgtgaccgaccgtcgataagaggagcagatggcattgacggagctaacctcaagcgctcatcgctgactgcgcgagtgcgccattctttgctacgcttgctctggagcacgcgataagctcacaagctggcagcgggccgaaatcagagcttgagcgccaaagaacccgcatgcgacgctgcgaacggaacacgcgggtaatgaactgcgacttgcttcatgcgtgacagtcaccatagcgacgcttggagtgcccgcttggaggggaaaaagtcgccgcggacaccccgcgagtgggcggacgggcgaaaggacttctccctttctcgctctaacatttgcctttactgcaaacgcttgaaggagacctcgcctcgcaccaaagcttgctctaagcgctcatatcacccatttccaaccccgccggctgcctccgctctcaacctccgactctcgaggcgcacgaaccccttctcccgttgtcccctcgacgacaaccgccgaatgctgctgccgcgcacgcagctcttgcttgcgctcgcggcttccatcgtactcgcctcgttaaccgcccgcctcgccaactggacgggaacaggaaaacagcagtccttcggagtccgcggagccggcctcgtgcacggacccttgtgagtacattgagccaagttttaccgcgcggcaaaggaaactgatgcctacaatccacaacacagcgacatgggccagaagaccctcatggcgcacttgcggggcatcgcgcgcgagcagctccagacggcgcacgcgacgaccatgatggagaccgggaccggcatcaaggccacactcgggctggtcccgaggagctttggcggaagtgagttggacagctgcttactcatagccagcctcgactgaccagtggaccatcggaacagacgagtatgtcgttgtccgcgacctgaaccccgtacgattccagcttcgccaagggacgctccagtcggcgacgtgggtgagggacaagtccgccacgaacgtcgccaacaacctcgcagctgccgagcgagccaagatcgaagagatggaccgcgagatccgcgaggtcctgggcgccgagaccgtcatcatcaacattgtcgacggcgacaagaggccggaggcaaaggcagctaccctctccgaccgtcaccgtcgcttctcgcggaggcaccaccaggaatcgaagctgccctgcgggaagaagcgcgtcgagctcgaacagaccccgcccaacgactcggactggatccaccgcgctgtgagtcctttgtctggtccagtcacacacataacggagcgggagctcacgcaaactttcaaaacagggcgacgagaagacgatctactttgttgcgcccgacgaagcagatcgcctagtacagcatcttgtgacgcagtcgttcgacacaccaaagtacgacctccccgccaactctcccttcgccaacagcaacatcgatcggctcatcgacatcgtcaagcgatacccgccgtggcgtcgaattatccatacgcgcgacctcgatgcagtcatgcacacgacggcgtgcgaggcatggttcgtcctcctcacctcgtggtcaaaagtcgaggagggggcggtccttacctcggacgccacggtactcgaagacatgctcgagccgtacgttgccgagggagcgcagcggctgcattccgtccagcgcgatgtttctgctgccgctccctctgcaccaaggactggccgtggcggcgccctaggcaagaaggcgccgctgccagctcgtccaaacctccccgtgctcttgactcagctcggcgcacagtcggcattccgcccaacatccctcgacagattgccaaccgaacgacgccggggcgatacaatcgtcgtctttctccccggcgtcgacgctctcccaggcttcggcagagatcaatgtcgccgtgcgcgcgtgtcgagccttctgggaaacgactacaccggcagcggcatcaaaggcatctcttgggcgctcgtctcgagcggtctcggcgagtctttgctttcgatgagggaagaggactggtccgaccctcaaaagctcgagtcgcaggtctcttccctcgtctccctcctcgcctccaccgccgccagagccaagacgtggcgggctggaggcgactttggcgaggtcgccaagatctcgagcaagagcacgtcgatcgggcgcgagcagatcctggacctgatcgagtcggtgcgcgttattcgaggtgagaacgtcaactacgtcgcctcgacgttctaccacaacggcgatccgcgcggacccctgcagttcaagcaagctccgccgtcgactcgcccaaatcgctacgacgtcgactcccgccagccaagccatccctacctctctcgcccaggtccgcaacacgtcgtgccacaaggtctgaaccagtcgccgacgctgccgacgagcatcgtcaacccacgcctctcgaacccgctacaaccgtctcggacggtgcccgctccgggcgagaccgatccctcccgtccaaagatgtcgaagattcgtgttcggccgctgcagatgggaggaagcgggcagagcgtgttcatggctgcgcgaacgcatggtcccgagctcactcctctcgacgacaagaccatcgcgcgaatcatacaagcagacgccagccttcctgtcgaggtcaacgacgacgacgacgcggtcgactcggaactggagattgttcccgaagatgacgacgacgacgacgacgaagacgacttcacagcagtgccaaagcaaaaaggaaagctcaatcgtgtggagtcgtactttgcaacgatcacctcgccgggcaagaaccatgccgccgcgagtcgcaagatcagcgacatcacagagtcgccccgaccagtctcgaccgcttcggcttctgccaacaatgccggccgcagcggcgcacaacagaccgccacgcgtatcacgcgtctcacatcggcaagagctcctccgccagaaccgtcgaggcgcaaagatcgcgaaccagtgcccgcgccccggcagacccgactcgcggggaatcccgcgatcaccgaacaagaggcagctctcgcatcgccagacccgatgctcctcatcatgtcgctcgccgtcaagctcgggaatcgctttgtccacagtgcgtttgcgttcttgctggaactgctgctggaacagggggaggcagggatgatggcgacgagggatctgctactccagcggaaccgagcggcgcagtgcctcggtcgtcttgctgctggcggagcataccgtgcggcgggggagcagtggttcccgcggcaaacccttgttatctctgagctggagaaggtacgtccggtcatacggtcagaatcgagatggacaagagaactgactacagtctctgagcaggaggccgtcaactcggccctcgcctccggtctcgtgcctcctcctcgactctcggtcaaggcgttcacaatagcctacgctcccttccaaaccaacctgaccgaatggccgcgaacgcacacgcgagacgaactcgtcaacttgggccagttcgtcgcgcgcgacctgtccaagaacgcagcagaagcgctgagcaaagtcctgcggaaggcgcacaaggcgttctcgctcgatccggcatcggaggctgccctgcagtcggcaaacatcgaggcttccgctcgattccgcgcgggcctcgggaactggttgggcggggtgctcgcgactgctccgttcagccaggcgtcggctcacgcaggcgccgcgaacgaagaggacaagggactgccgagtcgagaaaagaccacgtcgtacaacttgcgaaagggcacgaccggcaagagcggcgacacgcttcagcaacagcacggcctcggcccgaagatcgacccgactgacccgcgcgaaccccccgctctcgacctcgggaaagagaccgaaaagtcgctcgagcagatgatcaaaaagctcgtcgactcggtcccgcctggcagcatgttcaatcgatcagatatgcatgacgcgctactgcaagacatcaccacgatcgcgcagcgccttctagcatgccgggaccggcatctcgagatggcgctggtgctgctcagatacaagaagatcgagaacgcgacgaccatggccttcgacgacgtccttgcagggaaaatgccagagatgggggccggaacgcttgccaaggggttgctagctctggtgatgagactgcgacagatgagaacgctatcggggatcgagctcataccggtgagctgactggcacggcggcgtcgagcatagtcaaagggagactgactggcttgtccttttgacagtatttcgacccgcaatgggtcgatgtagacctgtacaccctcctccagtccggccaccggcaccgcttcaaggtgctctgcacagatctcgaaagaacctgtaccaagatcgcatgcggcctcctcccgttcgtcgatgaagacgaagggagaagagtcgagctctttgacctcttcaggcgggtgttcgaagtgtggcggattgacgaggacgaccccgacaacagagacaaggactcgccttggtcctggatcgaggccgagaggacacggtcgacgagcatccgcctggtcgtcaagaaggagagcgtgtccctcgtcgccaacctcgatcgggtcctgcgcattgtgtttggcgtggaggagaccttctacacctacatgaggcggaccggagctcaagtcgaggtgatgaaccagctcttcgatcatcgaatgttgccgaacaagttcgttcccaccgggcacatgcgcatgtcctcaacaaaggtccagttcaccggagtcgacattacgaagatgaccaaacttggacgagaggcgctgccggagaagagtatggctgtctgatgccgaaaagaattgagctgcgctgactcgccctacccagatctcgacgcaggaaccgcatgggcgcacgtctcacaactaccgctcactcaactgaaggtcaaggagtactttgccaagatgatgccgtcctttcagcgtcgcgtcgtcaacggcgagatcgtgtttgtaccgatcgtcgccatcgcaaaacccgacgcagacgtgatgctctcggaacggcgcgatccattgccgcccagatccgctcctcaggaagggctctcgcgcaaagagcgacggcgcgagcggcagcggcaagacgccctggaccgagatcgctccccggtcgacctccgaacgccggtacgcgagaaggcgccaccaagtcgaacgcgaaaggggataccggtgtcttggccaaacctgcgattcgaggggggaaggaagttggtcaatgactttcttggagacaccccgctcgaccacatccactccgccagcatcgacaccggcgtcgtctgtccagtcgcgaccttcatctcgaatccggttcgggacggcttaccaacgcagcgtgccgaggcggtggcgacctattcgcgtgagactctgctcacccagcagcgtcagaccagccgccaagcttcacacctcaactcgtatctgtcgaaccagttcgactttacccgatgggcggatccagcttccacagatgttcgagcgtcgggtacgtcgccaatgccagaaccggatccgatgcaagaccctctgctggtgaccggtctgcacttgctcaagagcatgcactcggtcttcgacgggcggtcgatccagagcaaggtcgagcgcaaggccgaggtcagttcggtggcatctcagcacgtcgatctgatattgggtggcaaggatcgctggaccgaagaggaccgcaagacgcgcaaggtcgttgtcatggtcggctcagcggacgatctcgcgaaatcttccggaatgaagggtgctgtcaccgccaacgtccttgtgcgggaaatctctgccgagctcgcgcgccgcagggtcaacttcatgatctgcgttgttcccgagaactacacatcccaacggtgcccgaacccggactgcgtcgatgcgcagggtcgccgatctcggtacgtttgctctcgtgtactctgagggtgatgcagctgaccgactggtgatctttggggacagagcggagaacccgcgtcaccagggtggaggaccaaactaccgtctcctccaatgccagcgatgtagggcggtcttccaccgggacagagtcggggctgccaacattgggagtatggggtggtgcctgctgcggagtgggttgcagctgtggggggagaactggatgggaccaggaggaaaaaaacttgcggaagcgaaaaatccctaaaaaaggggggatcaatgggatctacttgtagaaccctcgctttctccgtgatcaatctgacttctatctcctgtgtgcggtaaccacaaacaggcgcttgcgcttgcgcttccacgtccgcaaagaggcgcttggcgcttctgctcccctatggccccggcctgcttgagactccgtgtgtggactcgcatggtacagatcgacgggtctgaccgttgagaatgccggacaacgcgccggcgcgtgcgacagagcgcccgaagctttggagccggatcgggattgccggatttctcccctctcaacggtggaaagggcgtctacagatgcacatgtaccccctagtctgatcaagcttgcaccccgcggttctgccgtatccaacggtctgcgacgacgctggcacaagggcctttttcggcgaaagaggcgcttctcgcaactcgccgacggttcccgcagggatgctgggtaactctgggacggttgtaaccttcaaatggactgtatctaccgttttcaacaccagaatacgttcgtgggagaggcggcgaggccgacgactgccctggccgagtcttggagcacccgccccggcctctgcacggtcgaaaatcccaaaactctccctcatacgaccaaaaatcgtcaccgagatgctatgcttgatgtacggccccgcgccgagctctccggaacagtccgggacccaattcctgactttctcgccactcagtctcagtgttccaacttctaagcgcattgtgggtctggttacttctttcatcttgttgacagcatcagaactgacatgtaccatgttgacggattccgtcgtatcttcagaccgagctggcaaacatgattctgagccaggaaaagccggtgagttcagtgtgatgaagccatggcttgtcctgaacagttctctttgtgaatgcattcttctgaaatttgctgcttacagagaaatgactcggccgagggccggcaagcggtgagctcgagacttccaagccgaagaagcgcctgagccctctgctcaacactctgcagagccgagcaagggcagcggaccgcatgcgataccgagagcagcattgggagttctgaatgcgagaggtttgagagcccctcaaaggttgtctgaggaggagggaagaggaagagggagaggtggcaaagccggcttgctcctttttgatacgcgagcgaggtgcagcgaccgcggtgtctcttactcttgcgacactgcccacgggccgcttttcgagaaaggtgttccggcggcggccggccttaacaaaaccaaatccaggacgcgcgagaacgctcaagtcgagacaaggagacgctctcatgcgcgagggcactgaccttgacgggatcccagccctttgaatgcgctacaaagagtgtgtttcccagtgtccagccaagcaaacccgcggctgcagctgcgaggtgcgcaagttcaggagaaggtgcgcaagttcaggagattccaagacgtgacctcccgttgttcactcgttcgcacgcgtccaccaggttattgtatctgcaattttagctcgacggagcgaagccctgctcatgtatttgactatggagcatttgactgtgctgcattgcccacattcttgcagacacgggcaagtcagagaagaagaaaccgagcgcgagttgcgccacccgcaaataccctccggactgaaccgctgaagggccgacgacctgtccctgaccagtagaagtgtcgggatcccttgacttacgaccagcaggtcttgcatgtcgcccagaatcgtcaaaactgattcctcctggttgcgctcaaaagccggatggtcaggccgtgtagacccaaatcgcctgaaacttcgcaccctgggcccctataggtcaaagtccagccggccacaagctcagcccatttcaacggcggtagaggtctgccgagcgaggcgcttgtgggaaattggactagagctgtaagccttgtcgtgcagcatatcgacaatctgaacggtcaaaataatcgtgaaggtgtttgaagctgttcaggcgaaaaagatatccatagagcgcatgcttgctgagatcaggcaagcgcctcttagttgtaattaccgtcgtgcgtgccagttccgacccagcctggctcaccagctcgagatacatgctggatcgctgacccttgtgctccgcccccctccagaatcttcttcttcggtatgtctgcagcggagtctgaagtcctcgacgcgaagttgccaagtcccccaagatgaaaattaacgttcttttgttcgtgcaggatatgatcaaggaatgatgggcggcgtcaacggcgctcttgactacgtgaccacgatgggactgggatacgtcacgccgggcgtagatggggccaagccgaccgccaccgtcacgcagtcgacgaagcaggtgagtcgtcggcaacgcatctatcttgtttttgtcccgccggccacgatacctttactgaactgctgtttgcatacagggaggaatcgtctcggcctactgtacgtcccgatcgtgtctccttcccgttttcaacctgacaccggtttctctccagacctcggaactcttttgggatgcttgctcggcgggtggctcggcgataggctcggtcgcaagaagaccatctggattgggtgcatttggatcactatcggagctcccttgcaggtgagtcggagttcactcttgccaccgttccgaaagccgcgatttcactttcgccaccgttccgaaatgaactcccgccaccgctccggaagctggcgctgacctccctctctctccgacaggcagctgcacagaacgtcccctggatggtcatggcgcggatcatcaccggagtcggcacgggccacctcaacgcgatcgtcccagtctggtccgccgaaacttccggtcatctctctcgcgggttcttcattgcgcttgaattcacgctcaacatattcggcgtggtcggtctatggttattcattcgtcttctgacccgcgtcctcgtggctgacgaagttgattcaccgccgccccaggttgtcgcatactggctcggttcgtttctcccgcgtctattgccgaaggagacggcgctgagtgaacgcgtcatacagagtatggactgtccttcatcggcgacgggaacacccagatccgctggcggttcccaatcgcgttccagctcgtgtaagtttcgcttacccgaccgtcgcagcagatcagacatactgatgtacgccggctctatagacctcttctcggcctcgcaatctgcaccttcttcatgcccggtacgcatttcgcctttttccggagcggacttcctcgctgactctcccgacaattgcagaatcgcctcgatggctcctcaaggcagggtatcgcgacgaggcgctgcatgtcctcactcgcttgcgctccgaagacggtcagatcaacgcggaagcccaggccgaatttgacgagatcgaccgagcgattcaaatcgacggtgcggcagaacccggctacatcgacatgacattccgctcgcacggcaagctgcatctgtcacgaagggtacgtcagattggcaaacagcgatgaaagctccgactgaccgaatcgctgttaccaacagactcagctcgcgatgtgagatcaatttgtctcctgctttccgttcctcgcgctgaccttttctctcgttctcagctggatccagatccttcaagagtggggcggtatcgccgctatcacgggtgagttccttatcgggctggtcggacgagaaaagcgcctgacgattcttttcccttcagtctaccaaccggtcatcttcggtctcgccggcttcgacgcttcgaaggcaggctgggtatcgggagtcaacacgatcacctacatgttttctacgtgagtattcaccttctccttgccacttggcgagacgtggtcgctgcaactgagtcgattttcttttgcagtcttatctgcgtcttcactctcgaccgtatcggtcgccgtgtcacgctcttctggggtacgttccacttggtcttttctttcttcggcttgctcttgaagcgatcactgacgaaacatgaccatgcgcaggcggcgcggttcaggctttcgcgctcatcatggcgggcgtcttcgtccaccttctcaccgttcaccccgaaaagacggctcagtacggaggtgctgctaccgctatggtgttccttgtgcgtcaagaaatgttgtctcactgtcacagactcggaatttgctgaccgggtctttcttctccagtacaccgcaactttcggcgcaacttgtgagaagtctcgccgcttcttctttgagcgaaatgaacctgacctttgtttcactacttcttaccgaaagggctcaccgtaccctggatctaccccgtgagtggcgatgccttccgccaagcgtagtcttcacattgctgacgccactcgtcttcaggccgaaatctggcccgtcaacgcacgagcgaaaggaaacgctatgggagtcgtcggatggtcgatcggtaacggatggtgcaccctcctggtccccgtcatgttcgacaagattaaggaggtcagtcccggtttttttgccgtccgtcgtcttcgctctgcctcaggtatgctgactgcctgcggtctacagaatgccctctacatcttcggcattgctaatattctcgctatcgctgtcgtgtgggcattctaccccgagaccgcgaaccgcactctcgaaggtgcgctcgtccgttcctcttccaaacgctcgcaaccccttctgactttcgagccttgccgtcttcacacagagatcgacttccttttcttcagcgacagctggttcgtgtggcacgccgaggcagagtactcgcgcctcaagaaggaactcgaggtcaccggcgaggtcccggacgatctcaagacgtcgacccacctcaaggagaagatcagcctcgacagcgccgcggcttgaacacaagagcactttccgtcggttctctagactcgtgtatatataaattctttgcctcgatcttcgcaatgtaccttcttgatgggagttcggtcctttcggtccttgatcctcttccaccttagacacattgttaccatgaggcgtctctccacgtcggaagtacggcacgctgccaacagtgcgggcgatgcgagataattgaatgggtcgcagagcaacttatgaagtctacgagatgtcaacattgacgcgattgacattcgggcgactccccgcttggcctcttcgctctcacccggcacgccaccgccacagtcctggggcctgcaagggggtcaacgtccttgcgttgcttgattgagaccggctggacgtgaaacggacgcgctctcaagcggcgccaccggcgacaagagatccgtgctggacgaggaccgtgtcgtcaaacctcgagcggtcgtgacaagatgcctgtggtcaccaacccgatcacacccacgctgagcgtctctgaactacgggcgctcgcgaaccggcacgcgctgccgcccatcgtggattctcaactcgccaagacggtgacgctgcgcacgacccgcccgcttcgcgcaggcaagacgcgccagtacagtctacccgaaatcgactttcaactcttggaggccttgggagacggcttactcgaggcgagcatatgccgagtcttgtacacgaacgtcacgagtcgggctgaccgttccgcagtgctgttctccgtgagttgggtttgcgtggtctttactgccgttcagggggtcgcgtggcttgttagggtatgctccccatgcaggcttatcggagtgtactccgcaacaatgggctactcgcccagctctcgcacggctaccgccttcatctgacgatgtcgccgcctctcgaccccgcgggcacggcagcaggcgcgccgttctcggtcagcgtgaccaagattctcgccgactcgttcgaagcatacatcggagggttgacgcaggcatcgggcgagcaagtcgcgaggtcgtggctcgaaccactcttgatcgacctgatgggtctgatctatccggccgtggaaggaccggatgcggtttcccgcggtgagtgtcaaagatgcgctggcgttcccgcgctgcagagctgaagaccctttcctttttacaggccagcgtacgccccgtaccgaaccgaacgccacgcctcgcaccgaacccgtcgccgccgaacccgtcgcccagcgacctccgaagcgtccgcgcgacgacgcatagcaaacatggcagtgtcgctcttctcttttgcttgcttgactagcttgacttcgagcctgtgtgaattcgattcgaacagcaattctgcggcgagcttgcaccaagtcaccagagatccagaacgaaagagagactggctacgagagctgtcttcgttcagtggcttttggggtgccaagagtatagtagggcgtagaagaagctgaaaagagggaccgagaaagaacacgatgacaactctgtccatttcgctacacacgtctgcaaacccgttctacatgctcgtgtccacccggcaaagctcagtcgcgaccagcgcacacctcgccacgggaaaagatcccgagattgtctatatgatatccttgaaaaccggctcgaaacacttgtgtccttcagtggaagggcacgttgcgaatgcgaccgcccgagccaaattgccggtgcggcagcgcgacttcaaggtcgcgacgaacgcggcgagtcaggcgcttcgagtcggccttggcgagcgagcaacccttgaccggtccggggcagacggcgtcgatcgagcccgacttggtgacggcgttggtgacgcactgctggacctgcgagatgcacgagacgtacgcagcgccgtacgaagtctggttgttgaagaacgactcgagcgacgagttgagttcggcttgcgtgaggttgtgcgcgttcgcggtcgagttgagcagagtggacgagtagtcgacgaggtcggcgaagaaggacgaggggaggtagccgtcgtactgctgtgcgatcgagaggatcgtcgtctgcgtgacgacgggagcggcggactgggtgatacattcctgagcggcggtggcgttgccggctgtcgagaaggtcgacttgggtcagctcattggatctcgaaagaagggcagaaggtcatcgagacgcactggatatgagttccgcagcgcacgactgcaagatctcggcggcggtgaccgtgttgcccgagagcgacgacgcgaccgagttgatcgcgttcgagatctgggcgccgacctgcgcgccgagctgagcgctcggggtcgtcgcgttctggatgttgtacgagaggatgttttcgacgctggtggtcaaggaagcgggcaagacgccgacaaactgctcgaggacgccgttcatggccgtctggagcgtcgtgtaggctccgccgggcttggtgaagcacgcgagcgaggaggtgttgccggcctgctggatcgcgtccgtgtagcactgcgagacctgctcgagagccgtgaccgagttgccggacagcgaagcgatgaccgactggatcgaagactggatctgagtgacgagggcctgctccgacgctggcaagagagtgccgagcaagggcgtaacggcgtcaaagacggacgagaggatcgtgttcggaaggatgccgacgaactgtgtgcgttcaagtcagtacgagcgcggaaaggcggacgcgcacgcgatgaaagctcacctgctcgaggatcgtgttgagcgtcgcctggagaccagccgagtcgctgccggtcggagtcaagcacgagtatccggagggcatgccgcccgccgcgagaacctccgagagacacttttcgagcgcggccgtcgtggtggcgttcaggtcgctctggctcagattcgcggcggcaaaagcctcgtcgagagcctgcttgatgttgagcgaggcagtgacggcgtccgaagttgtgatcagagtcgaagtcgagacttggagctcggtgatgttgcgagtgacggtgatgtaaaccggagccggagtcggagcgaggagagccgagatggtgccgttggcggcgaccgctgtaccgttcacggatgcggtgctgttggcgacggcactggcggtggcggtagcagtgatgttgttggccaagatggtcgttacggcaggcttggtgtgggtgactggagggagcgattcgggatcagcaatcgcgcgagaaagaagacgcgaagaaaatcgggaccaactcaccggtgatggtagtcgcgctaggcttgccgacttgcttctggatgacgctcgagatggctgtatcccccgaaacgcgagtcagtaaaggtggaagacagcaaggatttccgcgaaactcaccgccggaaagggcgcccgcgactgccggcgggatgtacgagctgttggcgaacgatccgacggcttcggcggcacccttggcgacagtctgcggcgaagcgccccggaccttgggcgccggcttcgacttgatcttggacgcgttcttggtccacgacttggacgagccggacgagggagacttgggcttggaggcggtctgatccgacttgttgacgacgggtgcggcgttattagagttgtcttgcgaggaggaggaggacgacgagcccgacgacttggacgacgacgacgacgacgacgacttgtgggaagcctgcttcttcttgctcgacgatgacgactttttcggcgacgggttgacgagcttctgaacctcgggtacggtgtactcgcccggcttgtggatcacgcccgggtgatcggagcaaggttcgggcgaggcggcgaccaagagcgcgagtgacgagagggcgagcgaggtgaggctgaaggaacgcatgacggagtcgagttggtcttggccggtgtgtgtgagggggtggtagtacgagggagtgtgcgacgcgtcgggtgaaaggggacagggaaagaaagtgtgaaggtccgcgggacgaagcgagcgtaaatttaaaggaacgagtggaaggtccgcgggcgaagtgcgcggtgggggtccgagagccgctttgtgacgagagtgcaggaaaggaggagatggagaaggagagaaagcgagaaagagagaagggcgcaagacgcgaagaaagtcgcgtcgcgtcgtaaaagcgcgccgccgaaagattcacgtgcgcgtcgagatgatcggatcggcggccgacccgcatgcattatggccatcgcaactgtatgtattgcgaggctgcaaagcacacagagttgtacagaggccgagcgagcatcccgtccaacaaactcgggtcggttccagcaaatcgctcggagcgactcggaaggcgaggtaccagcgtagcctcagccacaggggacagcggactccgacgaagcctatcaggtcgtacgatgaagcatagtcggccggtcgctgagagttagagcggcggtctatgtgctgttccagggatggccttggatgacgtcggcggttgagctgcctggtctggcgaggacggcgggccgcgtgctatggcgaggagaggcatggtacgaataactggccgatgtgtccccgcagcaggcagtctagccggttgagtgatccggagcaaagtccaacaaagtcgaggagagaaaaagagaagcgtcgctgctccc

SEQ ID NO: 67 - DNA, 21152 bp, unidentified; identical to SEQ ID NO: 55
  misc_feature 1..21152: note = Fanzor polypeptide
  source 1..21152: mol_type = other DNA

SEQ ID NO: 68 - DNA, 21152 bp, Rhodotorula sp.; identical to SEQ ID NO: 55
  source 1..21152: mol_type = other DNA

SEQ ID NO: 69 - DNA, 21152 bp, Rhodotorula sp.; identical to SEQ ID NO: 59
  source 1..21152: mol_type = other DNA

SEQ ID NO: 70 - DNA, 21152 bp, Rhodotorula sp.; identical to SEQ ID NO: 55
  source 1..21152: mol_type = other DNA

SEQ ID NO: 71 - DNA, 21152 bp, Rhodotorula sp.; identical to SEQ ID NO: 59
  source 1..21152: mol_type = other DNA

SEQ ID NO: 72 - DNA, 21152 bp, Rhodotorula sp.; identical to SEQ ID NO: 59
  source 1..21152: mol_type = other DNA

SEQ ID NO: 73 - DNA, 21152 bp, Rhodotorula sp.; identical to SEQ ID NO: 59
  source 1..21152: mol_type = other DNA

SEQ ID NO: 74 - DNA, 21152 bp, Rhodotorula sp.; identical to SEQ ID NO: 55
  source 1..21152: mol_type = other DNA

SEQ ID NO: 75 - DNA, 21152 bp, Rhodotorula sp.; identical to SEQ ID NO: 59
  source 1..21152: mol_type = other DNA

SEQ ID NO: 76 - DNA, 21152 bp, Rhodotorula sp.; identical to SEQ ID NO: 59
  source 1..21152: mol_type = other DNA

SEQ ID NO: 77 - DNA, 21152 bp, unidentified; identical to SEQ ID NO: 55
  misc_feature 1..21152: note = Fanzor polypeptide
  source 1..21152: mol_type = other DNA

SEQ ID NO: 78 - DNA, 21152 bp, Rhodotorula sp.; identical to SEQ ID NO: 59
  source 1..21152: mol_type = other DNA

SEQ ID NO: 79 - DNA, 19044 bp, unidentified
  variation 11736..11935: note = n is any nucleotide
  source 1..19044: mol_type = other DNA
aacattcaaaaatacttgacaaaaggctccgcgcttatgggcaatcttaaatttgagcttgctataagtggacgtcaatgtaagcttgatgttgctctatacggacgtttctacgtaaagaaggctgatgatgattctgatggacccagaggccaagatgatgagaatatcgacgcattcaataacaagtattctaaacttactttatcgggctcgcctagccagagtatcgatgatgaagaagatggtttcaatgaagatgactagaaaatgtctttctccattgacaatcatttttttctcgcaaataatctcaagacaaaaaaatacaaatatacaaatgaaaagtttttctacgttgtggcagctattcaataaaataatgaaacgaatcaaatcttgcttcgacaaactgaaggaatgtatcctacgctttcgctcaaatatctcatgctctcgcggtagtcagatccatgtctctcctgtctatggcgacaaagtagagctttgagagtactcgtttttttcgttttatgtggagtatccaatcaactgaatactataactagttgttgatgccgctgcagacaaatacgcctgaacagtaagatcgccataaatcaaaggaagggtgattctcaattgattgatatttgcagtgtacattggtagatataattgaacatcgttgggaggatcctgtccaagcataagagagcaataagtcgttccaacatgcacgtgagtaagtaaaagctcaacaaatgtacagccgtatggcacgatcgacgatagattataatatgcagttgttgtattagtcgctcctgaaacaatggtatacataggagtaagcatgaaatttctctcatcaactttatagactaaaaatcctagatgagaaatatgaaaattcaacgggatataatctgatgtcgaaaaaccggtaggtaaatccactaacggcagagttggattacgacaggataacaaatacccaggagtagttgaatggttcaacgcataaagatatgaaataccagctgcaccaccgcgacaatatgaaaatgtcttgttcaatgttgtgtcatctgatgctgacaatttggtagtattttcaaaatgttgaagagtcatggtattactatcttcagtgaatgctgttgtcggagcagcaaaattggatgtatatcttgcaatattactgatacgtagctcatcaagatatcctcgaaacgccaatgtgctactaccaccgactgcgatttgatcaaatgttgtattaggaacatctgctgtagttgttgcaacggtaatcccacttccatttatgaaaaacaaataggcagatcctgtaaacactagcgccatatgataccatatgttggcagctatcgcttgctgggttgctgcaacgccattggcaatattgtacgaagttccattatttcctaatgaaattgtcatagtagtcttcgaaaccatcgtgattgaaagtgcaaaattattcgataaagatgagataattgtttgatcggaaccagtgctcgtatatcggacatgaaattcaatagtccatccgggaatagtgttatccatgggcattcgactgccacgttccagtaaagcgtaagcaccaacgacattattcacgtataacgaacgtgctccaaacctatatagtgtcgtgctcaaggatgaggaacccacaagagaccatttattcaatagtgtaaatggtgtactaacgctcaatgttgaattatttgtaatatttgtgataaagcaagaattgatgtcattgccaaccactactgagattacatcaccgactttgaaatctgtggtaaaagtagtacctgtgccagttattgttgttgtcaacgcatcagttgcgattactccagaaagatttccggatctcgcaattacgtttagcgtattcggcaatgcactatttccattgatagtagttggagattctatgacgatatcgttagttgttgttttattttttgcatataaataatcaatcgtatattgtttgcttgaaatgcattttggtattgccatgtcaacatatcttactagtagtcctggtccccatttgacctttgtagatttagtcgtatcactgagtaacatgtcgcctatatttgtagaaacattgagtttttttagtgttgtagtagaatctgcgacaagaatatcaccaacattatacgtatttttccctgttccgccactggtttcggcaagaggagtcgacaatgtcaacgaagatgctgtaatcccattggcgacattgagacttgtcagagttccgacagaagtgatgttaggttgagctgctgtttgtagggtaccagttaatgttgatgcggttaccccgttagtgacattgagacttaccagggttccgactgttgtgatattgggttgagtcgcggtttgcaatgtaccagtcaaggttgatgccaccacactattagtgacattgaggtttgttagagttccaatcgctgtaatgttaggttggttggctgtctgtagagtaccagtcaatgttgacgctattactccgttagtgacattgaggcttgtcaaagttccaacagaggtaatcttcggttgatttgctgtttgtaatgtgccggttaacgttgatgcggtaataccattagtgacattgagagtcgataaggtaccaatagaagttatgttgggttgatttgcagtctgtagagtacctgtcaatgtcgatgctgttattccattcgtgacatttaagcttgtcagagttccaacggaagtgatgtttggttggctagctgtttgtagcgtaccagtgaatgttgatgcagttactccattgataacattaaggattgataaagtaccgatagaagtgatgtaaggttgcgctgatgtttgcaacgtgcctgttaatgaagatgctgttattccattagtgacattgaggcctaccagagttccaactgatgtaatgtttggctgagctgcagtttctagtgtaccaatcagcgttgtttgtaaaggatctgtactggtaacacttcttgaaccctcggtaccataacctagtgaacttattgcgtcaaatatatcgatgtcattgacgacaagagttctaacatccaatgtttcgattccagaaatgtttctcgcatcatccaatactaacgctttcgatggagatgctattccaggagttgttatagtataattcagctcttgagcagaggcttcaaccgaaactccagataacagcaatccacttgctaaatctaatggagatgacatcttgactttggaaccaacctcactggtgctaatgagtaaatcccctgtctcgctcataaagagatcagtatgtggagtcggccctatactaccataccgcaagcggcaacaagcaccattatcactcgcaacctctaattgagtatttggatcaattgtgttcaagccaacatttccatatttatcaatgtaaatcggcgttgcatgctcggtctgaacaataaacgagctatcatcatctaaatcaagaattacatttgtgcgatttgagtttattccagatttattgtaaggccatgatacgggtacctgtaaatgcttgcaatttattgacatcgcgcaagaatcattttatattattgcgattggtgtcgagaataccagctatcatttagcctgaaaaaaatccacaaagatattctcgatgcttactcgtggagataatcgttgaattcgcgtagtgtcattatgcgcgtcttgcagcaatagctcttgatcccaagaatcgcaaagatatccatgaggttcttctcttcgtcttctgattcattattgatcacgcgcatttgctggaataagcgatagagatgaccgattaggcagccgcatgtgggacacttgatatagggatacatgcttagcgaatgagtgatatatatagagtcgtatttgttgcttttatagatattaccaaaatagacgcgccgtttataaaatcctaacacaatctaactatctctatcaaagacacagatcagaccttagctaagtaacacgatgttactcttatttaccttatttttttgttattttctgttaaaaactagtaaaaatttgatagttcaagttactaaatttgtaagtatccgcgatatcagtaattccaacaactggaaagtcctaacgctaacatgcttgttttcaccaaagaacaagaactatcatttatcaattagtgacaatgtcactcatatgaagaattgagagtaaaaattcaattatttttttgaactggctttcttcgttacttgtcaaccagtgattatacacttgaagtttgtgtgaacaagtgtcacaaccttaccgacttgaaaaacctcatgcattgatttcttccagtagctttcattcatttccaaattcatcaagttctacttaagtgaccatctttcaatatgcccgcaaagggtaaaaagaagaagaagcgccgatttggcgagagtgacaatagtgacgacagcgactacgaagaggtggtgtcgaaacttcctcaattacgaacaagaccgtcagatgtggtttctaaacccaagaagaagactaagagaaaacaatcgcctcaaaaggataaacgaactgaagatcctaatcatccagtgaattggttcaatccccaagtttctcaagctctatggtttccttcgtctccttctttcaataagagcgattttcattttcgtggaagacataaaacgtggtgtggaaagaataagaagaaacccagacaacaaaaagaaaaagcaatcatccagactatctccaatatcaagaaatttcatcctatcaagaaaaagattttcaagccactcatgacttcttggtttgacgttggagatatatgcaaccaaccaacaataaaatcatcttttttgaagtcttcgaaagtaattgaacttgaaaaaggcttgagccagatttcagttattgaagatggtcctgtcaacagttcggtgaaaatacgactgtatccgacaacagaacaacgtgcatcacttgaacaaatgttcagcacacaacgagcgatctataacaagttagttgcttcttccagagctgacgttgcaagcaagatgagtttgaccaatttagagaaaaggtatcgccctatctccaaactgaaaaccatggcgaaatacttcaagaataacaagaaggctttgaaacggcacatggaacctcgtgatgaagttcgagattctgcgttccatgatttcaagaaggctgtgagttcttcacgttcgcgttattacaaacaaatggataaggatgaaaagactacatatccagcattgaaattcaagagcaagtttgatcgatccaacactatccagattgaagctcgatcgatttcaattgagaaaaaaaagtttgttcgttttcatccaagatttttcaagttcaagaaaggagagggcatcgagattcgtgaatcacttccggaattgaaacatgctgtgagattgcaacgactgcgtgaaggtgattactatctttgtattcctcgctttatacaagtggagaaaacaaagtcagagcgtgtttgtgcgattgacccaggcgttcgcaatttcatcacagtttacgatcctgaaggaagaacttttagcgtgaaagatgcgtacaaacgtcttcgcagaagctttattgcagtggataagttcaaatcacatttagcgcggtgggaaaactatagcaagaaagaatcagtcatgcatacaaagactaatcgcgaacaaaaaaatcacaagaagaagaaaaagaagaagacgaaatatcacagagtgcgttatcgaatgagaagattgattcgttttacacttcgtcatattacaagattggtgaaagacatgcatcagaaggtttcttcttggttgtcagacaactacaatattgtacttttgccggaatttcaaacatcgaagatggcaaggaagtatgaagaggaagtagcattagacgctaatcctttcattgatgaatttcgaccattcaatcgctctcgacgcaagatctccagttctactgtacgttcaatgatggcgttagctcattaccagttcaagaaattgttgatgtacaagatggagagaagaggcggacgtgttgttatatgcaacgaagcgtacacctcaatgacttgttcgaattgcggttcgattcgtcgaaatttgggaggcagtaaagtgtacagatgttcatcatgttcatttgtacacgatcgtgatatcaacgctgccaaaaatatctttcacaaaaatgtgaacttgatactaccggagattcctgctccggagagtcctgccagcttgctggcgttataggcctaaaaaaatgtggacttagtgatagttcttttatgtaacttttgcatattaggtattattgctaagtaccgaggagtccaagctaccataaataactaagttatctatccttgtatgaccacgtttgactttttaagggagacgaacgcactcccattaaaagagattagcagagtaatcccttcatcaatatgttttttgctgcgttgaaatcgcgatcgagaacttgtttacagcgcatgcaatcatacactcgattagctagtgtcattttcttcatactaccacagttggaacaagtcttggtagtatgatgagcatccactatcttgacaatcttcccatgtgttattacagtgagcaatgagaatgtcaccttttttctttgtaaatatatagctatgaaatcacttgtcgaacgacaaatttgttttcgtcttcggacccaagggtttaccctcaacaagatagccgggatccttgatatatgcaaacgaaccgttcaacgctggctcagtgttaccgaatgtgtagcacgacctctcaatagatctcacctacggaaactgaatgacaaccaacgcactcaactcgtccatttttttcttgatcacaatacaagcacgcttgctgacggagtatcttacataaaaaatacatatgacatagagatctctatacgaacagtccagcgcatcttagtagaacatagaatcacatacaaaaaggcttccattgcttatcargaagcytgtgctacacgacaacrwcawttcytrkcatcactatccaaacatacrgagagaargtggatagcgttggatgaagcagcgttctttctcaatcacagtagaaagtatgcatggagtacaaagggtcagagagctattgtgagaaaaccgggaagaagaggaaatatacattcattgattttagcaacatcacccgatggtgtaattgattggcgtttgtttccaggaagtgtaaactctgtccgttttcattcttttttgaatgggttaccaaatgaaagcaatgtcatcttagacaatgttgcaacacataaagcagtagctactttacagaatgtaggtctgtctactatttctcaaactgctcaaaagaaacacatgaacatgttgtatctgcctccgtattctccacaattgaaccctgtagaactgtgtttcaacaccatccgaacttttgtcaacgcaagcacgccacgcacatcgaacgatctcagaacatgcattcaaagtgttttaccatcactcacgccgttgatctgtagaaaaatgttcttacaaacactcgcaatcaaatgaaacgcaagcaaacaaagaacatctggcaatatagggaggttttttcggcttctttattggcttgaaagaaaaacatatgagagaaatgaatgctcaactgctactgggttctccgccattcattacaagaacgctcatttttttcccttgtttttgagcttctcattatccgaaatccaatatgggtaacaagcgaaagaagaagcgtctcgacgatagtgaagattccgactcggactttgaaccaatgacaagaagaagaattgcaacaatgactacgaccaaaaaacctcgagtgaagactaccaaagaactcaaagtgaccaacaagactgtcaaagtcatcaagaaaaccaaggaaactgagaaacccaagcgtgaacgtcctgatgtaatcgaacgtgcagctgccaacgccaacacggacatcactgtagtgaagactactctcaattcgttttgcaagaagaaagcaaaggcgttaccgtggacgggcgttcttttcgatatgaacaaggctattcttgaagcttatgtgtttgcaaatcttcatatcgctcgactatgtgctgaaagtcgttctattcccaaactcgatcagacgttcttctacaagtgtttgtctgctgtaactgttggaaaccgaaaaaagaaagcgatcaaggatgaagttttcaaagaatccgtgagactctataattcctggcgtgatccgactgttgaacgtgcagatagcacttttattacgtctggatggcataacaacgcaagtcagcaaatggcaacaaacgcttccaactcggtggaaaccaacttctatcgacggttcaagagatatttgagacacaaatacaaattggatggaaaacaagcgtacaacaagatgaaggatatctttgcccaagagtacaatggtaacgatttgattatctggagatatcgtttgcaaatgcctcgacatgaaaacggacatgtcaaccatgctccacatctactcatgccgttacagtatagatttctccgctactttgagtccaagcacccagtccagcagtacacccaagagagtaaacaggtccgtttgttcagccttcttccatacaagcgtgggtttgagtgctcacatttcaagatgtgtacggacggactatgggcgctactgaaacgtgctggtcttgatattcctcacaaacgtggtggatggagaaatatttctgataaatggtgggaaaaacttttctatatcaaaaatttgaaaccaagaatcgaaagtttgctggagaaattgtaactgatggtaaagctgtcagcatcgtactccggaaaccaaaagtggaagttgttcctcaagaaccaaatctgaaggattacgatgtgatatggggtcttgatcccggcagaagagatctctttgtggctacaaatcagaacgatcaaaagatttcgtgttcttccaaggagtactatgaagatgccaaatttagacatagcggraagaaaatcagatgctggcaagagaaggacaaaatggtactcaaggcgatcagagagatgccaacgaagaagaccgcgactttacaatctttcaaggtatatatcgagtacttgatcccgtatttggatctcttattggatttcagcatggtcaagccttttcgagatctcaaattcaagcgatatgtctttatgaagaagaagttgcgcgagttatgtttgacgttgactgaagaagctggtcgccgtacgatagttggttttggtgactggagtaaccaggatattggtggttttatcaagaagtctcccgctggtcctgtcaagcgtttcgagaaacaacttcgacgatattgtactgttatctctatcgatgagtacaacacaagtaaagttcacgctcactgtcgtgagaaagagctatacaatcaatactccaagcgcaggtgtaaggatggcgaagatcatactctcaaagttcacagtgtactccattgtagttccaatggctgtcgtagtatgactgtgaacagagatgataatgcgtccaagaacatcttacgtcttactcaactactacttcgaggtgaagatcgtcctctagagttttgtagaacgtaggaatagaaaaaaagagacagtgtttacttagtgccttagggtggcaggtaggcagtttggtcctcacttcatggctgagggtctcgaacattattatccttcgggtacagaaggtgacattctcgttgccggatgtaataacgcatatctttcgttaccagtgaagatgttgtctaacgcattgatactagagattattggatctataattttttggataaactgaataaatgcattctttgaaaacaagtgtgctggatttggttgcccatttatccaagaagatccatactcatccagtacaagaataagacttatatattcctgagcaggaaataacgtgatcacaattgatttttttgatatgagcaaatgcttttgatggtattgtgcaacagattgactaacgatattatcgtcttggttatctttcttaactcgatattggtcttgctgaagtagtttcctcaaacggatctctcgttgatcactgtttaacgtgtaaagatcaacagatgctattactggatgtttagcgatattgatcatctcaaatagcctaaaagtgtctactcgtttagtgttatcgttatacgaagcggataaaacaagccctgtcgttgtcgtagtaatcaaatcgcttgagtcaatcacgacttgcttttccttatcgagttcgttgatcacgtctgttcgcttgctcaacatctgatcgatttctttaaagacaaaggcatatgatgggaacttccgatcgatttcattttcatctgaaatatattgactgaacacaggaagattaaccatcgagtaaaaccgttgaatacagtttttatggattaaggcgtatgattgcatgtcactccgcgctaagaaatgtagttttgtctttttttcttttattatcgaatcaacgtcaacaacttggattatgatagcgtcattgcgtgcatagtgatcgagtgataaatgagagctactagtaatagatccatgtccgtctactggatacccttcaatccatctaactgcggtggcccaatggctaaacatactcatctcgtctccgtcaatagattgatgaacggatggaagccacaaatattgcttatatggcttaatcttggtagctactgctatggattccttaatgtcagccgttttgtcctttgatcgtaacaaatagcttgtaaagtgatcgccggtgatgagatcttttggtttgctagttgctttaggctcagttgccgatacagcaggcgttccatccgagttgagtatctcctccaaatccatagcatctagctcatcccaatcgtctccacctctgacaaacttgtcttctgccaccaattccttgactgtattgactcccaattctgcgactagtttcttgttcttaatgctgatgtcatcttttgattttacatgcttactagcgtcccctgtaatgggactacgctgggtcccaaaacaacagcttacactaaaagcgcgagtcgaggaagcgagggcttgtctttaaagaggaaggagacttgaggacttaatggcaaatttgcaactgagttaaaattcttaaaggttcctgaaatataaccactaggcgcctatgaggctaaatgcattaaacctatgaatctgatacattaaaccttgggtacactctcagaagtgaggttgaacccagacagattcttcaactgacttgaacacgaggaaccttgttaaaacggagatatctgattggctaaaggcaaccagcttgaatctcctaatgaygatgctgcggcatcatcatatgattttgggtatctcaacccaactgactcttgtccaattatacttgatttcttaactgtagnnnnnnnnnnnnnnnnnnnnnnnnnnnnnnnnnnnnnnnnnnnnnnnnnnnnnnnnnnnnnnnnnnnnnnnnnnnnnnnnnnnnnnnnnnnnnnnnnnnnnnnnnnnnnnnnnnnnnnnnnnnnnnnnnnnnnnnnnnnnnnnnnnnnnnnnnnnnnnnnnnnnnnnnnnnnnnnnnnnnnnnnnnnnnnnnnnnnnnnntttgtccttctcttgccagcatctgattttcttcccgctatgtctaaatttggcatcttcatagtactccttggaagaacacgaaatcttttgattgttttgatttgtagccacaaagagatctcttctgccgggatcaagaccccatatcgcatcgtaatctttcaatttcggttcttgagcaactgctgctttctttttcggttttcgaagcacgatgctaacagctttaccatcagtcacaatttctccagcaaacttgcgattactggtttcaaatttttgatatgaaaaagcttggtccaccattcattggatttatctctccatccattatttttgtcgggaatatcgaggccagcgcgttttagcagtgcccaaagtccgtctgtacacatcttgaaatgtgagcactcaaacccacgcttgtatggaagaaggctgaacaaacgaagctgtttactctcttgggtgtactgctgaactgggtgcttggattcgaagtaacggagaaatctatactgtaaaggcatgagtaaatgaggagcatggttgacatctccgttttcatgtcgaggcatttgcaaacgatatgtccacacgattctatcgttaccattgtacacttgagcaaagatatccttcatcttgttgtacgcttgttctccgttcaatttgtgcttatgtctcaaatatttcttaaatcgacgataaaagttcgtttttactgagttggaagcgttcgttgccatttgctgactgacgttgttatgccatcctgacgtaataaaagtgctatctgcgcgctcaacactcggatcacgccaggaattgtagagcctcactgtttccttgaacacttcatcagcaattgctttcttttttcggtctccaacagtcacggcagacaagcacctgtagaagaacgtctgattgagttcgggaatagcacgactttctgagcatagtcgagcaatgtgaagattggcaagtatataggcttccgaaacagctttgttcatatcaaaaagaacgcccgcccatggtaacgcctttgccttcttcttgcaaaacgagttgagagtagttttcactacagtaatatccgtatcagcgttggcagctgcacgtttgatgacatctgggcgttcgcgcttggttttcttagttttcttgatgattttgacagtcttggtggtcactttgcgttctttggtagtcttcactcgaggtttttttattgtagttattgtcgcgattcttcttcttcttttcgcgggttcgaagtctgaatccgagtcttcatcgctgtcgtcaagacgcttcttctttcgcttgttactcatggtgtgagttggaaaatgaatgcttgggaaatgaaagaaaatgagagttcatgcaatgaatggcggagaatccagtagcagttgagcaatcatttctctcatatgtttttttcaacccaataaaaaagacaaaaaaacctccctctactacagatggctttctttctcttgcatgcaatttagatcgagagtgtttgtaagaacatcctcctacagatcaacggtgtgagtgttggtaaagcactttgaatgcatgttctgagatcgttcgatgtgcgtggcgtgcttgcgttgacaaaagttcggatggtgttgaaacacagttctacagggttcaattgtggagaatacggaggcagatacaacatgttcatgtgtttcttttgagcagtttgggaaatcgtggacagacctacattctgtaaagtagctactgctttatgtgttgcaacattatctaagatgacattgctttcatttggtaaaccactcaaaaaagaatgaaagcggacagagtttacacttcctgaaaacaaacgccaatcaactacaccatcgggtgatgttgctaaaatcaatgaatgtagattccctcgtattcctggctttctcacaatagctctctgtccttttatactccatgcgtactttctactgtgattgagaaagaacgctgcttcatccaacgctgtccactttctctccgtatgtttggatagtgatgacaggaattgttgttgtcgtgtagcacaggcttcttgataagcaatggaagcctttttgtatgtgattctatgttctactagtatgcgttgaactgttctcagagagatattgatgtcatatgtgttttttacgaaagtaactccgttagcaagtgtgtttgtattgtgtttgagaaaaaaactgacaagttgagtgcgttggctatcattcagtttacgtaaatgagatctattgagaggtcgtgctacacattcggtaccactgagccagcgctgaacggttcgtttgcatatatcgagtatcccagctattttagtgagggtaaatccttgaatccgaagacgaacacaaatttgtcgttcaacaactgatttcatggctatatttgtaaaaagaaaaaaaggtgacattctcgttgccggctgttttaaacatgttcaaaattgcattatttggctctataaactacagaccgtttttgattggttgacagacaaggacattttctttcatttggaaaaaaagaacgatgatgatgaaactgaattgcatgctagtgggaaatgcgagagatcctttctctgtcaatgtcattgtcggcacagacagcggctccgttgaagacctgaaggatgccattaaggagaagaagaagaacgatttggagaaaattgatgcggacaatctaatgctgtatctcgccaagagggacggtacatggttgaacagtgatggcgcgaaagctgtgacacgtggagacctttcaacaaacttcgtgaaaatgaaccctttgctgcggcttgatgaagatgaatattacgggaagaattttactcccggcaaaggtgatattcatgtcttggtggaactacccgaatcagctactgtttcgacaatcggcattaagcgatcgtttgattttgcgtttaaagcgttggatatcgagccgaaggagtatgatctcgataactggaaaaaaaacgagaataccattgtcaaaaccccaatgatgtctgaattctttaaaggcgttggtgagtttccagaaaagtattttgtccgccttgaagagatcaaattgtgggaagcgatcaaaactccacttgacgaggagatgctcagtgaaggtgaaatgcagaattcgtttgtcattgtgggttcccctggtgttggtaaatctacgttttcaatgctggtggcgttttatatcgtgaagcattaccagcgtccagtcttcattgtgcggaaactaaagagcaagaacagaccaatcgtgttcatcattcttaagcgggatggtactgcagtaaagggtcgggtaaaaattgaaaatgcatcagacgtacgtgaccaatttcttgctgaaaacggattggaacttcaagatatattcaccttgctggatggattttcagacgcagatgtgaatcgagtggggccgacattagatttaagaccattcaatttcctcgctacgtcatgtcaatatgataaaaaaagtgacgacattcttgtgaaattatttgtgcttcctgcatggagattacaagagctgaaaatgtatgcaactatgacagaatgggcaaacaagcgaattattgctgaagtaaatgatgtggaacaacttgtacatgatcagtacttatacagtggtggcggtttgcgtgaattctgtctcaaacgcaaggatttggaaaacctagttggcagatacatcgcttctgttgggcctcacttggaaaactttttgatgggcacatttggatcgacgcatagtagccaagtagatcgcattcgtcgtcattttgttgaagatcgtgagaatgttaagcaatatgaaacgccattagattggcgattggttgtagattctcagtggatgttgaagcaattgatggaaagagtgacattagaggattatcgagcactttacgcatttgcaaaaaatattggtggtagtctccatggtttgacatacgaattatgtgtacacaagttgatgacacaacgagaaaaaagtagcgtagcactacaaccatttgctgcgaatgaagcagatttcgagaatccatttgtcacgatgacagtacaatcaccaaaagtggtttgttatggtaaaaatctttccgaggcatggaaatatgtgaaagaagtactacctacaaagatgaaagtcggtgaagtcacatattggtacccagagtacaacaatttcccagcgattgatgctattgccttgtgtcaatgcaaacacaaagattcacaagtgaatgaagaagtattggtgtatcttcaaataacgatggcaaaaaccaagccgttaaattcaagccgcatgatagaactgaaagaaatattcagtggttatagtaatcaaatattggtagtactaacaccaagcgcggagatatgcgacacaatgggattgaataaagacacgaattttccaaaggctacgaactgttatcagcaaactagtgatttctccgtatgactagagatagctatgactgttttttgtatcaaaccaaaagacgaattggtaaaaatacaagtataaaacatttacgataatgtccattgaagaaaagctagcaaacttgtgcacaatgattacgatatgtgttcaggtaaaatcttttctttatcagatatgacagggatacaaatttgatgtggtttacactgtggcaattttttgcatatcacgcaaacacattgaattttagaagaacacatggaagaactgaatgcgaagaactgcaagcgctctcgaccactaatatgagagaccaaccataacatcatttgattcgaactcatttctcaatttgccagcatggcgaagatcaagcggaagaagaagaagctccaatccgacgacagtaattttgaagaagacataccagatctccctcractacgaacgatgcaaacaaggtcatcgaccaaacgtgatcgctcgccagatcatcaacaacagcaaaccaagaaaacgaaagtcgagcaactacaaattcaagatactccaagaacatggaaaccacgyatamaagcacgtttraatgctggtttatctcaattacgtatgttgttgtttacaatgatygaagacgaagaaaaagttcaacaagctattgcgtttcttcggtgctatcggatcaagattttacaacttgtaatgcgttctctacgatttccagatcctgatccaagttctcgtgttacgattgatcagtgttttgaagaccttgcaactcaagcgttcaaagaagaagaacctgattactcagctcgatggtcgtgtttgtctacgctgttgrctaatgtatttctcaattattcggatgatcgaaggcctttattggacaagttatcaaagaagaaacaagcacatcttacttccatttttggtaaaaactatattcaagtgttgcgatcgcatgaacttactgattatgaagcattgaagtcatggttttcgttccagacgcatcaaacgccgacgccaatacaacactcattgaccgaattatcagagattacagagttttcaaaaacaaagaagtggaaagttgatgagagcagacatcaagctaagtgtgaagcattcagaaccaaggaagacagaattactccaaagcacaatcttcaggttcaaataaatcaagtacggaaaaaacacaaaattgctgaaaaagaattgagtgaagttggaaaaaagaagattcaagcattgaatgctcaactcagtgtactgaaggcagaagacaaacaattactttgtagaacacgcaaatttcgactttttccgaccaaagaccaagaacgtcttttactcaagtatatggatgcctgtcgttggacatacaatcaagcgatatcacattttgtaatgacaaagaaatccaacgcagaagaattacgtgatttatacgttaccaagaaaaccaagaaaaaaaatctcagttatccgtttggaatacgtcgtgtaccagatgtgatatatgaaactcccaagaattttcgctccaacacagttcgtaaattccaaggagatgtcaagtcagcgcgcagtaattcgaagaatggaaatatcaagcgctttcactttcattacaagaagaagaaagattctccatattttacgttctcggaagatgcaaaagatgcttccattgaatatcttcctcataagtacgagagagacagaaaatccaagagaaacaaaatggtacgcgcgtacctatctatcactaatctcaagcgcatacgtatgaagattgatcctggcgtggaaattcgcaacgaaattgatatcatgtgtcagaatggccgttggtatgttggtatacctcaatttgtggaacctgcttcatttgaaaaccaaggaagatgtatcgcgttggatccaggaataaaggcgtttatgaccggtatggatttacaagggaacgttattcacattggtcgtggtaatcgagatcgtttgaatgagttacgagatcggcgaaacaaggcacaaagcaagatatcgatatttcgtgaaaagaaaggaaaaagcaaatggttggaatataatgcgtacgtgagagccaagcgtacctactactcgacaattgccaagatcaagaattcagtgaaggagatgcattaccagacatgctcgtatctcacaaaaaattacgatacgatcatccttccgatttttcgaacacaaagcatggtgaagaaaagaagaaacaagtttaacgaaggcatgctgagtttgaaccatttcgcgttccgaaaactactcgaggccaagtgtgaagtattggggaaatcgcttgtcgtctgttctgaacgatacacaagcatgacatgtggcaaatgtggttatctccatttcaagcttggttcaaacgatgtcttcaactgtcagcgatgcgagtacaaaacgggtcgtgatgagaacgcagcytttaacatcctcaagtatgttattggcggttctcttaatgtctttgaagttcacgcataaaaaatgaacgagaa

SEQ ID NO: 80 - DNA, 6113 bp, unidentified
  source 1..6113: mol_type = other DNA
cttctcattcactcctgctccgttctcgatcaaataatcgaccacatcaaggtaatcatcatatgttgctacatgtaatggagtctcaccatattcgctcttctcattcattgctgctccgttctcgatcaaatatttgaccacatctagatgacccccatatgctgctagatgtaatggagtcaagtcatactcgcacttcgggttcactgctgctccgttcgtctccacgaggtaccggatctcctctagatctccgactcgagcaagctcatacaccgacgaagcctgtgcactcatggcattccatgtgtgggttgataacctgatttttcacatggccatatcacaatatcatatagaaaatataccgtaatatgattattgttgtccaaatttcacctttctttgcttatctataatagaatgcaataattcaacttgattaaaacatggtctaatcgcttcaatcatcatcatcatcatcatcatcaactgtttctctgtgggcaggagttatttccttcattctcttccatcaggacgagatattcaacaaccatctccaccttcctacataatggtggcagggagacagaaatcaataaagatgatgatcctaatactctggatggctacaatcagagacgaatgacttagcaaaacaaaccaagggtatatatgcgatgttgggtcacttcattgcatttagagcttcgttcattcatgagcaaacaagatgatgctctgaagtggtagcgtcatattcagtctagtaacaaatatgatgatgaaagaaaactcgtgatgcagctaaagtaagtaagtatagtttcattcgttgtcttcgattaaacatgcagtagtagaagagatgaatatccaatattatgcgccatcagcgacgtatacaatcagaatatgaagcaaccaaaataattagttgagtttgccagacacggcaccaatcagcttgctcgtcaagccagatgcactcttgagatagcacacagggtgtccagggttgctgttaatgyaygtgtayrcyttgcatccgctcaacttggcacatgcttcacagcggagcgatgggagatttacatagactatttgaagatcgttgccatagtaatcggtatcagtttcttgtgtcgtacattgtgctggtctcgcgatgcattggtagtaagtaaggttccatggttgacagtattggtcagaaggacaccacgtgatgccagcatcagagctacagctaccgtatgcaggcgtatcgcacgttgttgcaacagcaacggatgcgaatagagcgaggaggatcgtggattggaayattcttgtgatcttgaggaggttgtgtgcaaatgaaagtaaattgcaaagtgattctttgcgtgtccctgttccaaatacgcttagatgtgataactagtttggatgtataaggaagatgagcagaaggctagactgagtcgatttgcagtagttgtgactgagtttgtcatgtctgcttcatcccattagcaacatttctaaacaaagtgtgcattcggtcatgtgaatagcaaaaacgatgtggattggcatcatatgcattttcagagaccaaattttacagcgatagcagttgacgactagtgatgactaaataagaaaatagaggatattgagatgttgaagctagtggatgttcttgaaatatgtcaatgggagacaaattcgactacttgtgaaaagcaaaaggtgatggatgaatattgatgtcgatgatcaacgataatgtcgcgcatgagcagatgatatctattgatgcagtaacaatgtctcaatgatcatttatccattggtacccaagcgctggtggcaggtgctatgacaggtttgaaacggatctcttcatggacagaaagagagacgtctcttttttttcttttacgtgaaatttttgggaaatctttgatgcaatgctcgtatttctctcatgctatgagtgtttgataaggcactgatctttgagagtaagtaaagtcttttgagcaaagtgatcttaaagatattttaccaggatgatggtttctctcacactctgtgactgcacttcctacaagacatgaaccacttgtccaatgctgatcagcgatacaagaaaagaaatgatagtctaaagctcctgttcaagatcacggtggatactgccaaacgcagcgtactatctgatatacaatgtcgtcaagttgccattgtgatgatttatgagtttatccttgaccaatacgcaattaaggtaatgtacaaagtgacagatttgagaggattggtgatttacaaagcaaatagttcaaagataagaataaacgacgatttgtaccctcaagctattcactcttgaaacatcggcatttcctagatcataactgtgagaatggcaaagtcaaatgatcttcactgacgtacagtcattctcgtacacatttacgatattgatatctctgtcttaggagtatcagagatttatctctcatatcttggctaggaatgctttgcaaatgccatattggggtgtgagaacttgtaatctctttgactgacgttaacagtgaagttgacatacatcccgtcattttcaagtcacatgatagtagtgttgtcaacaaagtcttttgggtctcttacgaagtacctatatctgtctacagtcatacttctcgatattgctatgatgtgtatcgttcatttcgcagaaagccaaccgcaggaacgcagtgcgtttgttaatgatgagatcatcttgggaaagaaaaattggtactccttgatattcctgctcgaacattgttccattggcaacgtaagtggatgacttgctgtgattgtaaaaatggtgatcggaactcaaatcgaaataaatgatccaaatgatcgaagacaatgtgttgtactaggctattcaaggacacccatctatagtatgtttcatattgtacttggtatatcgaggttatgctgtatagaatctcgtgctagtgacgggcgacggcaaccttggatctaatagcaactcgttcaaggagatcatcaagtatttacagcagaactggtgcgtagaaattcatgcgtggctgcactcgataaacgagggttacatcaaatttyaagagcagtatccagatcacgtagttgttcgtccgttggacgatgctttacaaggactggtctacttaaggtcactgatcggtgctgcaaattcggtgaataacgcgactgttgctccagttgtgcaagcaatgcctgatgtagacatggcaatgttgacgcagaacattcgtgagatgcaacaagcgttacaggcagacgacgtggaacgattaagactgctggaacaaaatgcgtgaattgtacatcagattcaaacacaggaatcccaagccgaagcggaacatgctctgcatcatgcgactttaaacgctcgtctagaagctttaacttctcaagcgacggcactcacgtattcactgacactggagctctttgagaatccaatgaccgtgagctgctgtggaaagacattttcggggctgacattggaatgctcgagacaagttagtaataattgcccgatgtgccgccgcggaaatttcacaatcactcctaatcgcgacatcatgtatcttgtggaacattatattttggaacgaacggcactgaaaagtaacttggctgccgtgaacaacagctcgcaatctcaagaagaagacgattggggagagattcattgaatgcaaaactagtttcttacgtgttgatgttgctatggcagaattgttgcaaactggtttcatcaataatcgtgctcaactaatattgggaacgttttggattaggtatttgatgattaatccatttgatgctgaatatggatcacaaatatggtatagtaaatcactgatttgattgctctcccagtcaaaataaatttaatcatcaatgaatcattggggacatagatctgagtggaagacgatttacgttaaagagaactcatccatttaccggttgatcaatgcgaattgacaacaatacaatttaagagattcaatcctcagtatgcttacattaaaaatggcaacgagaatgtcacctttttttctttgtaagaatatagctatgaaatcacttgttgaacgacaaatttgttttcatcttcggacccaaggattcactctcatcaagatagctgagattcttgatataagcaaacggactgttcaacgttggctcagtggtgctgattttgcagcacaacctctcaatcgacctcacctgcgaaaattggatgacaaccaacgcactcaactcgcccatttttttcttgatcacaatacaagcacgcttgctgatggagttgcttacataaaacgtacatatgacattgagatctctctacgaacagttcaacgcatcctagtagaacatagaatcacgtacaaaaaggcttccattgcttatcaagaagcctgtgctacacgacaacgtcatttcctagcatcattgtccaaacatacagacagaaagtggatagcgttagatgaagctgctttctttttcaatcatagtagaaagtatgcatggagtataaaaggtcagagagctattgtgagaaagcctggaagaagaggaaatctacattcgttgattttagcaacatcacctgatggtgtggttgattggcatttattttcaggaagtgtgaactcaacccgctttcattcttttttgagtgggttaccaaatgaaagcaatgttattttagataatgttccaacgcataaagcagtagctagtttacaaaatgtaggtttttctacaatttctcaaactgctcaagagaaacacatgaatatgctgtacctacctccctattmtccccagttgaaccctgtagagctatgtttcaacaccattcggacgtttgtcaatgcaaaggcaccgcgtacgttgagcgatctgagaacatgcattcagagtgcgttaccatcactcacgccattgatttgcaggaggatgttcttacaaacactctcgatctaatgaaacgcaagcaaacaaagaaggatatctgtagtagagggaggttttttcgtcttttttattagtttgaaaaaaaacatatgaaagaaatggatgctcaaccaccaatctagggaggaatcactcgcttcgttcttttttccaagctttcattttccaactcacctaatgagtggcaaacgcaaaaagaagcgccagctggacgacagcgacagtgatttcgaagaagttgtaccagatttcacacgattgaaaagcacgaaaaccaaagaacccaagaagaagcgtgaacgtccggatgtgatcgaacgtaaagctcgtaacgctaagactcaagaaaccactgtaaaaacaacgctcaactccttttgtacagaggaagcaaaacagttaccctggactgaagttttacaagatatgaacaaggcggttcttgaatcgtatgtactcgccaacctccacattgttcgactctgccaagaaagacttccactagcaaaaatcaatcaatcgttttttagtaaatgtttttctgctgtgaccattggggaaaggaagcgatcggtaatcaaggacaaagactttcttcaatctgtgaagttgtataacgagtggcgaactaaagatattcaacgagcaaataatggacacatttgtcacggttggcaacaatacgcttgtcgacaaatggcaacaaatgcttcgactgcaatcagaacgaacttttaccgaagattcaagcgatacttgagacatcgctataagttaagcggagaacaagtatacgatacgctgaacgctatccttgcacccatatatcgaggagatattccaatcgttctcaaatatcgtgcacgattggcccgaaatgaaaaaggaaaagtcgaccaaactccccacttgcttgttccgctacaatatgaatttttttcaatattttgaaaaacatcatctagtcgaaaaatatactccagaaaccaagcagcttcgtctcttcagtcttctacctttcaagaaaggctttg

SEQ ID NO: 81 - DNA, 21983 bp, unidentified
  misc_feature 1..21983: note = Fanzor polypeptide
  source 1..21983: mol_type = other DNA
tgttgttgttgctgctgctgcgggtacgccatgtttggaggaggtgttccggagtggttgatcatgttgccgttgttgaagtttggtgatgcgttggaaggggatgaggaattaccattgttggatgtgttgggattgaaggaggggcttgaagaagacataccgcgtgcggatgtcaaggcgttcttctcgctcttgctgctgttgctactgctttcttcatcacttgagcttccaccgctgcttccactgctagatcccgacgacgagccgaactcgcgaatggtaggtccggtaaacgatgacattggcattccatgagatgccgggttgttttgttgttgttgttgctgctgctgctgcggttgtgaggatgacaggttctgcaaaagctgttgcaattggtttttctggttcgtgagggactgacggtttgatgatttttgattcgagtcttgaaatgtgctgggtattgatgacgatgaggagaaggttgacttattttccggtttgtgttgtgtcattccgttactactctgttgttgagattgtaattgtggcgaaaggtttggctgctgttgctgttgttgctgctgaagctgttggggctgttgctgaagttgttgtggctgttgctgttgcattcccatagggtatgcaccgtagtaaatataaggttgtggtgtgtttccctgcatcattgtgccttggggattacctggggctcccatgtagacaccataggcgggaaagaagccaccataattcatgggctgctgctgtggttgctgcatcatctgttgctgctggccctgttggttctggtccatttgttgctgggtttggaattgcggttgctgttgtggttgctgcgagaagttctgattcatcatgttttggttggagacgtgtgcagtctgttgttggtaatatacctgctgttgttcctgggagctggactgttgcccttcttcgcgctggcggcgctgttcttcttggagtcgctgaagttgcttttgctgctcttctctttgctgctgctgctgctgttgttgctgctgctgaagttcctgcaattgtttaaaatgtcgaagacttaagctctggtctggatgtccttcctgtgagttcctattctgcattctgcgcttattggcattcaatgtgatttgctaaaatgatttgtcgtttctcaaatcgtcatccgagacgactgaagaccacaatgtacaaaaataaacgccaatctgcgaccttttgcttgcttactcgcttgttttcgccaggaggtcctcgctagacctcaacaatgtacacacaaagggggaagaaggaataaaaaataagaaaggaaaagaaaagagagaggcacacctaaataagtcaaaagctcaagttttccggcttgagctcttctcaactagtgccgcggcctgctcagctcaggctcgtcaatcgacccgatatgcccctttgcgacctactcagtcagatgccaaagtgctgccaccgacaggtacagacagacagatagaagatatctctaatgtctatatatcgtacgtatgtatgtatgtatgtatgtatgtatgtatgtatgtatgtatgtatgtatgtattatatacgctctatacgagcgagcgagtgctgcttaactctgccactactatcaccggggctcgcgcccgtggcggaggggtgagcaagctggtgtggccgccctcgccctccgcagcggtgctgcgcctagcgagcgaggctgtcttccgtcttggtcgcactcctcctccaccagcaggtgtggcggggggtgatgcgccttgatgttgagtctggaggcagagaaagcaagcggccaaagcacaagcaagctgaaggagaccacggctcgggagtcgctgcgctgccgctgccgcttcctgctgctcgaaggggtcttcgccgctgcgctgtgttgcgctgcgctgctgcctggccgccggagtgagtgccgcggcgctgcttcgaagcagtagtcgctggcggtgccttcttcgattgatcgattgatcgatcgatcgatcaattaattgtttgtttgtttgtttgtttgtttctgtttctttattgttttgttttgtgctgctgttgtgttattgtttccttttaactcttttttttttttttttctttctattcttttttccctcaattatttactatatgttctatatttaaaaaagagattagaataaattaaaaaaagaaaaacaaaataaaacaacttatgaacgaaaggaagctttcaattctatctgagtgtaagtttctgagctgattctttgcttctttcgtattgttgatccctgcagagcctgcttgcagctactgcgtacaaggagacaggcagacagatagatagagatagatgaatctctccggagaatctccaggagcacctctcagagcgagaaagggttttggcggcgccccttcttcgctgtctggtctgccgcgatgtttgttgtcttcttctgtctatgttgttgttgggaaaatgagtgtggacagcgaagaatatgaaagcaaaccaaacaaaaagccaaccaaccaaataaacaaataaacaaacagacagacaatcactatctcacagagggagagcgaagaagaaaaggagaaagaaaaggagaaagaaagaggaaatagaggactctaaaaggaaagacgaagaaatggagtggaaagagaaggaaaacaggccccaagtccaagacgagggctgattcgtcgcgcgagtgagcgaatgaatacctgttcctgctctttcccgctcttctcttcgcgaccctacgcgccgctgcctcccgttgcctcctgctgcctcctggcgccgctgcgatgggcaatttcggtttgctgattgtttttgcttggcaagttcgccagttagttagttagttagttagtttattagttacagttgcgttcttctcttctcttcccttctctttctttcttttcagatcgagaaagaagaaagaaacgagaaagggcaaaacaaaagatttttcagggacgcgagcgatgaaaataaaagagagaaaagcctgcgatgggcgccttcatgcgtcctttctccctccgaagcctccagctccgctctcttggcttggcttggcttggcttggcttggcttggcttggcttggcttggcttggcctgggccttgccctctctgcgtgcgaggccgaagtgtttgcgaagactcgctccttctgagctttctctctctctctctctctctctctctctttctctctattttttttttttttctttttttgatccgctgatcagcgtgacgataggcgaatgaattcaagctcaagaaagaaagaagccaaagggcgcagtcaactattgctcgcttggtggatgatcgcttgggagcctaagaagtagctaggtataaattggccgaaaatagaattcatagatcgattggctgattgattgattgattgattgattgatcgatgagaccgattgatggaacggaagaaagctttgcttcgatgaacaaatcttgggcaatcgaagcattgcttgatatatacgcgacgatgagaggatcactgcggcttccagtttcttttgcggtgaagaaactcgcttgcgaaggcgctgagagctctgtttagcgctgtcgtgaggcaccttttggtttgctgctgttgatacgctgcggcgaccaaaaggacttttgactctcctcacaacaagtgccccgcaaagcctaatcgcttcaccgcagtcctctaccgcagctcgattcatctccccgcatcgagcgaggtgcgttgccaagtatcttcagtcacgaaaatctctgcggggcatttttgggattcgcccctcacaacaagagtgtgcaggtattaaaagtactggagagtctctccgggagagagtttgattcgtgatgtgaggggcagccaggcctacgctgtgaacccgggttaaagaaattatggccgggcgtgtgctgtaagaagtcgttcaattttctatcgggggaagcactgttgtgggaatctctctccacacaaataacctcaattgtggaaagcacatccaagattttcaacgcgcacctccgacttgataggaccatcatcggcgagcgtttttcgccgggactcagaggcttccgagggctccgggccgccctcggcgtgttactatattatgcctctctttgattcttctccagggcatgtgccttcctcccgtcttcacgaaggtttcctggactcgcttggcgctgtaatgcggactccaacgcaatattttgttgttgagattcatcatcgcggtcaccaatttggcaaagcctctctttctttcaaagttctttccttctctctcctttttcttttccttttctcttcttcttttctccttctcaaactgccatccatacatagcgtgctaggtaagtaaatggtactgtgggtacctaattgaaacgatgatgctaagtacggctatggcagtcgaacagaggtatgtatgtatgtctgtctgtatgtatgtataccgcgacatcacaattgaccatagggtaaacagagaataagaaacgttcttcccaaagttttcaacagactttgatggaatactcgatgcgcctgaaatacgcgtagcccaaagtctgctcccgacttcacactctctgtatgctcgcgtagcttgggcgcccttgagcgcccctggcttcccgagctccagctaccccaagcttgagtacataagctcttgatttccctcttccgaggcagattctggcattctttctttctttcttcctttctttctgtctgtttattataattattattgattaaaacaacttacaatgtaatgaaagtaattattattttattttgcagagcaaacattttgtgacattctacattatttctttctttttcgataattaaatggaacccttctctggccagacttgtctacagcccaaagcctgcgtaggaggttttcgcttgctcgtttagcacgccctagagccaaagctcttcgcttgcgtacaaatgccctcagccagatcagggactaacagctccacgccgtgtcccctacgtaaatttgcttcgagaagcaccggctgcttcactggcccaacccaaggtgagagcgagcattgctggcaagcgctaacttagatactgcatcgccgctggctgcgaacttcgaagaactcgaagaactcgctcccgacgaccatttggtgttgttttttcaatcgagctagtagagctttgcttcaagctgggtgccgttcgtggctggccccagagccttcgttgaagacctcagactgtcggctctgccgtctatgagccggagttcttcaattagaattggcctcaaagcgaccatccctcgtgcgcggagcacacgatatcatgagatggcaggcaaagagcgagggcgactgagaactagcgtcaactagaactcgctctcgcccgcaatctctctccaccgctacagcgggtgtggcaatggcggagaccgagcgccataggtagcttacacgaggtagatgaggctcgctcatgcagcactcaaagccgaggtggagcagaagaagctgtcgctggtggtatactgccctacacaaagagacgccaaagggtgccgttgtacggtcattcgctcacgcgcgagctcgaccctcgtggggttctgcagaaaaggcaagcagagcctggagaagaacccgggttgaagcatcatccatcgtcttcaaatcgagacggccgccggtgcctgcctcgtgaaggtctagacgcacgaagcggcagctaactagcccacggagtttggaggtccgcgcagcctcgtcggcgccagcagcgagtagcaggtctcggtgctcagtgtgatgctgctgtcttgaggcgatttcgatacctgggtaggcctccgaggcgaaacgaaagagctcaggaaccgttagtgggtgctagctgattatagcactctaaagataagtttatatatatatatttgtgtatcatatgatattacttaaaaataaaataaatgaagtatttttggtccgttgcagttgagctgtgatgcataattgatgaacacacggagagatcgatcgatttgtgtaccaaaacagagttcgagttcgtcaatgaacggcggtgagtgagtctggggagagtcaaagcgtcggcgaagaatcaatcaaccaccgcagcaccgtgccaggctgcagctgctaagtctcttcgtcgcgggaactcccgctctgactgagcacagttcgtggagcacgaagaggagggaggcaaatcggaatacttgtatcagtaaagagcataattttccgattgctctgaaggaaggactactgctattacaccatacaacaggagagggatttgctgtagtgaggggccgctccctcacaaagaacatcccactgctactattatatattcgctcgatttgtctattgaacgtagttcgtttgggagggaggtggtatataaatacaccgcgtttccactcaaaaacaggcctcctgagtgggcttgagggccgtttgtctacgcctcgctcggccttggctcgaatagctgactataaaccatcctcggccgttggttgacgagtggttgattggttggtttgatgattgatgtcaaaaggctgcatctgttctatgtactctctatggaatgtctctctctaccgactattttataaaacaactataattataattgttacttttttccctttcttttttaaattgagttaaaatatttcataaaagaactttataaagcaagtactacaaaagatttgcttggctagaaattgaacaaattcctcgctggagacatttcagtcagggctactctagaggcgaaatggaggggttgaagaagatggaggtcatttggtaaggcaatctagtcacctacaagagtacaaaatttggcttttccgtctactgtcaatggcggcttgcacgcagtttcccagaagcggcgagttttatttggtctttaccatttgtattactcctgcaaacttgaagtaagccgcgatcggtattgcttcttctctgtaaatggatctattctatatacgctctcctcgatctcaaaacctgccgccgctccgtggttgggctggctagtgaggtacttattcgttatcaatgaaagagagcggggtgccggagatgaaaggaaatcgttttccttttctttatttgtttctgccaatctaaatctctcggggaggtcattcattcattcattccttcattcatcgccacagctccgacggttgcgcgtggaggacggcgacttgggcgtcgctcacctcgaggaaattataggctacgctaacccagcgccgtggattccctccccacccccaatccacaggcaggtcgttttctcaggtcttcgcgagcaccgcaaaattttgtctttcttgcttcaacttcgagtttcggggtccttttcatttgatcattattttttttcacgcgaataaaagtttgaaaaggagggttttataaactaagaaagaaagaaagaaagaaagaaaggaaagagaaaaaaataaattaaaaaaatcatcacccctcaaaaggaaagaccagtgctttgctgcaggactggaatcccttccatctcctctgctcagctccaagtgtcatttcatttttttcttcactgtggtcctttcgtgaagctcccgcagcgttcctctcaaaattcgcctcccccctctatgctgcactgtaaaactactcctttatttcgctggttgtttcaagtttctttactgagctccactgcctctgtataagtgcttctcatgctgagtgaaatcagcgtagcaatatctccctcggctgggaagtgctttttcgctgtgtggagggaggcgcgcaaggtttgccagcaagcgtgcttgctcaacaaagaggtgacagaaaactcgtttgttgttgtttgtgttgttctgttctgttcttcttattcttgcttctttctctctcagagcagcctcgaggcggagaagccttgaggaggcaatttgaaggggaaggcgccagagggcacgaggagggcaagtcgggcctcctccactgtcacattcatattcccgaaattcgaccccttacaagttaaagaaagattagctggtagatagatcaagagactaggtggttgataagctttttattgtggcgaaggctgctctcgtctttctttatctatcgctgtcactttgatttctgcattatctatcattatcatgtctctacgtacttgaaagtttatagtattgtgttatgttgctattttatgattattaaattactattattattacgcatatataatttgatttaattggatttatttaattacatagatataggccacaatagaattaaaatacaacaaaggactccgaagactgagcgagagaagataaaatacaaaggagagagcgtccagaccgaagtagaatatacaccagatgatggaggatatacacagcgcaagtcagtaggcagctagaggctctatagcaacaaattgctcctcagctccctccgaccgaccaaactcgatttcccattatgctccagggttgccaggaaatctaaatttccacggcaagacccgataaaaccaaccaaccaaccaaccaacaaacaaacaaaccaaacaaaaacaaaacaaaagacaggtagctaaaatggatatctgagtagaagaagcttcgagtctatcactaccgatggcaatccgactaccaagagccatgaaacgaagacgccaaagagaaaggaacgaaaagaaacgaaacaaaaagaaaagaaaagaaaagaaaaaagcagcgcattcgggcacacacactgcgcttttatttatacgaaactttcgctcgctcaaagctcgtcttgaacaagaacgaagacgattccagcgccatcctccgctggcctccatctagctccgccaaacccgccccgtcagcaaacaggcagctgcgtttcgctcccctcccccactcccgagcacggtggaagccaggcagtaccgaggcccctgccaacgccgaagcgctctggcctggcaaagccgctgctgctagtactgcttctgctatagccgcccccaaagtcagtgaaacgaagccgctcgctccagcttcgacgacgacaccgacaccgacaccgacagcgacaacggcaacgacgacagcgacaacgacgaagacaatggcggcgaggaggacgagaagagcaagaagaaagaacccacgcgtgagtttatttgcgcagggagaccatcttcgaaactgagagggcgaaagggcctttttgccttttcccctcataggtgagtgagcgagtgagtaatagagacacataaacagagcagagcagcagagagggagagggagttggcgatgcacttccttccacaagaacaccgcagctgcggggacgtgtcaaggcagagaggacgaggctctctagcgtttgattcgggcctgttctagccagaagcgagtaagcaagcaggcaagcaagcaagcgagcaggcatgcaagcgaggaagggagggagggagccagagagcgaggaggaagcagcggcaaggcgggaggggggcggaggagaggactgcccgtccctccctctcaatgcagatggcaagccaagaagcccgtgagggaagaaaggctttgtctcttacagcacttgaggtaatctatgtgtttctacaatttatctataagtccgccataggtcgaaatatgcagtatgacaaaaaccgttaaaatttcgataacttatatttcgatgtgcttgtttcatattaatcatatattatacttagttagatctttaataagaagtggaggttaggtaagaaaatggggaggccaaggaaccgccaagctccaaacactgcaagtggagcaaagctcgaatacaaaccagcaaagttctttcaccggaagtttggggtctcagcaagcgcccttcggggctgggccgatggcggacgcgtgcgcttcgcgcgcttccccggaggcaagcgcgtctatgccagtgacgatgttgagcgcatctttgattgcggttccatcggccgcgagcaacgcagctctggatgtaccgttatctacgccagagtgtcctcggccaagcaaaaggaggacctcgaacgccaggttggcgatctccagcgcgcctacccagatgcttccgccgtctacaaagacatcggtagtggggtcaatttcaaacgccaaggcctgtgctccctactggacgcctgtgaccgcggcggaatcggccaagttgtggtcatgcaccgcgaccgacttgcgcgaatcgcagtcgacctcctggaacaccttttcgaaagaaaaaatgtcaaactcgtggtacacggccaagatgcacataccggagactcagacaccttcaccaaagaccttctcggaattatcaccgtctttgtggcatcgcatcacggaaaacgagcagcgcaaaatagacggcgacgacgcagcgaggaagaagcgagcccgcatgaaggcgcgcaagacctccaagaaagaatatgaccttgtccgtgccagaaaggtcagggtataccctactaaagatcagcgtacacagttgcttaaatggtttggtgtcactagaagagcctacaatactggcgttgcgtttcatcgagatgtggcgaagggcgagaaagaagccatcaaattgcatcaagaagcgtgcatcaaaaaggattccaagacgaagcaggttttagtagatgaagatgggaatccccaaacgtatggtaccctctatggagaaaagaaagccgttcgatctaaagaaaggaatggtgctcctgaatgggttctcgaggtcccacaggctatccgtgattccgggattctggatttcttcaaggctattaacttgggacgagccaaaaacgaagaactcgctgtacaaaagaaagttcatgagcaatctttttataagtttcggaccaagcgtgatgaatcacagattttcgaagtgaatgcacgtacctggaatttgaagaaatcaaagacctccgactttcttaaaaaattccgaacacgtaaagaaaagttccccgaccagatttcgaacgccatgcgtgtgcaaatgaatcgccttgggcatgtctacttctgcttcttacgagaagaaaaaaagcgtccaatggaccaggcacccaaggcgcaccatggtgtcattgctctagacccgggtgttcgctcgtttcagacgatgtatgacgccgatggccgcgccattgaatggggcacagggaaagattttagaaccatattctatctctgtcgccgcgttgataagatccaaagcagcattgataaaaagaaaactgcatccagtgataaagacaatttcaacacccccttgaagcgcgccttctatcgcgcccaactcaagatcaagaacaagatcactgagattcaccgcaagctcgcgctttggctttgtgaaaactatcgtgttgttctcttgcccaaattcgaaacctctaagatgagcaggaggatggagcgacggatctccaagaagtctgttcgaatgatgtgtcgttggtcccattttgggttccgccaggctctcattcataaggctgagatgttcccgtggtgcaagcttgttctttgccaagaaagttacacttccaaaacatgcaatgagtgtggtaccctccaccataacctcggggcatccaagattttccaatgccctaatcccaagtgcaaccatgtagcagaccgtgatgtccatgccgccagaggcatccttttacgctacctatccaaggacatgatttaaaaaaaatcatttcattgagtcgcgggttagtctaactagctcgtgatggagtcttagctccttctatgaaatgcaagttttgcaaattttgtagtttaaaatctaggagataagttggtttgattcaaggttaaatgaattatttaaaatttggaaaatgaaatgaaaacagagtgataataggggaaaatacagaggtaacagtaacagtgctgtaggtaagaacaccttggttaggaagtaacttgatgaaaagaaggctcagtctctctcggaacgatcgctcaaccggcgatttgatgtgaatagagcatcgattacaagaactcccgcttcagcttggcctcgagcctagccatcgcagggagtgctaagcgcggcggccgtgcctcttctcttctctaccgaaggcagatatagacaactgctctctctctctctctctctctcattctctgctgctgctttgaggtccatcaaacatgcctttcgaggtgcctgcttcgcgagaagaactcaggtctttcttggcataactttgtaactcgcatactttcattgaactcgcagaaactacagctcttcgaccattgtcaggtgtatagatatatatatatcatctgatccttgattctcccggcctttcgttacttcgagcactcgtttccatcattatttatctattatctatcatttattataaatgcctcgtttacacataacattttttatttttttaaattttaaacagtacaattaggtatttctttcaaattgttaaaattacttcacttatttaaataaataaataaataaataaataaataaataaataaatgaatgaataaatagatagatagatagatagatagatagataacatatagaaaggtgcttcgatagccccttttttgccggcgcgggcgcacgatcccgcaaaaccaccacagggacgcgccaactagtaacagcttctcgacctcactgcgcgcttctaggcaagtaagagaccttttggcgctcgcaaaacaacagcggctgtaactacaaggaaaaaaagaaagtaaaaaaagagcagaaaaaactattttccctgcgagggccttcttcatattaacaagcgtaagcagcggattcgcctcgtctcgcttttacaaccgatagggcacatcagtattactgttgccacacgacgaactttgtctttagcgcgctgcattcgcgtaagaagaagctcgataagctacgctgctgaggagagagatcgagggcagtaggccttgccttgcagggcagtttcgaagcctgctcgaatttcctttttctggcgcatttgcattctcttgtttaatttcctgatcgatggtggtttttatttcaggctattcctcgaaattcatccatgcgtatctaccgaatatctaagaacagcccccctcgcgactttggagttgatcaacgtttttacctttgcagcgctgctttatctgtttgatttattatcataaactaaagcagagttaacgatacatatgcatgcatgtgatgtacgcgctctgatgacatacatttttctttggccatttgggtgaacggacgaacgaacgaacgaacggattgtctttcttgcttgccctctggaggcgtaaatggtgctaggcagacggctattcgctgctccctcctccaaaccagtcccgtactcaagtcactgcgtcgggacatacaagtaccggcggtttgtgtttctgtttccccctcgcacggttagcagatggagtacgtacctgcggacctccatgcgcaggcaaaagcgcattcgccgcaaacaacgaatcatcgtatgaaaccctcgaattgtccatgcttctcctcctttttctccagtatacgaataaatatatgttatgttatatacataatatgtgtacgagtgaagcgaaagatttaaaaataaataaattaaatgaattatatatatatatatatatatatatatattatactaaaataaagcgcagaatctctttattagttagtccattagcccaagcaacctgtttttttgtttttgtttttgtttttttactgttatagataggtcaatgagccagtcaaactgagagctggagtggtacacaggcccatccatgccgctgaccgcccctcttgagcgcctgactgccggctgatggacggtgaccagccagccaccgagggcggctgcagagaggcgcaggaaggaggcgaggggaggaggagaagaagagtctccctccgtgcgttcgattggctgtgtggagcagtggagccgtgcgccgctcagagaggttcccacagtttatcaccgcagtgtggggaggagggcatccccttccaccaatgtgcggtagaaccgctccgtggaatcaaagcgtgcggttttctgccctcccaaggcggcgtggagggcgacaaatcgacagacgctggcagccttcagcttctacctctccgagtgccctcttcctctctttcctctcagaccgagcctcattgagaaagaagagaagaaacccggaacccgaaaggagaagctcaaggaattttgcttgaactttgagaaatcactacctccctcgaagctttctttgctcgccaccccaataatgagcgagtgctgttcaaaaggatggataaagggaaaaccgataggaggtaccttctaccactagtaggctaagtagcttagctatccgtctgtgatctttaattccttgcagacactaaggcgcctgacactacctacctactatctacctactacctacctactgttatatgtctgcctgggtatacgatggttttttcttgagcctagtttcggttttcatttcaatgtttggaattccaactcgtttttttgttgctttttagctctagaaaatggaagagaaggagacgagaagaaaaacaggtttctcgcaattgtcgaagcgttacaatgtctaatggttgcttgaaaagcctcctcgcccgccgctggtagtgctagtacttgaggacaggatataccccgacacgtcctgatgctcctcatcacagcatcgtcgcatcactcatactttccttaacacagcggaaaccaagaatgtcgcccagctaccgtctactagtaggtattgttatgagctacctactttatgtgatatttaggtgtatctatctaccttctagcagtccttccgctaagacgttctagcttgcgcgctaggcagcgttccaattcatttcaaccccttacctcaaaacagacgaacaatcaaagaaacagaagcaaaatacacgagagagaaacgagaaaacccttcctttctccaggatagctggctatataggtaggtaggtacgtaggtaggtaggtaggtaggcaccagcttgcaatctgaagctttgttctttccttttctatctttgattctatttatttagcattgttaatcaaaagagagatatttttgtccctttgattattatttaattataataatttaaataataaaaaaaaaaaaaaaaaaaaaaaaaaaaaaaaccgtgtgttctacaaaaatacagcacgaattgactaaagtagatctctaggcgcttaggagtcagctatgccccgcataggtaggtagcggaaggagccgaagataaaacccgaccgaaaataattcttaattgtgaaactatataaaccctccttgttgaccaggtgtgctggacagggaatcccgagcgatagggcagatttctgtctttcgctggtgctctcttggttaaccagtcagtcagtcagtcagtcagtcgatccgtcagcctgtcaatcaatcaacttgcctgaaacaacaaagaaaaggccaaagcgaacagccttctttctgagggccacactgtcgcagaaaataaacagatctccgcatgttcacatgcggtggcctaggaaaggcgctatacaggcctagcaggcggaggtttttcccctcactatctgggtagactgcacttactgctttggaagaaaataaaactcctccgcacaaaggatcaattgcacttgggcagaaggaatactttcctttctgttgaggttggttctgacagacctgcctgatgatgatgataagtttgcaaactctgctctgctgcgcagtctcagggcgcgaggtcgtggagagagggctgcgaagccaacggagggaccagccagtgagtgcatggatggacgggcagtgaaggagcgaggagatggcacttggtatatttttattcaattatattttaaatgaaaatttatcgatcaaatatcaattgcgtcttcttcttcttctttgatttcgatttcgatttcgatttcgattcgatttcgatgaggttctttcattcattcccgtcctttttaactttaaaaggaaagagggtcttgacgcgcgaggaaggaaatcgcaaaacaggctcgagtactctcactctgctgctgcgacgaccactgctgcgaactgttccctgcttttgaacctactacgagtaatggccgcctctcgctctgaccacttagagcagctcatgaaccagcgcagtattgctacgtacctgctgtcaagaagttttccatcttgttattttgttattttgttaaaatcgttttccaattttaattttaattaatgacaataataatgatagataataacttcgagtttagaaaggaaacatgcaatatcatgcgattccatgcgttgcaacggatggtggcgcacttggccgcgactttgattgcccacggacgcgccgctcgcgacggaccgtggtcgctgcatcgaaccgcatttccaggcgagccagagaaccccacctcctttacaaacggtaatcgatcgtctcaagaaagaccaaaacaaaggaaaagaaagggaaaaagaaagaaacaacaacaacaaaagaaagaaacaacaacaaaagagaaagaaagaaagaaagaaagaaagaaagaaagaaagaaagaaagaaagaaagtgccgtctcaaattcctcgtgctggccggcatttcttcgctctggccggcattgagtcgagcctcgaggccgcgccacagagcaagcaagctccacagacacaaaagatcgatggccgccctcccatcagctccgtgtttcgataggagccgtagcaccctctaagaagatgggacggctggtgcattcattcattctgcgacgcagcagcagcagcagcagcagcagcagcagcagcagcagcagtgaagcacgaaaatggaggaggagatagagaagggtaatatctaaaggtctgcactgccgtgcatatggaggagcgaaaggataattgaaaggataaatggatggatgaattaataattaattaagcagatcgcctttgatgctttcgctcgtgcgttggcggcgcaaacagaaatctacgacctggtagagtacgaggtgaagaccgcgcctccatgtgtagattgacgtattcgctgatgcatttgtgcagttatttggttataaaggtactgcaaataaagtaacgaatgaatgaatgaatgaatgaatcaatgaatgaatgattggcgaatttgtgatgcatttgcgtagtacgtggttattgcagataaataagcgaatgaatcaatgaatcaatgagatgtgggcttatttgttgagtaaaactgcctaataagcactagtttagaagtgagtggttgttggatgggagataaatttcaattgtgatatgtaatcggcaaccgcgccaaagaacttatgagtagaagctgctacggatgcatacgggtatccagctcgatgtttattttgattattatgtcttgtcattaacttatttcttttttcttttcttttttttcttcaactaaattgaactttggaaaatcgatctcgtctcatgttcgctggctcgaagaggtgattaaagcaacctagttgcaggtcgtccttggcttggctcgcgtaagataaaaccaatctcgtgactgacaagcagtggcacaataaccatgcaactgaccgatacgcaaaaaagttctagatgaaatgcacatcgaggaaaccgccagggatgcatgtgggcgaatttacagggaagaaataggagctagctagagctaacgagctacctctagaggtgtacctctagaggatgtagaatcgcatatgcagtagagacaaaattgcaacgtcgcctacaagaaagaagcagttagtagtccccgcgacctatagggtgctgtaacagtgttttcgttttaactgatactgaacagacgcaaagacactcgactctctttggtcgaagttaataagttagaatctttctccaagttgggcaaagcaaaagcaatcacccgttacgcgatgatgagttttctagctggaggtagctagctatgtctactaccgagcgtagtacctgctgtagagcaattggtgattgattgtatgagcttttgttgttttacccaagtccagacaaacttaatgagttacgcaagagtatatagaaacaaactctcagagtaggcaggcctaggcgtctttaggtacacgacagagggctcgctaagagtggaaatcccgaacagtcagtcgttctccaaatttgcgatatcattggggaatttatgacaaatttgatctgataccctgaccggtaagggtgaatagaaactctcagagtaggcaggcctaggcgtctctagctacacgacagatggctcgctgaaagttgaatcgcgaacagtcagtcgctctccaaatttgcgatataattgagaagatttatgaggagtgagctcgatgagatcagtacaaagaaacaaaatgtgaccctttctctcacttaattaaagaacaaaacaaaacaaaacaaaacaaaaatcaagaataatggtcacatctatcgaagggcatcctgaacgcgacgaaatagagcatcagcagctgttgccatctgcgatgcccggcgctgagctgatggagaacctgaaagatgcataagaatctggtgcaaaagtaccaaggttgacgacaatgccgaagtctgtgccccaacctttactgcggattgttggtgctggtgttgttggcttgatattgatgatgagtcagatgtagacgtcccagtcgattccagagacactgccgctggagaacccgatcgtgaagttgttgaattggctccatcttgtggatatcgttgttgtgtagagtgagacctgttgatagcagcagctctaatccatctcgaggtgtcggcagaaattacagctagcaagtgcctgtactgtggaagatcctccagtacctgcaacacagaagccattcgctgccgagcaactgaaaggagtaacaacgcaagagcttcttgatcggatacgcgttcagcaatcgccttacctgcgtcatcttgaccacgtgcataaagcccataggcaagttcaacattcactttatcttcagatacctcaagcgcccttgcgagctcaaaggcatacttaggatcatccaggttagaacgtagaacacgttgtacaaggttgatacgacgcgatatgatttgtgcttcttcactatctcgagaagaacttgcttcctccgaatgatccttctgataggcttgagcaattacttcttcgttaattaatcccctggctgcatcatcagaaagcgagcctaatggagtagaagccgtatttccctgctgaaactcttcctcttgatagattgatctcgcgctaaacaattcaggacttcgcgtaaacaaactttgcaccaaccttacgggagatggaccgtctggagaaccgggacctgaaacacgtagtaaacctttcaaggcttgaaaagccacatactcgcgctggacatagtctggtgcaacacgagcagagatatgatacatttcttcgcgcacgccatcatcaagcggaggaaactccacaaccgtgttgttctttttggagtcttcattctcgctcactatatctgcttgtgtagatttataatcgttttgaggttgacttggcaaaagcccatcccgtttatcagctggaagcatcaagtacagtaaacgcattgcagcttcgcaaaactcttcgtccaatgcaatgttgtgcaaacggggaagaactgccttctctcgaacttggcacgcgataccctgagccaccccgctgttttttattccttctacgatgttgataatccttgagagatcacctgctgcgcacaaatacattgattggtgaaaacgaactaaatcatcacccagctgcaaatgcaaaggaaagcgatccaggattcctgatatatctatttgctccgttaaggccttggcgacaactttcgtgaatggagcttgggaaacatcagccagcatatcaacactcaagtcgctccgacaagtattacaacatatacatagtacatcttctaatcgatcaactgctgtttcgaaaatctcctcatcgggacgcgcacgaagtgctagacgtaccagaacaagtgcgtggcacacccttgtgttagcttgagctttcttcgttatcatcaaaataccccttgtgctattatcagaagaagaagaagtatcaacttctgtctcgccacaatcagcattggtatcacccgcgctgtcgttgtcagccttatctacatcatccaaagtttcatcgccagtgcttttttcagaaacctggtcagaaagaaaatggttcagtgcgcggacaagcacacttgatgtattactgagagcatccaaaacacgcaataagggaagtttaaaccaccagtcgatgaagagctccaaaaatctaagcctcactccacctaatgctgtcatagtctctagtacaactgaatattgaaatacatcaatgaggagaggctcgaataaccacgcagcgaacaatgctgaagagggaccatcattcagatgaacccatgcctccgatacacttggttgtacatttgatggatcggtccaacagagatcatccatgtcccgcatcacgagcgcttgaaaatttagaagaaaatcatgctcactgattgcgtctactacttgctcgagattctcagattggaaaaacggtaacagagaatcagctgtatatggaataaccgaagtatcaatgtctacgtcgtcaattgtactgccaactctcgataagacattgttgatcttccgtttactagataatgatttgtacaatctaacaagtttctctcttgccacaagtagctttgcaaggcgctcgcaagctgcatcttgattcatgtcgctgattaccttttgggcatgcttgataagtcgcaaatgtactacagctggtgggagagagtcaccagtcatatccgtatccatagccagtaataatcgccacactacatctgcttgggaggtttccaggaatacggtttcggcttgcttcaaacgaccattcacgagagcctgtctgaattgatgagtcataaacccagcttgctgattctttcccttactcaagtgtgtcataagacgttccagattcttccgtgaagctatgatttcttgcacatcaagaaggtcatcctctgctccatcgcggacgagaaagcaccgagcttcacctgtcaccccattcacttgagttacgagctgcgcgccacctaccctgcactctggcaaacgaagacttgctacaagcacacaccccggaacccgccaaatctgtactgtttcacgccacggtgcaagaatcacaagatattgtccatgtggtatatccgtatcttgatcaagtgattctctctccatgttttgatcaatactaccagcattcacatctctatgtttgtttttgccatcgctgccatcatcggcatcatcatcatctgcagcagctgtagcagaacttttccattgttcacttcttgttaaccatcccgtctgggcat

SEQ ID NO: 82 - DNA, 21986 bp, unidentified
  misc_feature 1..21986: note = Fanzor polypeptide
  source 1..21986: mol_type = other DNA
tagctcaatacgatgttggttgctttcctagctagataaagcttgctatcaaatgggcctagcctaatattctataacaggactctatgaggagggttagttcaattgaggcgtctcgagaaaattttcgtttcgctccagtcaaatcaagtggttgaatagaagatgatagaaaactagtctactaagcctcgacatcttgtcctaaggttacgaagacatattgaaggttttgttcaaatagggaatgacagaaacaaaatcctaatcttctggaaaaagatttggtataagcagctttaaatcccaaaatcccaaataaattttacatatgtactcacacagcttatttatttattcactattttatgactcaattgcctctgagaaatttctacttaagctgaatgacaacaagcatgacacccttagtacatttattaattaatttaaagtaataagtaaaagtggtgttttaattaatggtgtgcttcgtttttcattgttctcttactgatcatatttgactggctgactgactacttgtagaacaaattaccccatggacgaacaaagtaagctgtaagtcttggcgatcttctgtgaacggcttcttcctttcaaatcagagacaatgtgaaccactactaagctacggtccaagttaggttctcgtggcaagcaagtgatacggtagactgaaaaatcgtgctcttattcaagggctcttcatgttcatgggagcaaagcaatgtcatgcgccgtattataattgacttctatcaacccttttacttggataaaacctcaagtcaaggtatccatccatactgtgctttcccccatttatttaatacaaagatataattaatcaagacaaaagtacaatactagtggtgagtgaggttgtagcgcatctcatgagtcgtggctttgtctgatcactttgtttgaaattagcctgttacaaatcctttccaaattatgacgagaaaggggaaattaccaataaagagactggagatggcaagttgaaagtaaatcagctccgtgatggataatgtagaaactacttaacctgagtcataaaaaattatgctttgagtgtgtccttactcaactgttttttgtgtttgtttttttaaatataaataaatatgagagtagcatctgactagtaagaagagtgaccaggattattagagacccaattctccgtagcctactgcgcactaacttgtattatattagcacttacttttactggattggatattcccaatttgttcctgaaatataagtaatcgattttttttttcgccctgatagcaacaacggtctctcgaagtaatactcgaaaatctcccttcaacgcaatcactggaatcggtatctcgatatctcttgcgaaaaggaaggcatcatttcccaacacgaatttcgctaacttctggctcaacgagcactctttcctgttacaatctaaactctttcttcacaataaaccgagcaatgcacgggccgtaacctacgtgtcaactgccagttaaagtgtgacctggacttcaggcgcgccgctactgagtaaacaggatatgcgtggacttctggctcaccttcaggtcagtttgatttactaacagcccgagccatactggctatcctgatcaactcgccaaagctactatggtgccaccgtatatgctcgttttgggacttacttttctcgagtccttcccaggagttgcaaagagaagcacgcaatactaactttaccgtggctacaggaatggtaggtagtaccaggtgattcaactattcatcacgggttggagaacaaaggaccttacccacttcatgatatcactaagcagaagattgcaacttcgtctacttcccgcaagtcaaaagctgcgcaccgacacgggacgcaatcgtcttagtcttagctagtacggcccatgatcagagttgtcgacattagataaaaagcttcgctccgtcctcagttgaatgggtcctcgcaaagaagtacaatcaactcttaattatttttggactgtactgtgtagcccaggcatcctattcagtctctgcaaggctaaaacattctaagcgcttacttcgctagtgttcacgggaatcactctctctatcatcactactattattactattaaacattttaaatgaattatagtacctatatatacatatatattaaattttaaagtttaataatattttagtataacgaatttaatactaaccccttacctcgtccggctgggtcatcgaactaaaacaaccagacatatgaaaaagtcgaacgtcatgtcttcaatatccttggcaggatatcatcactagcatggttcaggtgctacttgatttacctttgcacagggtttgacgttgtcagaaaacacaaccttcaggcgaaagttcgcacatggctcagaattcgttgaacataaaataacgggaaatacggttcaccgcagcatccaatttctcttcctttgtcatttgtcatttgtcaatatttctttcgtccctttttttttcttgtaccaacttgaagctgataaatcaataacaagtctagttctagttcttatttatatataaaaccagaacgggaaatcaagaacaaacaaagagagtgcgcagcgtgcagcacagtgagttcgccgtctatagcaatgtaaaagttttacttctaaatcggtactcgctttgacgtcttgaaccgggtagtacgagttcatttgggcgaaccaatgtgtcttaccaaaagtttgaaggaagttcatgcatagtaagaagcctatgttttattactatctgaaagttctcctaaggcaaaaattatgtctcgttataatttgttcatttgacagaagcaaaattgttttgagttcttcagttgcttaagtaaggagatccagagtattgtttcgggattatttttttcttttaaattcaactgggccttgtcgagcgtagcacttcaataaagagaatagctctgcggaatcctgagtatacgcatgcattgtgggcgtgtaggcacgatctgtctcgtccatcgctatttaatggtgatactaaataaatgagtataaatcatcgccaaatacttgccattgacgctccgtttgtctggcaaagcaaaccacaatctccaccaaacctcgaattatagtagactaaagaaccaagctacaatgaatctccttgcgttgtttcttctttcctttgtgtttctcgaagagacgaagggccaggttgagtcctgccaaccaagcagtaagacccttgatcttggtactctgtgtagcgcagatagtcctcgttctttggaatttggcgattctgttgatgcatcgttcaatttttctagttgctgccccagcccctcattaagtgcacgacgcctacttggcatcacatcggacactctacctcgccaaatgcaaagtacttctgagaattgtcagtcatatgaaattatcgatccattctgtccagactgcaacctggagacaataagcttaagccttacagtacaattttcgaatccacaagttttgtcgaatgaaacttgttgcagtgaatgcaattgttggggtgaccctcgttgtacatcgttcaatggaacaagagccaactgggtagtttgtgatgacagaaacagtcaatgcgagcatggaccggtgcgttgcgaaaatcggaaagatccatggggtgggtcttgtgaatttgtgaaaagatctcgtaaacccgaatccgacgatccgcaaccatggtggtatgattgggataccagtggaagtccgtgtcaagcaacacctgtatgggaggaagaacagtttccatatatggtgatgtatgatggtgaagggcaagttatcaatcttacccttggggagcgaggcatcatctctagtgtgcaggtcgccgaggagtccaccgattacacactcgacgcaagagactgttttgtcaatgctaattctagcgcatggacagttacaggtgacagcttcttccctagtacctggaacttaacagtagagtcttccacattgtatcgttggaatattcaaaacctagataagacggttttcacttcaatagtttgctaccaatcatctgactaccgttctcgtctcgacatcactgtgcgccaaatagcgtcatcgacgtctgacttgaatagtgttcaaggcttttgtaagtcgggtataatctcggagaactttgcggaatcgagaacgctttcaattgaggaggatgacgcttgtctgcgtaaggaacttggaacctgcgtagaagcctgcaaggcattagtggattcctcctgttccgagactaatttgcaagccaacgtgcgtgaatggtgctctatcaatgatttaactgggatcgtgactaattttacgattgactccattgacacttgcataagttatatttgtggtgatggaaactgctttgacgagtgttccaatacaagccaaaattgggctgacttggtatgccagattgacagtatgaatattgataggacaggatacgatgaagctatgtacagggattgcgccgcagatattgctgagaccagctggtttcaatatgctgcggaccgtcaggcgtatattgtacgaaattttggatacttttctgatgcggagtgtttagaaagtgtgtccgaatatccttcatcaaagccatacccgtgtgctattggagcccagatccagacgaaaaaccctgacacaggagagtgggaagatgaattctttattccagtggaaaaccctctttgtgaaaatgcaaccctcagtgctcttgactacccaaacttagtgacacgccccatcaaagtttctcagtgtgatatgcttggaagcgattgcgcagttgagaatgactgtctacctgtaccaaaaatctcagttaccatcatggttgaaaacgaactttgccccacgcccgcaccaaccatagcacctacagaaccgcctattactattgaaaatacaacttgtgctgtgtgcaccacaagagacgcgaatctgtatcctcaaatttgtgttacagaaacatcagattttcaggctcttagcgattgcgacagatgttgctcagagctgaacgcaacagtgcttaatcttacagattatggatattgccgcacccaagaaactgagcgcgcatactgcgacctggcaaatgcaacggatgtagagtattgtgagaatttactgggtaacaacggtgttctgagcctcaacatcacatatacaaacactgctaacaccactagttgttgtccagagtgtattgcttatggtgacccagaactaataccattcaacgaaacagaatatgtggtagatgcatgggttatttgtgatgggcgttcaccagacacctgcaaagttgatgaaggtgtttgcacggctcagctagaccatgaaggtaacaactgtacctatgatagccagagagctgcatggctagaacagtatgggcagttcaacattggtgctattgggtcaccttgtattgcaagcaaccaatcatctcctgcagtgatggagctttatacattgccagagaaagagatgtctattaaaactacacttggagagcgcgcagttatggtagacgctagatttacttttgctaacacaaccagctataccctatctgcaaatacatgctttgatggccccggctcaggttggacaaaagatggctctaatgtgacgaccgacgaagttgcagcggcattttcttttcttcagtacgacacagctgatgtaaactcggtgacaagaggcgcgtctcgaacatgggttcttgaattcaataattctcttcatgtgcaaattacttgccagaaaatgattgctcaaggtggagatattcagggtttagcaggttatcgcttggactttgatcatattattgatacaaacgaagaacgggccttcagtacaaactcaactggcttctgccccaccgctgagatcgactttatggaagctacacggacagatctgtcggatgatagcgccttcagcaaatgtacatggatgcgcatgaacgtagctgtcgcccttgctaaaagccttgttgatccaacagcaacatactccgaaacagaaattagagccgcggttgagacttggtgtaacaccgccaatgtttatcagactaaaaaagacccaactgcagagtgtgttaaagcaatttggacctcaggcaatttggaaggtacggggaagaagtgggcctatcagtactgcaaggccattggaagttctaacccagagaaatgtcgcaacggaattttagaaaatacatattctattcagcaaagtgtggaagctttcggaactgggaaagtgacgacagacaatacttgctcgaagactaaaactgatgaatacaccacctcgacagatgtttgtgagcagggatttttcattgattacttcgacgagtctacgtccgagtggattcaagagctttttgtcccgtctctagaactcccctgcagtggcggcacgattgacttaacatatgagaaacggccacaccttttcaacaaccgtttccgaattcgtcaatgtgacccaagtgtagaaaatggatgtaacttggcaacttcatgcagtgcagcaagagcgtacacagcatcatataggttttcacaggatgcaaccgtttgcggtgatacaagcgggtcatcttgagcgtgagtaaattcaagtaagattatatttcgcgggtttcaacaccgtcacataaaatacaccttggccttgcttttctttggaaatgcatgtttacaatatattcaattgatgctgtccagttgagaaagaaaatgtcatggccaattaatttgttaatcatttcaacattaagtgccgtaatccgtcctacacatgggagtaccttaatttccaggcataggagcaccatttttgattgcgcaaagaagctaagatacgggtttgctttagtaagatagaaggcaattaatgtactgaatatgagcggctggataattattgactttttagaatgtcgcttcgaacgagcgcagaaacctgattcaagttgtgttatgaatctgccatggacctcacgaagcaaaatcaaaaacaacattgtcttttcttggattaaacagtttggataattggcctatacaaccaccatctttgagtttgatgcagagtctagcattgtttgagactgctcgataggaaccttgttcgtatgtatttctccagaaagttctgcagaaacgtttttgttatcctcccctattttggcattgtttagatgctcaactgaactatcaacgcccattgctttgggaatataacatgaagagaagaactgtaaaagaaccgcgacgacagcagcggaaacgcctaagaggccagatgagaggacttcacctttgctccaaatgggctctgcgacaaaagcaccaatagcgcgacccaagaagtgaaactggaaattcatcgcaagcatagtagtacgttgatgttgagggacgtaaatctcagccaatgcaatttgtgaaacaatcatagattctccaggcaagaaaagaatagcagcaacagcaactccagcgctgaatgagtgatctgcagcgaggataaacatgccgatagctacagcaaacgaagttccagctatgtaaatggtgttcaagagaccaaggcggctggaaaagcaaactacacacatgataccagcaagctctgcagcgcctatgccgaaactagccacgcccatactttccgcatcgacatcgtgataaattgatgcccaatttgtgaaagctaggaacataagattatgcccgatgttgagaatcatgctagagaggttgaacatgagaggaccgggcatgaagacagctcgatatgatgaggttttcaatttcatcaacgccaactccatttttgagctagatatgcccaccttggtagagtcttgtatcacaatattgcactcactagactcgtgcgacggtgcgatgttttctccctgctcaatcacttgaatttcggtcttattgtgacatattttttgcttgcttatgcgatcgtcttcaggaaacttgaaccaaagctcaaaacagagaggaaccattaaagcacaaagtgtactccacatggcacgccagccagcatgttcatagatgacagttaggattggtacgagagctagaatggaaaatccccagccagactcagatataccagtcacgaatcccatctgccttggatcagtttctgcaacaaccgcagactgagatactacgataaatacagtcgcaaacaatgacgaaatgatacgtgcgatcatgtctagttccagggaaggcgggcaaagaactatacaggtaaaaataactgtcatggcccaggaaccgagtgctatgatacgatttccatagacatcaccaagcgagccgacgattccggccccaatactactgagctccccggcggctagaatattgttcatttccgctgaggtgagaccccaatcctctgcaataaaattcttcagtgggtagagcacacggatgttaccgtagagcagcaaacgagtgataagtgatacgaacactaatctacttgggacatggtctttgaaaacctgcatccatgtttttgagttcgccgctgtcatagtcttacttggaaaagtagacaggtaaaaaagcaatcaattcctattggttcaatgactccaccatatattctgcaagtcccggagattcctagatcaatattggacgagtactcgcgtcggaaagtactctgtggctgccgttactaatcctaatcagctgaaggtgttgcttttgctccctaatgatgtttttgcagttctcaacttcagcctcgctacgattgccctgcaagcttctgaaccccaagttacgattctgctcaggttcaacacacagcatttgccgctttttctgtctctatactaacatagaaggccctcacgtagaacaagtggccttctcacagcgagacccctcctagatcgaacgtctttgacgcaaacccagacgcctccaggaaccttccttagggcaacggcccccgaaaatagattattactctccaagagcgactaagcctatgtaaccccgtcaagctcatggggtctatcgaagcggtggtgctcgtgtcttcaccgatgcagttcttgataggtttcatgcgccaattctttgcgtttttcttcaattgcaactattttcttacgtaggataatgaaatgtagcagtttcctcgtagcattttcactatctaaatacctgctcactccagagttccctttgctgcagttcaagatgggtagggtatctaccattagctcgaggttgagctccttctgaagctcattcaggataactcattatcaaaacaatgtgagtgcacgtggagaccacatgagcagcaacgatacgctccctacctactagtaggttgcaggaactaagaaatgctccagcaatgcgataggaaccactgaatgacgttccgagttgcgtgtgcgttagttagctcactgccaacagcaacttcttcgctgctactaaatggatctggagatcgagttttgatttcagctgatgccagatagtgccagtgcatgatgttgtcttgggtttggcactgccactgttacttgagccgcgcaaaatctaggcgcaaacccgaagtggaagcacagtagctactttggcaaagtccagaatatgatgaataataaaggatatcactgcttagatagctgtccttttttcttcccaaatcagtatgacaaaaaccgttaaaatttcgataacttatatttcgatgtgcttgtttcatattaatcatatattatacttagttagatctttaataagaagtggaggttaggtaagaaaatggggaggccaaggaaccgccaagctccaaacactgcaagtggagcaaacctcgaatacaaaccagcaaagttctttcaccggaagtttggggtctcagcaagcgcccttcggggctgggccgatggcggacgcgtgcgctgcgcgcgcttccccggaggcaagcgcatctacgccagcgacgatgttgagcgcatctttgattgcggttccaccggccgcgagcaacgcagctctggatgtaccgttatctacgccagagtgtcctcggccaagcaaaaggaggacctcgaacgccaggttggcgatctccagcgcgcctacccagatgcttccgccgtctacaaagacatcggtagcggggtcaatttcaaacgccaaggcctgtgctccctactggacgcctgtgaccgcggcggaatcggccaagttgtggtcatgcaccgcgaccgacttgcgcgaatcgcagtcgacctcttggaacaccttttcgaaagataaaatgtcaaactcgtggtacacggccaagatgcacatgccggagacgcagacaccttcaccaaagacctcctcggaatcatcaccgtctttgtggcatcgcatcacggaaaacgagcagcgcaaaatagacggcgacgacgcagcgaggaagaagcgagctcgcacgaaggcgcgcaagaccatcaagaaagaatataaccttgtccgtaccagaaaggttagggtatatcctactaaagatcaacgtacacagttgcttaaatggtttggtgtcactagaagagcctacaatattggcgttgcgtttcaccgagacatggcgaagggcgagaaagaagccatcaaattgcatcaagaagcgtgcatcaaaaaggatcgtaagacgaagcaggttttagtagatgaagatgggaatccccaaacgtatggtgccctctatggagaaaagaaagccgttcgatctaaagaaaagcatgatgctcctgaatgggttctcgaggtcccacaggctatccgtgattccgggattctggatttcttcaaggctcttaactctggacgagccaaaaacgaagaactcgctgtacaaaagaaagttcatgagcaatctttttataagtttcggaccaagcgtgatgaatcacagattttcgaagtgaacgcacgtatctggaatacggagaaatcaaagaccaccaactttctaaaagagtttcgtacgcgcaaagaaaagttccccagtcagattaagaacgccatgcgtgtgcaaatgaatcgccttgggcatgtctacttctgcttcttacgagaagaaaaaaagcgtccaatggaccaggcacccaaggcgcaccacagtgccattgctctagatccgggtgttcgctcgtttcagacgatgtatgacgctgatggccgcgccattgaatggggcacagggaaagattttagaaccatattctatctctgtcgccgcgttgataagatccaaagcaggattgataaagctcaagaaaacaaaaagaaaactgcatacgatttcaacacccccttgaagcgcgccttctatcgcgcccaactcaagatcaagaacaagatcactgagattcaccgcaagctcgcgctttggctttgtgaaaactatcgtgttattctcttgcctaaattcgaaacctctaagatgagcaggaggatggagcgacggatatccaagaagtctgttcgaatgatgtgtcgttggtcccattttgggttccgccaggctctcattcataaggctgagatgttcccgtggtgcaagcttgttctttgccaagagagctacacttcaaaaacatgcaatgagtgcggtaccctccaccataaactcggggcatccaaggttttccaatgccctaatctcaagtgcaaccatgtagcagaccgtgatgtccatgccgcaagaggcatccttttacgctacctatccaaggacatgatttaaaaaaaatcatttcattgagtcgcgggttagtctaactagtccgcgatcgggtcttagccctactatgaaatgcaggttttgcaaattttgtagttttaaaactaagagtgattgaattgctatgactatcgagaatattgctagatagagtaaaaaatgggcagtgcaatggactcgtgcaacagcaagaaatacgattaggccatgcaggctgtagttttcctagtgtttgagtcgtatgattgttcatctgggggtaagttagaggagatatatcctcacattttcaactttagatcaaaggaagttgttcatcaaagatgttatagatgcgacccaaaaatgtagaggtgatgggcttggaacatcttatgcaaaggcgtgcaaagataagtcgatcaattgagatttttgtctgagctaaatcgtgtagaaggtacttcacatctcaggtcattacggaaatcattcatagatataatgtgaaacaaggatttaaaaggtcaaagttgtttggtcactgcctttgaggcgctcaaaatctgcattacaagttcatgaaagagagagaaaggcataaaatgaatcgaacatggttattatagtgtatcttttcactactactactacaagtacaaacagtaaacaaaaggaactacctagttatgaaagcctttgagagacctatgtatctgttggctgacatgaatagactagcacacgagagctgaaggcaactctgttctatgagaatgggaataggaaaataaaggtacatcgcggttgattgcggagccaatagttttcatactagtaaagaaaagggggaatgaccctttcggccgcgtaggaaggaatgatcagcgcaaaaaaaagctatcgtagaggaggaatacaattgggttttaagaagttcttagaccacagccatttttttgatgctggtgttgttggtagcatccgccggggtgtcctcagcaataccaacctgatctaggttatcttcaggaagttcgagagcattgccttctgcttctgctttgtcttctccatccaaatcttcaatttcctcctctgaagtgctaggaatgtagtaggcagaaaagaactgtaggagaactgcgataacagcagagcaaacacccaaaagacccgaagaaaacacttcacctctgttccagatagcatctgcaataaaagcaccaatggcacgaccaaggaagtggcactgataattcatcgcaagcatagtggttcgatgtttctcaacgacgtaggactcagccaaggcaatttgagacacaatcatggcctcaccaggcatgaaaagaattgcagcaagggcaacacctgcgccgaaagagtgatccgcagcaaggatgaacatacccatggcaatagcgaacaaggtgccagcaatgtagattgtgttcaaaaggccgatacgaccggagaaaaggataacgcaaatatcaccagctaactccgccgcaccaataccaaaacttgctacacccatactctcggcatcaacatcataataaatggatgcccagtctgtgaaagcaagaaacatcaggttgtgcccaatgttcaaaatcaaactggaaaggttgaacatcaccgggccaggtgtaaaagaagcgtagtatgacgattccttgaagcgtgcccacgtgaatttgttacttgcagaggatacttggccatcgattgtatgtttccggcgagaggaagtcgcgagggaggatttcatttcccgttcatcgttcgaagacgtgtggctcacactatcgtcctctttagcgatgccttcctcaacttgctcgtcctccagggatttctggtcagcatcttcaagctccttttgcttcaagaagcggtcatcttcaggaaatttaaaccagagctcaaaacagatagggatcataagaccacagagtgttccccacatggcacgccagccaccactctcgtagattacagtcaaaattggcacaagagcaagaatggagaagccccaaccggactcagagataccagtaacgaagcccatcttgcttggatcagtctccgctaccactgcggactgtgttgctaccatgaaaactgttgcgaacaaagatgagatgatacgtgcaaccatctcgagttctagagaaggtgggcaaagaacaatgcaagagaaaatcacaaccatggcccaggaaccgagtgctacagcacgattaccgtagcgatcaccgagcgagccaacaacaccagctccgatactgctaagttcaccagctgcgagaatgttattcatttcagtcgaggaaatgccccaatcctccgcaatgaagttcttaagagggtaaagcacacgaatgtttccataaagtagcaagcgagtggcaagggccacaagcaccagacgggagggcacattgtctttaacgacttgaagccagggtctcgggtgcgccgccatgatatccacctcctattaacctttaacttttctgcagatgagttcaccaaagaaaatctgctctacgttctcgtgttttctttaaacggcaaacagagtctggcagcagcaggagttcttgctggactcgtaaacttgttttcacgctcacttgttattcttcttctccgcaatcaattatacaatttgtaaagatacagatgagatatatgtcgttgaccacctcttcagcttcgttggtctttggctgcttttctaatctcgtttgcctcggcgcctctgtccgagtttggggtttgctgcttggcggcgccagctagtccacacctgaacagctcctttttatttttataaatttattatcaacaattcttccttctaggtgcgccgaccttcgtttccaaatctgtttgcgagaggaattggcgcttcttctgttctgctacccttcctatgctatgttgtacttcctagcttcctcggctgtctcgctgcctttatggccccagcacatgcgcattgcacagcgttttttcttcgccagcttgcagttctcaggcttcgggctcaagcttttgcattgctcgcgagctctgtaccatgattctactatggcacctccagccctaccgttaggcctagccagccactagcactcctcccacattcatccctaccatctcgattcctactggcactcctaagccgctacgtgctccatgcgctgtgtcctgtacattcgcacgccacgctagttgtcaatttgcgccgagcgcccctcctatacgtttacggtaggtgggtgactagggcttcccagcgacgaagagtcgcaaattcatggcgctaatatggagggagcgggggtggtatagtttgtggtatccgtggtataggactggtctcgcgtttaaaaactctcgtcaaaaggtggaaaaaggttttgtaaaactaaactaacttagacctaatgatagggttaaaaaaaaagcagcagcagccataataaaactaattcataaacccaggaaaaggaaaacgaagcacgtaatggatgcaaaaactggccagaaaacagggacagaccctcggagaactgagctgacgggccaactcgaagccaaggtcgccaaggccctccggcagtcttcgagcacctcgccaaagcctgcttgtctaaccgactggctagctaactccacctcgtgctacttctgtagtacgtactaatgccgcgcaaagtctcggcgcaaacccaagttggaagcgcggctcgagactcctaggatatgctggcttatagaggatatcacggaataaatagtcgaggatacaacggagcatcgaggatatcctggaccacagctggaggcacagcgagaaacggcagcgcatgacgataggctcctgagctctttgactgtacttgtgcgcttattcttctgcattttactgaagactcgtcgagttttgcttgctttgcattttataacatcgatcgtaattttagaggtaatcgccgttttggaggtaaccacaatcgaagagttcgctcgcgctaaggcgctaatacgacgaagcattgcggtcgaactcgcctaggatacgccagttcttggcgccaggccgggaggagcccgcttgcttgctccagggctttgcgcacttgcaccaagcctgacttggtttagcttctccgtgtgctgcccgctccccgaagttttggtcggctttacgagcccgagttcgaggctgatgatgacgacttggtcgcttgttgcgcatatagtcgtgcgtttgtgaatgcggatcacgtatgaatgtattctgtatgaatgtatgaatgtatgaatgtatgaatgtattctgtatgaatgtatgaatgtatgaatgcatgaatgtatgaatgcattctgtatgaatgtatgaatgtatgaatgtatgaatgtatgaatgtatgaatgtatgaatgtatgaatgtatgaatgtatgaatgtatgaatgtatgaatgtatgaatgtatgaatgtatgaatgtatgaatgtatgaatgtatgaatgtatgaatgtgtgtatgtatgaatgtatgctgtattctgtaatctgtattcggtgtgtattatgtatgtattatgtaatatgtaatatgcatgtgtgtgtattatggtgaattaattgcatgtgtgtaagcccccgctatgagtaattggagactcgcgagaccacgttggcaaactgcgagctgggcgctctcgggtccccgtgcgctgggtgctcgctcgcctcgcagaggcgtgccaggccagaccagaccaggctgacgggcccaggccgcgctttgcggagaggcggtggcggcggcggcggcggcggcgaggcgaggcttcgaagcagcgcgctgttcttgaaaggcggactcttggagcaggcgggataacttgtagcaccttcttcagcttcaactgcgaaggccgctttccaaataaaacacagacgccctggagcgatagctgcggctgagctttgcgccacgggttggagcgcagcttctcgagttcgttcgagtcgagcggagtcttcttcccttgccggcaggcaggcagttgatggatctctcgctcggttcggggccgggcgtggtggtggtggagatgaaagctgtgaaactcggggctccgactgcgctgtacgcctcctacaaatatgaagaactgcgctctgatgatgcgggaagaggtcatgggactcgagacgcaaatgcaatgcgctcgacttgaagctgggagagcttcggcgatcaaccacgtggcaacttaaagtacccagaggatctgctccctgcaaggcgtggcaccatgtgcgagctgatgcgaggcggcaggactttgcgaagagatttggcacctccctcgcgatggagcgagatcggtattctatgtctgtagtatagaaccaatgacggcttggagcatacatacacatgcgcacggaggtaggtacacacagaaatcaatgaggaaacgaagactcatgcacatttgaccgtgggtggcatcacaactcatagcacatgaatccactggagcagccttgaagaagcgaactcttgaagcgaactgatgaaccgtaacgaggactgaaagaagaacctgaaggacctcgaggcgctcggaatgaagccagttgcctacctaccaatcagcagtagtagcacgcatctcgaggaagttcaggctcagcaactgtgacaatttgtgagcgactctgacgatgcaaagaatttgcgtattacttagcttagcaagtgaacgagattggaaaccgcttcgcgcaaaatcctggcgcctcgctctccaattcattcacaataggtacctacctacttggcaggaggaccaagcactcctgaatctctacgaatagctcgttgaaaatggacgaatcaatattaggatgaatcaagcaatcaaccaattaatgaggtgaatatatcagacaagagtgcaatgctaatgaatgaatggatggatggatggatggatggatgaatgaatgaatgaatgaatgaatgaatgaatgaatgaatgaatggattgctggatgcctcttccggttggaacgtctccagttttgacggtcccgaaccctgcctggtgaccttatagctagctagctacaagagcagagaaacggctgttgagcaaatcatttgcgtgcctcttcccagacagagcttcctcgttgacgcttggtgctacgagcacatcaatttgtactacctacttaagggttataggtgcctatgtataaccatgacggagaagccgccatctatggctgggtggtgttttcaaacaggactcgatgaagacacgctggtggcagcaaaacaggttttcaattttaatttaaaaaatttgaaaaaggaaaaagagaaaacaaaataaaaatttatttcttctttttcttgacatgttaaaagaaccttcaagttcaagcaagtcagcttttctgcatgcgctctctagctagagagctaggcaataagtagttagtaggtaccaaaggcttcgacaatggaggcgcgggtttattgcgttatagcgaaaccctgccgaaggatgctttggacatagcgcgattgccaggtgaggttcgcttggtcttctcatcagttcttctcatcggttagaataataggaaaaagatgaggaccaactggctcagacgatgaaaatgatgatgctgatactcgcagtggagcgtagcataggtacagcaacctgaatggagatactgacatttgctctcaaatgagaaaatacaacttggaaaggctcgccgaacttagcatagatcatgtctgcattataacaaaacttgggcatctcctgaaaagctgcaagcaatttgcgacgccatcgcaagcaggattgactccaaaatctcaagagcttttcatgattcttttactcagcttattgtgggacacagaccaaccaacaagcaacaggcatgaaacgcagcgtcccagagtctaactttgcgagcaagaatttgtgcaattttaatccgttctcaaatgagaagtggaagcaagaccgaagacacaggctaatagccaagttgagcgtgctcttaccttcaatattcaatcaaagtccgccaaaactgcatgtatagattcctagtttgcgactcagtttatgagcatcagggggcgctctggagataaaaagtgacgcaacaaatcgtagtgcattcattaaaagtttgtgtaatgttctccgaatagattctgcgccgtgctatgtgctgggtttagaaagccatcaattgcctccagcaaaagtcgtgtaagtgtctcaattgctgccgaaaatgtccactcagctcctcaataatcagctccgcaagctcagaagtttgcaggaatgtgctttagaaaatcgaagatttggaaagttcgacaacatgctattcctgcaaggattctttgtgtaacggtataagccatcacctaattccccctctcgataaatttctgctttacccgagtcttactgttcagattgcagaggacatcctgaatcaatcctggtttgcattgtacctaaagtataaacctcaaactccattagagagtaagcgtatcggcagacgttttgctgaaagagagatcgagtgcctttgtcattgtcataaaagaaaaaatatatgaaatgtgcaagccgaagtctcaaagatagacgatagcatgtattttccatattgctgctttgatccatcatgttacattttatgttctttaaaaatagtaaatttcaaccttccttgatcaaatacgtgtatcatttccttttttggctgcatgatcactgcaacttctttccaaatccttgtagaatagaaacaagtaatttgaattttaacatcctcgattgtatcccttcgcatcccagcgtttcgatcaccttctttactgaactttgtataggtgcgcgcacacactaactagtttagcacaagggcttaattgtttgttcgcataaaatataattcaccttttgcacaattccgggaacgaatggggctcttccataaatatagaaatcacaaagttgatcttctcgtcacgttggcctcaaaatgccctggaggcctgtgtatctagttacctaccggatatagaaatgagtctaaggttctatttgcttataaatcctgtagagttctctagttctgcaagacaaataccaattgattttttaagatagctcaggaacatttgaggtgcacatgtgtaaatgcaggatgttatcgtggagaacactgatctacaagcaagcaaatatatatcgtggtgataaattccaaaggttctcaacttttctagcaaattgcgtaaggttagtgcagaccaaagattcgccaaagccaatgactaatacagacttgtcattccacaaaataactacgtaatagaacatttttgtgaagcatgccagcactatgcactgccttcagagcctgtgggcatggcgtttcatttctgcagttaccacatgtttatgttgtgagagtttgaaaaatgtcacatcaccgtacccagggactaaaaagcaagatttagcataagttcacgcatatacatgctcactatgagatatcaccaacagaatactgcgtacatgatcgtgcagagacagggtaggtacatgatctaacacatgaaaatatctcaaaacgttgttaaagcttgcatcttcatttagttatgtttaatttcgtggagaatctttaatcctagtacccaatttctttacttcatctgcgttaccaccatttctcatgtttacagaaagaggagtttcctcccagagcatgcggaagacagacttccactcactcatgctctgcatcgcttcttcaactacaactggaaccatgcgcgtggcagtcattgtatccatcatacacctaaactccaaccggcaatagtctctcagtttaactttgggatcattgaggcagatttctagtaatcgccttagcactaatatcacctctctcgtagaaccaggccctaacaataataataactaaaagattagctactaatactagcagagaatactagtactcactaacaggtactatttctacaaataggaaccttggcagaaccgctacagatctataaaggcacgtcagaggatcgcgaatgcgctgtaaagtatgcgtcaggtgtggctgacgtcgggcttggagcctggcaatggaagcaaacaagcttgagaggtatctgaccttgcagggagagtattcagtgctgcgaatacacaagtattgacgaggcagctcaaagtgggagttcttgccggtggctgagaatggctcccactcgtgtacgagtaaccttcgcacgtaacggaggctgcgtggcaacaggctgcgtcttggtgaaatcgtgctcctttgaagcattgcgcaatgctgctgcaaacaaactcaagattagcaaaaagcaagctaaaagtattcgcttatttgtcaggaaagcacccaagggaagcgcggtgctcgaaggtacagaggttccaagtaacgatgatgagtttgtacctaatattgttgagaatgacacccaactagctgtgtctttgggcgaagggtttgtgcatatttctggggctaaaatcaacccgagtgaactcgccgaaaagcaagtccatgtacctgattttcctttgataattcgacaggcaaaatctcaacgcacaggcacaggtgctcgtattttctgtgatctcgatggcgtccttgcaaattttgctagtggagttcacatgctcacagggaagacggctgatgagcttggaaagaataaattgtggaacgtcattttatctgctcctgatttctttacaaatttgccatggatgcccgaaggagaagttctatgggagggtcttacagcgctcagcagagcgtacaatgctagagtcgagattctcacaggctgtc

SEQ ID NO: 83 - DNA, 21986 bp, unidentified
  misc_feature 1..21986: note = Fanzor polypeptide
  source 1..21986: mol_type = other DNA
gggcagcactgatggtacctacatcgcatcagaacaaaggtctcaagcgtattctcattcgcttttgtgcacaggaaactcgccactgccagtacgacaatctttctttcactttacaatatagtggacctacgtttaaacgtagaaatgatatctttatcttattccgtgcctgctaacttctccaaacatcgaattaattttacgctggacttcctctctgatctaaactgcttgtgcaaaatgctccagtgcctcacggtagcgctgtttcttcaaattagattttttaaattttttttaaaattactataattaatttaattataaaataaaacataaactaaaataaaacgttttgaaaagaaagaagatacctcggtactacgaatgatattaggtaaccgtgttcacttaaatctgaaaaggacaaataaaataaaacaagaataataataaatgacagcaacatatagactccacaacccggatagccgttgacgagatggtacacaccgcaaaagtcaactgtgagtaaaataaaggcctctacgctatgaggggtcacaggctatggaggtccatttgctcgtggccaaaaggataagacgagatcttcgtagacgttggattttgcagacgttagaggagcaaattgcaagcaaagcccaatttgttcatcattcaatactacttctgagcatcgcaacgaacactacgtaagcatgtcgcaggaagcaactgcaagggatgctgcgccgtctgcactagcacaggtcgctcgggaggagagggagctgcaaaagcaacaccatgagcaacaggaacaagagcatgagcaggagacacaggactgcgaaagccagcagcagagcgagactcacaatgaagtgcaatccccacattctggaaacgacaaggctcagacgccccggcaactacaaactcagcgcgtcctggcagaagcaacacgagctatccagcagcagcaggatgaagatgctgaaacccctgaagcggcggcaatgggaaaatccagcacgtctgatatattaaaatctgcagcgcaagatgtcttgcaaaggcaaacacctgaaaaggatgaggctttatcaaacgagacgacaaaagcaaacagcgtcttgcagcaagtaagtgctgatatctctagtggggatggtgagcaagacgaagagaacgaggaggatcaaaacaatcaacaaatgtcgtcgtcacatcgagatcggaaatcctcagtcacaaaagcctgggccaagctttatgctgagcccatggaaatgaagcaaagctctcctcgttcccgtcgtcagagtagggggtcagcacaccacggtagcagtagtcgtcgattctcgctggcagagtctcgggaaagactctcctcaacgaaaacgacccgctcttcaaacaagtctgggaccccaaaacgatttattaaagaagatgatgaaaaaaactgcaccttccagcccaaaattaaccgttcttcgcgatctatggttaggaactctggaccatgtctacagcgattcgaaactgcccacgaagttaaagagcaagcgctcaagacgaaaaggggtaaggctgaatatgagaaacgtgtcgataagaaagtttgtccacaatgccatgccacacaatcatatgatgaggtgaaaaacaggaaaaataaatgtcgcgactgcaaagtggcttacagatacaagacagtttggcaagacgttagtgaaaactttctagaccgcatggaatcaaagatgcgcgagagtgaggaaaaacgtgctgacctggagaccaaaacagctccttcgtttcggccagaagagaaaatcgtgtatgatccgacatttgcaacaacccgcagagtgaagacgaggtctttgaactggagtgaagtaagcggggagttcatgcatcgtatggagacagatatgtacaaacgtgacgcgaagcgagtgattgctgagcaagaagctcttcgagacgcaggctgcacattccgtccgaaatttgagacaaaagagcactctcttgctacttcgggcgtgtatgacctcggtgtgcttggcgaggactttacagaacgcatggaacgtgattataatcgtagacgtcgtgagaaggcacaaaatatggtacgcgctagataccagtcaacgcttctcgatcctgcactcggtttcaagacaagggcagcgtgggatgaccctcttgcgaactcttttcaaggtggccagcgtcgtaatactacggggcgttggatgtgaaaatttgttctagcatttcaaaactatatattacttgaattatattccatttttgttgtctgtttccttcaatcgagaaaccaaagcaaagaagattcactgctttggtaaagacggagcactattaagagcaactttgaatagtaaatctggataagtaaaaaaaaaaaagaggatgaaaaagttgtattagaaaacagaagaacgatgagaatcacgattctgttgaattagtcgttgagagaaaaaaaaaagtacaaaggacgtagattttttcaataataaagatgatgcgatgtaagttgcagttgttgtatatatatgaaaagagtcaacattaaaagggacgcagagagaaaaagagggagtgagcgaggcgcaaaacttgaatccttcgtaaatcgtgagtgtggtgctatactgaagctagcgggtagcgagagctacaataatgatgacaagaatgactaagagcacagctccaatgatgatgttcaatttccatttgcgccacatttccctacgtttgagttcactgctttttttgtcaaaaagaagtgcttcgtcctgcagacgagcggtgtctgcctcgagttgctctgcacgggacatactgtgtagcatgctaccaatgttgtcctgcatggtagccgtcacatcgccaactttaccttgcagggtagcgatcttatcagaacttgggtcatcataggtcttgacgagttttgcaaacaagggctccacctttttcgaaagtgctccctcctcgcacgtgagggcttcctccccgtgcgcttgtttgaacgcagggataatttcttggatgagagggaataccattcgctctgggtagttagaagcagtgataacaatgtaaactcgctcttgagcatctgtggaaaaattaaaggcattgatatcgcctactaagcggtaacgcgaaccaggtttaaccttcatctgaaaatcaggtgcactaagcacttcatggactgcatgatgatacttttcgacatctgaatctgctttatccggaagataggtggcaactagctttccatcttctgcgcgtgccacagcgacaaacttaattttgccctgcacgctgccagagctcttactataaatgtgcaacaaataaagaatcaatcatatgtatgaagtgggagtgggtatctttgttagacgggaatgttcgtatatgagaaggagtcgtgcttgttctcaatgctgtaatcaatctcttttcacctgcattaagccaaacacaagacaacttacttttctgattcgttgttatgaagcatttttcttgtcaaggggataggtaccttactctctaatttatgatactatgctttcgctacctctgtctttcttagtggatgaagagaaaaagtttaggtccaactcctagcttatccgcgttgtagtctgcttcacaaccagagcccagcttgactgtgttgttgttgttgttgttgttgttgttgttgttgttgttgttgttgtaattgaaggaaaagatggatggcgacaagaatacagggaaatggctctgtacttggtcgctccgttgccttcttaagccttagtgttagcgagccgcaagtacccaccgctccaacgcagccctgggcccttgggtcttgtgcctaagctccaatcgaatttgatatggggtgccgtatctcttgatctaattattttattattttcgaaatctttctttgtccattttttttgtttatgtttgtagcaattctttagtctctccatgccgaaaggcgtctttgcacgttacgaaagtacttgacaaattagtgacactattcgaaacttaattttctagcgtcacttcatacgcttataagagtcaacgcaaggatgatgaagtaaaaatgaggtcatgactggcgaaatagcctaggtcatggctctgttcgagtgtttttccagaatcacagaaagcataatcttgacttggttaacctacaagaccttattaaatttcgaagagtttggagaagcaacatttcatcatccattacatgcagaactaatgttttctactttgtaagctgatttgaaaagagagggaaagacacgggaagcagtatttctaatttattttataaacatcaactgtcggtttgggtgaagagtggattgctcatgatgaacagccatgatctacttctaaaattacgggatggtttatgtaaaagcgtgcggcgcatcatagaatagccagagctctacctttcattacaattttctactgatattttaaatatcttgcgaaagagtcgagctactctaaaatatttatacgagatactgccttatctagaggtccaattcagctttcctaaaaacttcaaacatcaaataataatgcaagaggttttaaaattttcaattaaaaaaaagaaaagaaaaggaagtcagacttgccagagaggagaaatgtcctgaggagggacacggtgctgtctgttgttgtccaaaagtagatatagtactactgtagtactgggttggatgtgctctcattttacatagccgcatgaattgatttctgttcttgagacttaaaaattgcaaaaattgatcatgaatttgttacgcgttagaaaaccagacaaccagctcgagggcaacaaagagagaggtctatgcacagcgaactagctccattttcgagtaaatttaggttggcttgggttggagaacatgcaatgccattatgagagcgagtggggagatatatgtatgcgatatggaatatcttgagagtgagtgaaggaaggttagtagcaggtaggtaggtaggtagttgtattgatgagatgtagtagggttaaatgagtgagtatgtgaagaacacatcatttagaggagctccttcatgagctcgccaatgagagcggtgtgatcagcggactcagggatgtccttcttaattgttttcttcacagcggccacggtgagcttctccctgtcgccctcctcaaagatggacttaagccggtccttgatcttcttaacgagctcgtccgatggcttcttcttagacttcttctctgcggcgccctccttcttctcggcagcgggcttcttgggtgccttctccttcttctcggcagcaggcttcttggcggcagcctccttcttttcggcagcgggcttcttgggggacttctccttcttgtcagcggcgggcttcttggcggcagccttcttgggcttctcctcgccctccttcttgggtgccttctccttcttctcggcggcgggcttcttggcggcagccttcttgggcttctcctcgccctccttcttgggtgccttctccttcttctcagcagcgggcttcttggcggcagccttcttgggcttgtcgccctcggtggtctccttcttagccttcttcttgggcttctcctcgccgtccttcttctcggctccctccttgtcgccctcggtggcctcggacttcttacgcttggttcctgcggcggccttcttcttgggtgcagccttcttcttcttaggagcagccttcttcttgggggccttcttggcctttccgggtacagccatctccgggtcgtaggtgggcttctcaagccagtcaatgaatgtgtcgaggagctcctccttcttggtcttctggccacggtcgacgccaaagttgtccatcatctcgcggagaaagtcgatcttccatacgccgatagtgttgaagaccttgtcgcggccagcctcggccttgccgtcagggtagacgagtccgctgaaggcaagaacgttcttcttggcatcgcgcttgcccttgcgtccgtagaaggccttgtgaagggcctggatctcctcagagctgacggggaatttgttaaggaagtggctgatcttctccatgtcggagatggccatgcccttgcccttgggcacgacgaattcgtcctcctccttggtggagggctcaggcggggcgaagtgctccacctgcttgcgggagcgtccactgcgcctctcgccctctgcgggctccttcttctccttcttctccttcttctcggcggcggccttcttgggtgcggccttcttggtctccttcttgccgttggccttgccctcgtctacctccatggcgtcctccttggtctccttctcttcctccttcttgtcttccttcgcttcgccttccttcacctccacggacaccttggtctccgtgccatcgtcgcccttggccgaggcggcggcggcgcctgcctcctccgccttcttgtcgttcttgtctgcgtctgccatcttctttgtctgcctcacctcgcgctctctctctctctctctgcgctgctcttgctctttgctcaagcgcctttgcagttgcggttctgctgcgccgtatccgcctcaacggagcgcttagccccgtctaccgctgcctaccgccgcgcctaggactccgctaggcccttgccaccttaatatgaggcaggaaaaaccttctcacgctcaacaaacaataatcgaacaaacaaacgactttaaacaaacaaacaaacgactttaaacaaacaatcaaacgactttaaacaaacaatcaaacaatcagacaatcagacaatcagacaagcaaacaatcgaacaatcgaacaagcaatcgctcagacgatcagtcagtcagacaatcagacaatcagacaatcaatcagtcaaacaaacaatcagtcagacaaacaaacacacagtacctccgtctccaaattcaaacagaattcaaatcttcgcctgcttgtccctaattaaatcggcctttctttctttcccttcacacgttgaagaaaggaaacaaacaaagagagcaacaagagaagaaagaatgaaagaaagaaagaaagaaagaaagaaaaagaaaaagaaaaaaatccttcaaggtgctttctttctttccacctcctcactcagtccgtgaaatcctgctccgttttcgctcgccagccgcccagcgcctgctctgggggccctctcgagcggcccccctgcctgcctgagctcgcctccccgcggattcgcaggtcgccccagccggcggcccctttccgaggcctcgcgatttctcctgcctcgcttttcgcctttttccttcgccttaaactcctttcaaagcgctcgatccttcaacgaaaagagaggaaacaaaaaccatcacgaaagaaagaacaaacaaaaaactaaaaactaaaaactcgccaagaagcccttattactacttacttacttatctatccccttcttctctgagggtccttttctattcttttcttttctattcttttctttttcccgccgcctgccctagcgcacccctagcgaaccccctatccacctcttttatcttagctcgtaggcagcagaattagcgcacagagagacagagatgcttgtagacggagatccctttctttctcttgcttgtttttccctggcgccttcctcagcgtatctatgggaccgcaccctagccaactggctagctagcgctgctaggactcctcccgcaggcgggacccgaaatgcgaagatcctcctctcatgggggccccctcacttcccctctgagcccctctgggagcacttgtgtcgaggggtcccagaggcagaccacttaactcacttgcgatattttaccacgccctctcatgcacactgagaggaaagctccacttgcgcggttatagtctactgtgcagagaactatagctcacttgttgagcaaatttacttcacttgtaccccccgccgcatctttttcccatgccctcccagctggaaaaaagagagggaaaaatctggcccgggcggatgaggcctgggaaaaaatcgcgcaggggaacgcagcgtcggaacgccgcgtcgttctttactacggccaatatgggctaacctccaccgccgtttctgagggcctctgccttcaaggccgaagcaatcgaatgaattcgccgcccaattcgagataactcttgggaccttgttacgctgccttcgcagtgcgtgggttggagtcagctatcccatccattccaaaggccaaatggaatggcaggcaggccacaggcgagaaagcgagcgctccgcctcgtggccttatcctcctccgctgggctcaaaatagacagatagataagatagataagatagatagacagatagatagatatatgtagatagatagatagatagataccttgctcttcttactcttcttctcttaagttaaccgtgtactctaaggcctcactaactaaccaccgcctctttacagcagaggcgctccaactactggtctaaccaccgcagggaagggaagaaagagggcccgtatgccctcctccttgtggagaccaattcgtgagaccaattcgtcgtctttactcattcaagcaagcccggtcagctcggtagcggcagcagcgcacggttaggctttcgttgtttacattgttgttgctgtctgctggtattatgcgttgttgtggtggttgttctcgttgttgtcgttgttgattttgttggttttcaattcgttttgaaataccatgttcagacagagcgagctctctctgggcgttatgaaaggagagagagagaaagcacagctgagattagttatgatgagagcgagcgaacgaagggaaggaagcaaggatggcccttcttgactccaacggcgggtcggcgatcaggcagccgagagaaactaacggcaggactgactgactgactgactgaatgctgagatcgcagtcccaaccgcatctgtgagacactccattcgccaaagaaacacaccaattggtcgatgagggtcccacgaatcctcgcagccttgaactactagttaaactaactagctagtagctagctagctagctaactgccctcccggctgcctgcgcgcctcctatcctaatccctagaagtgcctccattatctatctatcttcatctccgtagcgaagtccaggagggtacagattgcaagcgcatgtagatgctcgccctcctatcctaaaccgtagcaggcactacggtgctgcgcttgctgcagaggtttagtgatgatcgatggggagattgtggcatgcatgcccctctggctagccagaacgatgaacgagctcccaaaatggctcccaaagctgagcgagacgggccgacgagtgccacgttcacggctcctcgctgccttcgcaccggaatctgacccgccccagcatgcatccaagatactgtgcttcttaccaactggctagctaggtgataccccaggaacacccactaaccgtcacttatcaggaactctagcacttgcctcaaattcttctctctcataagcccctttagtgtaagctctactactactagtacctttcctgatacagtaggggccatctacctgcgcactaggaatcgcctccgtaacagttcctagcgcagccctagcagctcggaattaggagaaaagcagagaaaggaaaaacccaccaatatcaaatctctctctttgttctacgtttcatgaacagtatgacaaaaaccgttaaaatttcgataacttatatttcgatgtgcttgtttcatattaatcatatattatacttagttagatctttaataagaagtggaggttaggtaagaaaatggggaggccaaggaaccgccaagctccaaacactgcaagtggagcaaacctcgaatacaaaccagcaaagttctttcaccggaagtttggggtctcagcaagcgcccttcggggctgggccgatggcggacgcgtgcgctgcgcgcgcttccccggaggcaagcgcatctacgcctgcgacgatgttgagcgcatctttgattgcggttccaccggccgcgagcaacgcagctctggatgtaccgttatctacgccagagtgtcctcggccaagcaaaaggaggacctcgaacgccaggttggcgatctccagcgcgcctacccagatgcttccgccgtctacaaagacatcggtagcggggtcaatttcaaacgccaaggcctgtgctccctactggacgcctgtgaccgcggcggaatcggccaagttgtggtcatgcaccgcgaccgacttgcgcgaatcgcagtcgacctcctggaacaccttttcgaaagaaaaaatgtcaaactcgtggtacacggccaagatgcacatgccggagacgcagacaccttcaccaaagacctcctcggaatcatcaccgtctttgtggcatcgcatcacggaaaacgagcagcgcaaaatagacggcgacgacgcagcgaggaagaagcgagctcgcacgaaggcgcgcaagaccatcaagaaagaatatgaccttgtccgtgccaaaaaggtcagggtataccctactaaagatcagcgtacacagttgcttaaatggtttggtgtcactagaagagcctacaatactggcgttgcgtttcaccgagacgtggcgaagggcgaggaagaagccatcaaattgcatcaagaagcgtgcatcaaaaaggattccaagacgaagcaggttttagtagatgaagatgggaatccccaaacgtatggtgccctctatggagaaaagaaagccgttcgatctaaagaaaggcatgatgctcctgaatgggttctcgaggtcccacaggctatccgtgattccgggattctggatttcttcaaggctcttaactctggacgagccaaaaacgaagaactcgctgtacaaaagaaagttcatgagcaatctttttataagtttcggaccaagcgtgatgaatcacagattttcgaagtgaacgcacgtatctggaatacggagaaatcaaagaccaccagctttctaaaagagtttcgtacgcgcaaagaaaagttccccagtcagattaagaacgccatgcgtgtgcaaatgaatcgccttgggcatgtgtacttctgcttcttacgagaagaagaaaagcgtccaatggaccaggcacccaaggcgcaccacagtgtcattgctctagatccaggtgttcgctcgtttcagacgatgtatgatgctgatggccgcgccattgaatggggcacagggaaagattttagaaccatattctatctctgtcgccgcgttgataagatccaaagcaggattgataaagctcaagaaaataaaaagaaaactgcatacgatttcaacacccccttgaagcgcgccttctatcgcgcccaactcaagatcaagaacaagatcactgagattcaccgcaagctcgcgctttggctttgtgaaaactatcgtgttattctcctgcccaaattcgaaacctctaagatgagcaggaggatggagcgacggatatccaagaagtctgttcgaatgatgtgtcgttggtcccattttgggttccgccaggctctcattcataaggctgagatgttcccgtggtgcaagcttgttctttgccaagagagctacacttcaaaaacatgcaatgagtgcggtaccctccaccataaactcggggcatccaaggttttccaatgccctaatctcaagtgcaaccatgtagcagaccgtgatgtccatgccgcaagaggcatccttttacgctacctatccaaggacatgatttaaaaaaaatcatttcattgagtcgcgggttagtctaactagtccgtgatggagtcttagctccttctatgaaatgcaagttttgcaaattttgtagtttaaaatctaagagaaaaccaaaatcgccaactttaaggtggaaccgccgccgccgcggggtgcgctaggggagtgctacacgcagctaccgtaaacccgccctcgtgccgtcagtcgtgagtatgttcgtttgttcgatctacgcatctatctccaaggagagaaagagggggaataagaggcggaggcgaaaaaacgtcaccgccgctcgaagaaagccgccctcggccttgcgtcgcgaggcggctctgactccggcagggcccaaaacggtatagtcgtggagaggaagttgcgtgcttcacgtttatcacctcaggtcgccggccacgtgcctgtggcggagcagattcaccgcccagaaacgccatcacgaggcgcgcgcgtcaaggacaccaactctccagcatcattgaagagtatatcaactcgcgggtgcaaaagatattcgagattgcgataggcctctttggggaaggaaatatggaccacttgtttaggccgctttggggcaggatagaccgttaattgttggcctagtagaattatagtgggtatactcacgcactcgaggggttgagtggttttggtgttgcgtattgcgccaggaaacctgtttcaggaaaggctgaattttgcaaatgccgtatgcagctgctgatgtcctggcttccgggaaatcaaagagctccgcagaatgatgggtttttgcatttgaagacacatgctagtatcaaattgtcgtagtacaacctttttgcaaatcttgacgtcatcatcgccaactctgctagcacgtctgcagctagctgtataagtagcagctagctagctagcaggtatcatttgtcttgagacacgggatgtccaggtccttcgacaccaccatcatttcaattcgcttatccacactccacgttcagcattcctgctgcttcttggtgaccgtgtccgttcaccaagttttgataccaggagaatccagacacgagggtgcacatgaggatgcacagacttgtcacgtgggccaagatctgccgagaatcagttcgaggtatccatctgcctgctcatggggcgctgggaatgatgtagttgctacaacgttctcgacactcgtcttcgccacaggtgtgggctcccacgaagagtccctgttctcgataggatatattttatttattttgtaaattatatttcacaatccaaaggtaagaatgtctcttcttcactgcaatgtcagatttggggccccgatttggggctcgctcttggatccttcttccgccgtgaatgtgtttcaaccagcaaaacaaagcggccttggtaccaaccatctaatccgctcgctttgcgcacaggtgcatattcccaaaggtatccacgaaggtgctacaccagctccgccagcgccaccgcacgatcgcctcgagcgagcatgagcagcgcccatgaattgcagtcgctccattatcgatggtagaagaataggtacttacttacctacttcagaggaagaggcacattccgcgcaagttcgacctttttaattttaaaaattcaaaacaaaggaagttgcaaatgaatgtagaaaatagtaaaatggtcaattcaatttttaatagatttttagaaaatgaagtaggtacctagctaactactagttgtttctacggaattcaggactctggagaagtacttaatagcagtagtagtaggctcctaccaccaccttcggaagaagatgcgatggaccgttccggactcgttcctctgagctgttgtagttctgactcttctttccttttccttttccttttcctttttccttttccttttccttttccttttctttttccttttccttttccttttccttttctttgtcttttccttttccttttccgtttaaaaaccacaactttggactaaaagcagaagagattcaattgaagaggaacctcagacttgggcaacgagcgctgggtctttcagcctttagcccctcgacggtcggtacctttgacaccaagagaagagtcgttcggccagctcttgtgcagctttggggtgaacttgaagcaccgcgcagacgacaaagcgagtaggtttgattcctttgccgcatatccagagaaacgcctgcctctgcgccggcctcgtgccctcggagccgcagattcactcttagcttatggcgtatgtggacccttatggtcgaaagacttgccgcggctttctctctctctctctgtatatatatatatatatatatatatatatgtatgtgtattcataatgaatacagtatacaatcaatgatacagtgcacatttcaaatttcaaagctcgaaacgacaaattcctttggttttctccttttccctaaggcattgaattcctcgaatgcttctcacacgtacatcctcgaatacctgtcggttgtacgaggaaggaagcaatgatttctaagggcgtatgagcccgcagaagccaatcggcatgggcttgcggaatcttgggacgatcctgctcggacaggcagcggatatgatatgattgccatggcggcaatcgttgccgcaactttccggcgggcgtgcacaggttggcacagtgagcagtgagtgcaatggacgaaggacttcgttgtgttttttgtttctgctttcgtaacatggagagaccaaagaaagagaggaaggaagaaagagaggaaaggttttaagtgtgctcagtatacgcactgatcgttcaaaactaaagtgaaagcaatgaatgctcctttaattcttggaatttttgtgcgattccattggaaaggagaaggaaatgaaagaaatggctgcgaaatatagctgccgcaatcagccgaagctgcgagctgcacgcaaagggggcttaatattaacctactcccttttgaggcatggttgtggaaaatgctcgctttggggcgattgagagtgatgtattttccccagcaaaagcttcacgtgagttcgctgattgcgccgagtttgaattaccgcgagaccagaaaagaaaacgagttttcttgtcttctattttaatattttaatattttaaaaaagtacttccttttttaaaataaaaataattaaatttaccaaagatatgactttctttttcatatttaaaaaataaaaggaagaaaaaaggatccaccattttctcgcagagagatggttagtcccgctctaaagactcctatggtgaaagtcgcttccggagtgtccgcagccgcacatttcgcgaactgcgttggtatcatgaatatggagatttttataaagacatgagttggataccttaccatatacacacaccgtcgctgtagcagggatctctcgagcttcgagtagagaaatcacgatcttcaggagtggctatcttcaaagaaagtggccacgctgtagtgctggcctagccgagtgaatcttatttttattcattcatgccacttctttgttgatggattgattgattgtttcctggaatcatcgcgatccgtcttacaagtagtcttgacggtgacggttttacattttttatacaattgcagatcttgtgaagcgtggtctaactccacctttttggcggattcttcttgtttaaaaacatgaaacaatcacacgatagtatctaagctttctcttgtggctagctagctatgattctggcttggagatatccgtctcggcattctcgacagtggctttcatggtaaaatctgcccaagaatgtcaaactactatcttagcgccggcagtcacaactttccaatctgagaccaggttgtgcaaagaagatcccgtacgaaaatagatcctgtttactccctctgtcttgtaggacctaggtactacaggcatcctccgttatttttcgacaaaaacctcaaatctttcgtattgcttcttcctttcggcgctcctggcgcatcaagccatcaattctactcgagaaatcacgacctgcgttgtgaagcctactgtgtattaaaatattgcgccccaagttcaaaggcgtgttgcgcgaacatcgtctctctagaccggtagctcacggtcgccgtattgtgtgtaacagcgctcttcccagcattttttggatgtggtcgctattttgcattccgagaaagcattaaaattgaagaatacgtcgatgcaacggagattggaattgtagatggatgtaaaatggttcactttctctattgcagtggcgggctcaaatctactgcaaacaaaacagctgcaaacgtaacaacttggaggtaaagaaagggagtgagaacatggagatgttgctgcggctggtgttgaactcggttttccgccgcgattaccatatactgcaaattaggcaacaggagttcttggttccagagattgccgggttttatacgccatttctggtgcacctaggtactacattccctacttgtaagaacttcagtgttactgataagagctaacagaacttgtagcaggacaagcgacctggacaacgccaccgcgtatgccgctcgctcgattcttcctattcctcgcactagcaccctcctatgaaaaatgaatacaacgaaaccagatgtcatctatcttttctaaaagtcaaatcagtttggagttcttggcgttccaaggtttgtggcacagatatctcgatgtattaagtggctgtgttatacgtgtcgagagcaaggaatgactggttatctagttttgaaaatgaattgggggattgattccaagatgagagcgggtcttttctgtaacactgctgcttacttcttaggtctgagcaaatcttcatcgtagctgtctacagacaactaggtatggtttgttaatctgtatgcgctctacttgggagagcctcgcttgtgtgcgggaatgtttagatgtgattttcaaatggttcgctgccttccccagaacacttcggtatgcacatgcgaagaaatcgctttcaattacggcggctaaaatgcaatgtaaaaagatcgtttgggccgttcgtccaatgattaatttggacagaatatacttcgcagctctgcaggctgcaacttggttgtgggcagctcgcctacctcccaaataaaagctacgattaacccgacctgggtaagcgaagagtgctgcaccaattgattgaacgggtgccggtggtcccagaagtttagactgctgaaaagtagacgcctatcctccaaaagccctctcggtctcatgactctaatcgaacatccatcgaaggtttgtctggcccgcacgccgtggatggatgcggagattgcagtacgccacctgcacgaccatgcactaattcgcactgcctttcatggaagctcgtagggcgaatctcggagttgcaaaagcatttgttacttttcgacttactacgaactttgtaggaaacactggcgatgcattcataatattccattcgctcttctttatcattcgtgagtttgatgtctgattcattaattcactgattcactgatccaagcccattggccaaattcgatgatgaaatattacattaacaaaataacttgaaataaacaaacaaataagctaaccaacgaacaacttgaaataaacaaacaaataagctaacaaacaaacaaataaataaataaacaaaccgaccggggagcgtggtcacagctgctgcgagttctgcgaatggcgtcgcattcttggccgagaagaccggtcgtggcttgaccgggaagcagctgcagtgcttggtgtcaaatgaataaatcgatgcaggaatcaatcaatcaatcaatcaaccaatcaattaatatagaaccaattgaagaagcaagctccaacaaaagcttacggtactggcctccgtgtcttcgggaaccgtgtggaccaggaggcatcttggtggcaatctcaatgggccttccttgatcttgcacaggttttcgtcttgatctggtgcttttcattcttccctggaaacgaagaatagctgctacctagcgagccaagctttatgctctgtgctttgttgcactcactcataatgcttcctccaagcccagccgcaacctccaagcccagccgcaaccgcaaagcgttcccgagtggaagaggaggcggtctaagctctctctgccacggcgtctggctcggtttccaagcaaaggagcaagcgagcgagcgacagtggcggtttgcaattattcattcattcattcattcattcattcattcattcattcattcatttgcatgctttggcgaagcctgaaatgaacatgtaatgaatagcagactttaaagggaaggacctcttcaaagagggaggacgaagaaggtaggtgcccacttagcgcttgccttagcgcaccttcacaaaaaccaacaatggatgaacaaacagcgctcataaacagacaatcaatcaatcaatcaatcaatcaatcgatcaataagatgcagaaagtagtggtttggaagaagaaatcaaaagaaaagaaaagaaaagaaaaggaaagaagagaaaagaaaagaaaagaaaacagagaagaaagaagaaagaagagaaaagaaagagagaaagcgcagtgcaatcgaggaaatcgattgattgggcagctctccctattcccctcaggctgaccttcctgtctcaagttcttgcaaagcgccgccctgcgaagagcctcgcgccgacacctacattgaggcgggagcgcgaggaagcgataggcagctgagctgcccattcacctacttgcttacttacccgtgcacaatcttctcaagaaagggaatgggagatggcggcggtgagtggaagaaggcgtgagaaaagaagggtgttgaacaatcaatcaatccaacaaccaaataaaataataatcaaaataataatcaaaataataatcaaaataaaatatcaatcaaaatagcaaacgagcaacctggaacaacttgaaacaacttgaaacaatcgagaaagccccaaactgaaaagaggcggcatgcgacagaaggtctacgcagcgaggtctccgtttgcattcagaacgtggaaaaggagagaccttttgaagaggctgccgtccttcgaggcctcttctgccatatatatatatatatataacatatgctcagagcaaactcttctcctgcagctcttacccgtgcgctaccaagtgctataaactacccaaagtaaatcagcgctattgcggcatagtggtcttttcttttcatttcttgtttataaaactaaagttttaaaaatatgaaatgaattttgtctattcgcttgttttttcaatttaaaaatgcctttaaaagaatatttctgccttgtatataaatcaaaacttatctgtgttgctgttcgttggttgtcccatgcgcttggtttatttacacacaaagcttttgcaaaagcctccgacaaattaaagaaacgagctctggctgcacgaaagaagaagatcaaccagactacagaaggcgtccacccagttgcagcaacaggctgatgagtcgaatgagctggaaatgcacctttcagtttgccctttgttttcgagtttgaaagaatgctgggaagcaggaagcatacgaccgaaaagaaggaaggcaagcacgataattgaaagcaagaatgtttttttttgtttttttgtcttttaatatggtgaacttcctacctacttagataaatgatgtttaattttaacagttaaaaaagaaagaaaaagaaatcgttcactaagaatgaaagaaaagcagtcaaagcaaggtatattatattatatgatagcagggagaaataggagccgtggaaagcaagcctacagagactgtcagcaatccccaaacgtaaacctcgacaagagtgtcaagcagcagtagtcgcagcacaacaccacaaactttctagaaagatgtccgtccccgcaaagcgtaaggctgatgagcagctgaacggcgagagcaccaagacccgcgacgttcgcgttgtcaagctccggccactcattccccctgccatcctcctcgaggagcttgctgtctctgacgagctcgccgccaagatccacgaggctcgccaggtggcctccgacatcatctccggcaaggatgaccgcatcctcgtcattgtcggcccctgctccatccacgacaccaagctcgccatcgagtacgcccaggagctcaagaagctcaaggaggagttcgagaaggacctcttcgtcgtcatgcgcgtgtacttcgagaagccccgcaccaccgttggctggaagggcctcatcaacgaccctgacctcaacggcaccttcaacatcaacaagggtcttcgcatcgcccgtcagctcctcctcgagatcaacgagcttggtctccccgttggcactgagttcctcgactccatctccccccagttcacctccgacctcatcacctggggtgccatcggagcccgtaccaccgagagccagatccaccgtgagctcgcctcaggactctcttgccccattggcttcaagaacggaactggtggcagcgtccaaatggccgtcgacgccattcgctctgcttccaacccgcacagcttcctcggtgtcactgagcagggtctcgccgctattgtttccaccaccggtaacgaggcgtcccacgtgatcttgcgcggtggcagcaacggacccaactactcgaaggagcacgtcgagaagtgccaggagctcctcgagaaggccaacatcaagaaccgcatcatggttgactgcagccacggtaactccaacaaggaccacaagaaccagcccaaggttgccgctgatctcggagagcagatcgccgctggcagccagagcatcgccggtctcatgatcgagtccaacatcggcgagggcaaccagaagatggacattggtgtcaccgaccccgcttccctcaagtacggtgtctccatcactgatgcctgcattgacatggctagcacccgcgaggttctcgagggtcttgccaaggctgcccagaagcgccgtgaggccgcctccaactaaattcaaggtcgccatgccttacgcatagattggccttttctagcgatgccgtattcttcgtcctaaactccgtacatcctgtgccaacactacttcccccttcgcagtgacataaactctagccacaagcactgctgtctgtctgtctgatggcaatttgggtgatatgtgatctggatgagtacgctcgccccttgctcttactgctcctgctattctttttaataatccatgtgtgtttgtgcgtacgaaccttgttgctcaaataaatatactttgggcactcggtatcgtcgactcccctcaattctttctgattttcttcttctcgttcctctccactcagttgttactgtgatcctatacctttcccccccaagcctctccatttttaaactgctagattgttgtacatagttctaaagatgtacacaacagctagatgatcatggtgaagaactttttaaaaactagatcctcctttgcaagattgcaaagcatcatcatgaatttattttcatcttttaaacaagcagagaccccaaacatcagcaaattcatctttttcctttgttatccccgatcgttttgcctttgtttagctacctcacttggcctccatcacctaaaaccaacccctttaaaatcccctgtctggaatcactcattagtgctttacaaaaacagtggcagcgctcatgatcaataccttcctaggtctaatttcttttatctgttttctaatttatattttcttttctttttgaaaagttttttttttttttttactagtacaattatgagggact

SEQ ID NO: 84 - DNA, 22046 bp, unidentified
  misc_feature 1..22046: note = Fanzor polypeptide
  source 1..22046: mol_type = other DNA
tcaaaagtcgatttcagcgaagcgattgatcttctcttgtacttgctcaatatctttttggactttctttcgcatgtagaaaattgggcagtcacgcgatgtgcacaaaacatcctgatgtagactgccctggcatctctggcactcagtccaaagtctcgaaaaacggtcttcaagttcattagactcagctagacgatccaggtagattgattcccgattcttctcacagttacgacacaagccgcccttttggtcaataggggcacggcaaccaatgcactgtagctttttcaccgcaaaacgagcaataccgacagttgaagatggagttgccttgtaacgtttcaaagtgtgatcacccttgagaagagattcagggttcggaagaatcggtgcgaaaatacgcagtagcggtttcgataactggttctgtaagtagtagtcgaaatcaatgggaaggttatgctgcagaacccaaagaggatcttcagacttcatatatgcaggtgcatcctttccagccttgataatcacgtatggcacacggtcgcctactacaggtgccgaacctgcatctcgttcttgcatacggcgtgctagctcgacatgagcttgtttcacagcatagtcttcagactttccactgagggacttggtgacaatgagcaatgaaatatcgaccttgttctgaagcaacgcagaaattgtctcctttgcgtactcggtcgctccttgtacagaacggtcaacgagaatcttatgcagacaagtcccaacaacggtacgcacgagtccacatgtatcacgacgcacagtttcaagacctttggcatccatcttatcaggcttctctgaagagctgcaatagtacataccggcatagcgtttcttggcgaggagcaaaaaaggaaagtaaaccttttcaaactcaagggcgatgggtttgataaagagttctttggtcagttcctcagcagccttgagaccaagcttcatagtctccttcacagtcggcagtccaaatcggatcatgacagaatcagtatcaccataaataacttgagcatctgctgtgtagccatttgcaatggtgtacttcttctctacagattctttggtaagattaatcatgtcacgaccataggcagtgactgaagaagagatgggaatacagggtaaagcaccaattgtggcaccagtgaaaccgtagactgagttagcagataccttgagagcaagctggcgaccgttcattacagcctttacaagagggtcagttgcatttttcatgtcctttttagcgcgcttgcgagcagctaaaagctcctccaaaattgtgggaaggatacccttgttgcgctgagacgtaataaagagatgaccagatggggtcctcttatagtcttcaccctctttaagatttgcttctcccccaggaggaatcaaagtggtatagcaaaggttgtgagccatcatgattgatgggtagagagaggcaaaatccaaagtagcaactggctcgtcataaaagcctcgaataggctcaatcacagtagcaccttcgtatgacacgtcaccgccgccctctccgccagcccgagggagtacaggaacaatgagatcatgctgcaggcacttccggtaaagcatgctgagaaccttgatctgttgtccgcgagagaataggtatgggatagggacgccagtaacacgagccatctcgaggtagttgatgagaaccatgagcttttctagcagttgtagcggcaagtaagcatccttgagacagtacacagcaagacgacggcgatcctcgtcagtaccacgttggagatcgctaatgatggaatgatgcacatcctccttctgctgaccaagaaactcactagacacagcgttcaaagagtatgaagaaagcttgtgattacggtacatgtattggatcatatccataaccacgcgaccttccatctcaatttcagagttttcacgagtaccataggcagcggatgagaaagtcttcttgtttatcttggcgaccttgttacgtagcttacccagctgcgcaaattgggagtcaattttaagagcttttgcacgtccgagaaggtattcgaaatcgaaggactcaacgttgtaacctgtgacaacgtcagggtctgcacgctgtacaaggcgagtaaactcaagaagcagctctttctcgtcctgaaagctttggacttgagctccgacaattggcaggcaagtatcaagaacaagcaccaccttgcctcgagcatgatcttcgccctgaaccttgatgtaacacgcgatttggataactggatcctgctctggatcaggaaacacaccgcgacgacccatgcactcaatatcgaatgagaggatacgcaagggggccacgccagcccactcgggaagacctggatcatgggatataatgtcttcatagacagcatcaatttcgagttgacatcttgattgccgggattgttcaactcgagagcggaatcggtccttggggattgtcaaccaattactaccgacgatgttattgtccaccatatagcgaagcacaaatggtacgttactttcgtatgtcatgtagttcttttcactaaacccagggcagtgaaatccgttttgcagaatactgcgcgctttaggcacgagattaggcaagctcatcatgacttgaaggtactttgactttttgttatcgcagaatcccataatgttcatcttttcgcgaattacaacagccacaacacaggatccttccatgcgggctgctgaactcacgcgcacattgagagcctcgcggaacttgctaaggtcgctttcttcaaaggattcagaagggatatccgtgtaaaagtatggcgttacaccgtatatgtggcacatcacactttgacctttgtttgtaactccaaagatgcgaatgattggcacttcgccagttcgcatacctggcacgtgttctccagggaccgggtgtgactcaagaggttttccggagtacatgtccatgtcaatccactgcatcacaatgtcgtttttaagttccgtgccgtcgaggggtggtctttccaggctcattttcagatccgcatcctctgccgtggcaagttgcgacgcaaagtcagactcggtaacctctttctgtgagcctcctccatgcgctgtgccgctttgaggaacaggctctgtgatggttggctttggcttcttgctagttgccatggcatcgcctgcggtctttgtcctcttcgcctcgggcgagtctgaagtaggcactgcacccgatgctgaaggcgccgtaacgcgtttcattctatgtctcctctatcacacgcaactgactggccgctgccgccaattccgcgattctattttgcctcgtcttgtacctctgaagatgaattcaaaatccaaacgactaacctaacgaccgcaaaaagtctaactgtagaactaaccacctacttaccctaagtgcctattagcattattactaacaaacaggttcttagttgataaggtgcttgaagtgatatttctagcacctaataatcgccagaacggaagagttatattctgaaagttcctagtttgggtgtcacctgtccagctccagactccacccgacatacctgaggtttgggcaaacatatgtgttctacattcaattacagcaacacatgttctggagaacaatttgcttttattccctgttttctaaagtatgagaagcaagtttgtataagcaaccagatttataattgtaatttatagatggaatctaagacgttcatggaatagagatatccatgcaaacaaagtatcacttatatcgtacctaagatcaaaatctctatgatgctggtgttctctcccactttacgcttggttcaacttgaaaatccagatcactataactttttatctgaagtgggcagtcttatcgcttcatttactacaactcacggactacgtccactgtgcagagaaactacttctctcctcaacttatataccagagacaagagaaacatcaatccttattttctcctcgaagtatattaatatatctgtttaccatcaatatatgcaagactcaatggaaatgttcaattgagatgtttgccatccgttgctgctgtgtaaacgaattcattgaacgaagcgtcaggatcactgaggtaatcgcagtcagcatagtgctgaatatggtgacaactatcttgtttattattttaccagattaatcttaggggtctaggggtactaatttagcatgacttcgcacatctgccatgctgacgtgagctccaaaaaacctcgttgggggcagagaacataggagagaaaaggcaaaaatatggggaaagttatacatcacctcactaaaacattgtgttggcgagttttctgatatgctaaatctaaaactctttatgaattctgttactgggttttagcaaggactcacagtgatggctttcctctactttcactgttaataattaagtctactactactgggtcttcctcacaaggtatattcaatagtgttttatagttgcacatttaacaacgattgtatttgaatatttaaatcgaaccgatactaaaccagaccattctcgacaaattgcgaaccttggcaaagctacctaggtttctgcgcttggacaatcaaaatggctcatattagataagtaaatgaaaggcgttttggatagagaagtatttcccggttttcagatattggtttaaagacttagttactaaaaaatgaataatcaatcaaggaaagcaagcaattttgagcatcttctcaaaacttttgggaagtaagagaaatcgtctcaagcttacttatttgataacaactagtgcaaaacatctactcaaccgatctaaaaagattatttgaggttcttgctttagttgctttggtacttaaaagtattttgataaagggacacccccaaaatactgattcctttataaatagtcaggtggttcacagtagcttctgaattcagttgatatgaacacgatacagtcgtagcctcatttggagctttatctgctatccgcgtagctggagcatcaccagtatagatccttgcataaagagttgaaaagatgaaagatcatatttagaaaacattaaaataacacgaactaaggctcgtctgcatcgttcttgtgaatgattcggagtcgatagactggctgtaagtggaatatatagaatgagagttgggaggcctatatgtattggcgtatctcgtgaatttgctgattgaatatcaaccgcaaagtcttaaaaatccacaaattgagaagtgctacaattttgcttgtgagctctacatagcaaaccttcagctatgtggaataaattgagatagatctcaatggtcttgttagaacatcggatgttcgagtaaactagccaggattaaagaactgcttgcagaaatttcatcttgtttggttgaaaacagaacgtcgttagaacgttccatctgtactccatactaacttaaggttgttgttctaagcgcgagtttttcgctcagttggaacagagactttggcagccctcgtgtccaacgcaacgaaaccgaaatggtctttccctcatcgaacctactaggcaatacttagcatgtgtgcctttgtccaaacgtcgtactttaaccgacttctaacgccacagtggtgtagctcctaccatagccattccaaccacccccgcgtttcatccgaggaaacatgttattcttataggtgttcaattcagcgagtagtcgtctgacttgtgcttcagtatttttttaaaagttgattctcacttttccatcgtaaaagattaggtttgatttgaaagaaagttaaatcttgctaatgactcgtattactacccctagtaggaagcaccatgtcaactattaaattcaaaaatgttttcttccaaaatcatatcatatcaattacgaattgcaattactaactactaccatcatgattgtttttattagttaaaagtttttaactaaattatagtttattcacccttctaaaaagacctcgaattctgtaattagagttacagcaaaaaaggggtttaagcgaaacgtattcgatatatcaaaccagttgggtatcagaagtagcttgatactctctagaaagctagcgagtagatcacgaatgctggacgaggcagtcccaacccgtgagtacactaccaccaccccactggcgcggcctttcttcgcaagcttcacgtttaaggcttgcgatagtctctgcgtggaagggtataccagtataccatcggctactcagttgattgaataacaatagatgccccgtttggttatatttagctcgtatactcccttttgatcctctgtccattttttgaggagagtttgtaaacggcaccgtggcagtttgcttgggctcagccaagctactgataaactagtcaaagtcaagtgatagcttgacgaactttggtagtatgaataacaagagtaaggggtacccttcttgtgtcatcattgcttctattacagttgctttatttcttcttgcatgtatctcctctttttggctagaatcacctcttactctgctggcaccaaactggtcgataagagcaaaacaacgagataacgagaatgacacaaaatgcttaagtcctgatggttgcggtgggaaacctccgatctaaggaagaagtggatgtcccatcagcaatgtcaacaaccctgattttgatgacagagagaacacaaggagaaaatgccgcgggaaaagatgtgcatattccgtcagcaacgccaaccttgatgtcaaatggaaaacatggaggaaatgttacggaaatttcccaggtcaactgctcattttctggtgattgccagaagtggccctatttaatggcaacagatgcacgcatgcgattggcgcgccaagaacaacttgtggtcaatctaatgcatattccaaagactggtggaacctccttatataatgaagcgagaaagccgacgagaacattttcaaaatatttttcgtttcaaaaatcatcgccaggaactgatgaggtctgtttcttaaatttaaaggatgaggagtttcctatcgcgaccatctttcgttctcctcattcgcaaactttgtcacagtttttagagtgcaagtatgatctctggggccagcatgtaaccaggtttaccagtttccctagaggtaaaaccgaagattttgtcaagggtgtaactccagattttgatgcttggttagatcatttcattgccgccccatccacaagaaactattttagatgctaccaccccaaaaactttcaaacccggtacctttatggtaaagagaaacactatcatcacggttctatttgtcatggacccacttatgagccatttcctcgaagtaaggagcgaacacaggaagattattaatgagctttggtacattggtctcactgaagacatggaactttcaatttgcctgtttgaatttcagattacaggagcggtttcggacaggtgcctgtgtaattacaagacttcaaaagaatcagtggggcaaccggcaattacacatattactcataacgttcctcggcatcatgtttctgcactttctgaagcgacattgcagaagattgatttgttgactaatgaagatgtctttacatacaatcatgctcggaaaatattttacgagaaggttaatctagcccaaacctacctcaacacgtgtttgaagggtttcggtgacctttcagattccgagaaattaaagctattacaataattgattcttacgatactttttttaattcaaacgaagtttagtttaatacatgagttatgcataattgagacgcaagtgtctgggcctagtgttattccctttatttttaacaggaaaaagaaaatgataagctatggtacctctgaactcgtagattgttcaaatgtgatttgggtcgagggttaatcaacttttcactcgaagaaggaaatatttagcataatctcaaaaagtctaaaagaatatatcatgttttgatggtattagattcgagataatcagcatcaaatgttttaatttgtcatgtttgccagatatgaggttgtatacctggtatacacatattttattcttatggcgacctattctcgcaaggtcgaatagcgcttagcttttcttgtcaagatttgttcttgataagttaaatctgagtccatgcaatgcactgtttttaatgcacaaaactattcactgtttgtgcttttgcgaaatattttggaaacaacctcttgtcatcatgcgggtgacttttacaagactacctgcttgtactaattgcatttgaaaagggtggggtaattttagaattataatcattatcagttttttgtctcaaaatgagaataatacccagaatccgctaaacaaagcaaatcagcactgaactgcaacagagaatattatagaattataacaagtaggactttaattgagcctatttatcaaaggctcggtttcaagatctacagcgttcaatgatagcactctcatatcccagtgttgctagctacccaggtggaacgaatatttcgctgggaattctattgcatttctaggcttttagattcataaatcagggggtgcaaggatcgaactaaggtgtaaactttaaaaaaggtatagaattacttaaatctaatacggcaaacacgaattctgtgaacctaggcaatcgcacagacggtccgagcaagcaagcatagttgtcgaatatgttcggctatgctaaaaatacaggaagccttttgtgtggcagtgaagaaagaggcaaaactaattactgcgaatttcgtcgagtggataagatcttctcaatccatagatttccaactcagaataaaggctgactataaatcccttgaccagagatataaaaattcaggcttgcacattaaagtctttggaaactagaggatggctgcgaaacagctgtgtctgagatcttgatattttgatttgtttacttgacgtttgtataaagttgtgttcattgatggctttgcaatagagtgaaacagtcaccaacaattagcgaaacatggagatttgttgcagtgatactccatgcagagggtgaaggcagcaacgcatcgtcagtatgagtatggacacagcaatctcaaacgcgggtttgcagctacaaacaaaagttgaagccacaaatcagatggatatttgattaaacattggagcctggaaattttcgtaagcttgattcaagtgcttgctattggctcgtggcctgtgcgacgtgttgatatatttccgaagccaggaaaatatcactgatctggcgtggattcttttatgaggaagtgtgatcatcaacattatttcaaacttatacaaggcatcttgcaatgaatataacccaacacagcgaaaatgatataaagaaaattatatgattcatatacaatccccttttgatcacctaggtataagacttatgttcacatacacttcaagagggcgaatagcttattagaatgcaaaaggcaggatattttgaggaaacaacttatacagatgctaggcgcagatatttacatacgtttaacactggaaaggcgtcccctttgtgtatggagattgtttgcatatcgacaaaatctaagtgagcgctgtgttgggatttactttgtaaacaaaatgaagttgtcaaatgaactaacacccctttgttaaacatattgaaatattattacctgaccctatcagtattgatcatataagggaaaaacaaaaaacaaaaacaaaaaccgttaaaagttcgataacttatatttcatattaatcatatattatgtttatttaggttattgataagaagtggaggttaggtaagaaaatggggaggccgaggaaccgtcaagctccaaacactgcaagtggagcaaacctcgaatacaaaccagcaaagttctttcaccggaagtttggggtctcagcaagcgcccttcggggctgggccgatggcggatgcgtgcgctgcgcgcgcttccccggaggaaagcgcatctacgccagcgacgatgttgagcgcatctttgatctcggttccaccggccgcgagcaacgcaactctggatgtaccgttatctacgccagagtgtcctcggccaagcaaaaggaggacctcgaacgccagattggcgatctccagcgcgcctacccagatgcttccgccgtctacaaagacatcggtagtggggtcaatttcaaacgccaaggcctgtgctccctactggacgcctgcgaccgcggaggaatcggccaagttgtggtcatgcaccgcgaccgacttgcgcgaatcgcagtcgacctcctggaacaccttttcgaaagaaaaaatgtcaaactcgtggtacacggccaagatgcacatgccggagactcagacaccttcaccaaagacctcctcggaattatcaccgtctttgtggcatcgcatcacggaaaacgagcagcgcaaaatagacggcgacgacgcagcaaggaagaagcgaactcgcacgaaggcgcgcaagaccaccaagaaagaatatgaccttgtccgtgccagaaaggttagggtataccctactaaagatcagtgtacacaattgcttaaatggtttggtgtcactagaagagcctgcaatactggcgttgcgtttcatcgagacgtggcgaagggcgaggaagaagccatcaaattgcatcaagaagcgtgcatcaaaaaggattccaagacgaagcaggttttagtagatgaagatgggaatccaaaaacacatggggccctctatggagaaaagaaagccgttcgatctaaagaaaggaatggtgctcctgaatgggttctcgaggtcccacaggctatccgtgattccgggattctggatttcttcaaggctattaactcgggacgagccaaaaacgaagaactcgctgtacaaaagaaagttcatgagcaatctttttataagtttcggaccaagcgtgatgaatcacagattttcgaagtgaatgcacgtacctggaatttgaagaaatcaaagacctccggctttctaaaaaaaatccgaacacgtaaagaaaagctccccgaccagatttcgaacgccatgcgtgtgcaaatgaatcgccttgggcatgtctacttctgcttcttacgagaagaaaaaaagcgtccaatggaccaggcacccaaggcgcaccatggtgtcattgctctagatccaggtgttcgctcgtttcagacgatgtatgacgctgatggccgcgccattgaatggggcacagggaaagattttagaaccatattctatctctgtcgccgcgttgataagatccagagcaggattgataaagctcaagaaaataataagaaaactgcatccagtgataaagacaatttcaacacccccttgaagcgcgcattctatcgcgcccaactcaagatcaagaacaagaccactgagattcatcgcaagctcgcactttggctttgtgaaaactatcgtgttattctcttgcctaaattcgaaacctctaagatgagtaggaagatggagcgacggatatccaagaagtctgttcgaatgatgtgtcgttggtgccattttgggttccgtcaggctctcgttcacaaggctgagatgttcccgtggtgcaagcttgttctttgccaagagagctacacttcaaaaacatgcaatgagtgcggtaccctccaccataaactcggcgcatccaaggttttccaatgccctaatcccaagtgcaaccatgtagcagaccgtgatgtccatgccgccagaggcatccttttacgctacctatccaaggacatgattttaaaaaaaaatcatttcattgagtcgcgggttagtctaactagctcgtgatggagtcttagctccttctatgaaatgcaagttttgcaaattttgtagtttaaaatctaagagtacaaatctcccaaataacctattagcaggtactgccacatagtgagttcactatacaatcctaatacaagtctgttgagttcaagcagttaaaagatcgcggcggctacgatcctcgtttgagttctgattacaattcgtgagcactccagcaggagcgcgactttgattggtttcttgccagcttagtagtgatctattcaacaatttcactatctttgactagcaagctcagagacagagatagggaaactattgaggacaatcgttacctgctcttgagtgccagttcttctaggtatctactttcacgcaccacgggtgaaagagtttggggagacgtattgtatagaactactgtcccgttcaggaactgagttttgttgaagactgagctatagctcttacaaaccaagaggatcctattggaaaaatgcttagctcagggataatttcctttttcctgctcgttgcatctttctggcgagaaggtctcggttctgctcagcaatgcaccccaattaatcatcctcaccatgtacaagaccttccaggctttgctgaagaccaagataatggttttccgtgtatgtttgccggtacgattgagactgcagcagatcacaacctcttctattggcttgctcgctacgaaggagaggatgatgatgaggaagtgcctttagtgttctggctcaacggaggccctggagcatcatctcaactagcgaacttcctctttcatggacctctgcgtgtgaaagcgaatggaacaggcgtggagcgcactaaccagacatggagccgccttgcgaacgtcgtctatctcgatcaacctgttggaactggtttctcatttggcgaaccgcttttggataatatggaagaggtggcttccgaatttgttacattcatgcatgcattttataagttgcatgagtggagtcgtggtctccctctgtacctaactggtgaatcgtacggaggtaaataccttcctgtctttactcaagcccttcataaggcgggcatctctgtgaaagctacactcattggcaatccactcgttgctcctctgcgccagcgtaatcgtatgcatgtgctgccaaatgcattaggcctcttagattctgcacatttgtcccaaattgcttctctggaacgtcgatgtgaagaagccattggaaatcatcaagttatgagtgaggatgcatgtaaaaacataacagcatacatcgagcttgtcagtgcaaatgtgcatgtgtatgatgcccgtcaatttgactatgacttcaaaccgcttgaagacgtggtcctcaagtaccttctcaatccggaagtgcataaatctattcacattgatcaaagtactaagacaccagtgtttgaaatcagctctgcccgtgtggaccatgccttaagccttgacaatgttctcagttacagcaaagtttatgaagatcttctcagtcgaaatgcgaagctgcttgtatatgctggcgagtttgatactaaggatgggccgtatggtcaggataattggcttcgtgacctgaaattccctggacgggaccaattctgggttcaagatcgaaaaatatacaggtttcctgatggaagggtaggaggctactttcgctccagcgaaacattttcctttatggttgtaccaaaggccggacactatgtgccaaacaacaactttgaaacttcatttgctatgttagaggattatattaagcatgggggtcttcaatgtcacgaaagcactgggaaaggttgttcagttgcctctgatctctgtggatcaatgcatgaatgctctggacatggaacttgcaattcagaaacatttggtcgttgtcaatgtgatgaaggatttggccttgaggattgctcccttcaaataacgcgcgtccatgataatgacgaaaccaacacatataagccaggctcaattaaaacgagcgggattcaatggtttggattccaaatttatgcaaagaccgtgcgcatcgactcggatccatgttcactcgatgtgttcatttctcgtaatattcaccatcaaccaacccatttagaacacgatttggcactttacaaacagactcatttgcgcatcgaccaagaggccctctctctcccgccaggctttcgtcttacagttcgtattagtgggtttcaagaacagttcaataaggcccttgacaaccatttcagcgttgaacctctctctgatgagtctagtcgtgacacattaataacgaagccaacttcagagctcatcgccgctcgggatgtcatcgacatcaacagagacagcagaaccatcgtcagaggcagtatcttccgcagaggacttgggggggtcaccaacctcgctcgtcgactttttaatctcgtctttgtcgcccactgaaaactccgtaattgacgtacgtaaggctacaatctgtttttgcaatctttccttttccttgtacgcttcccggagcgatgcttcgagtttttgcgctgtactttggatctcgcgcctgaactttgccctcgccagatactggaaagcatgatcatgaagcgagggcaaacttgcgtaacggagataataatcatcccagagcacaacttttctggccaccacagctgggtgaggaagcaatggtatcttttcctctagctcatttggcattggtgaatacaaaatgttcacaaaatcgtttttccgttcggccaggtgatcccaaagagataccgtcttcagaggaatggcctcacgcatcctttcagactcattatcgcataaaaacgtaccatacttacaagagtataaatgtttcaaaatgcatataagatatgcctcgttaaactcaaagcatggtgcatattggttcaggagttgccatacgcagtcaataaattgtaggaaacacggcgagcgctcctcggacccaccctccattccatgccctgtgcgtgacataaagcggtatccaaaggaaagccactccttttccaccagaaccgggaagccctctagtgttcggtaatatggatctaacaagagttgagcgagagcacaaacttgcgaggtcctgtcccagccatctgaacaatgaacaagaacagggaatccgttgcaagctacatagcgagcaacagttatactagcattcagtacagcacgtaagtgattaagccaaccggtgttctctacattagctaaccagttgtgtccggggctcgagacgctcgagctactagagcttgacgcagaagtgctggtcacaagatgcattagcttatccatagatccacgaatcgtgtgaatgttctgaatgttctgaaatgatactgaggtatgcgggtaacgtagctcgtcctcataacccatacctttagctttattgccaagagcattcttgtaaggtctacagtctacaatgcgggcagcaacgctattagcacgttgaaggatactggaccagagctgttcatctgctcgacatgtgttattgccaaggcccaccttaggttgactgcttctccaaatagagcctttgttatccgcattataccatgataatgcaggaattctacctttgctgcgaaattgagcgacaacgcgcaaatcttcgtcgctgattgaagaaggaattccaagcagtgaagggtagcttgcacaaagttggtacctttgattaacctcactgagacgccatatattttcgtcgtttccactcgccccgaagagtccttgcctaatgaattcccttctaggatcatacaaccgccatccgcgctgctcgctacctttgccaagcacgaaccggccgtgttctaatgcgaacaaccaacgcagaccttgtccttcgctaacaggaaaagcagacatacgcacgaggtcatgtactttacttgcatcagcatgcgatgcgaatctaaattgtagcttgcggaaatctttacaaaccaagttcagcatgaggccgtcctttcctctactactaacgctttgtgcacttgcacctcgtgatatcttatcgatacaaccaaggggaacatcgaacatgctatcgtcctgaaagagccaattatggctttcatttttgctttgtgaagatgggttaaagtacacgcgatagtttgtaacgtgaagttttccgtgcacaatgtcctggttcatagagacgaaagcaacccggtcgatattaaccaaagtcttttctgccccaactggtttatgtgatagctcggcctcctcctctactgaaagattttcatttgtggcagcccccagttctccaacgtttgcaattgttggcgccgtcatcatatttccctgacttccatgttcaacaatattgcttaccgtcggcggtatcgtctgagcttgcaacggatcatgaccctgagctccacgccctcggccttcagtagccttacgattttgacgctgtggctccgcaacccttcgttgtaccggcttcatgaagtgcatatctccagaaactcctgaagttcttgcctcacgcgaggcgaatctttgctgctgtgagatatgctgtggaagctgctgttgagcatggttcatagcagctagagatgtcacaggtatgctgccaattggagccgtcacagaatacgacggggctcccaaagtcggattcgtggagctcccgtttgaaagcaaggatttctgcaaattggcgttattattgtcaggatctacaatattgtcattctcgagaagcataggaacctcggaggctgagggtggcgggctattaaagggattaaattcctctccctcgtcaaggcctggctcgctaccgaggccggagagaggatcccaatctacctcggagcgcgcagactcccgctgggcgctgcgaccgctgctcatggtgcgatgtacaaggcagacactaagcacagacaatatggcagcgctcaaaagcttttgagaaagtgcaagcgacaatgagcccagggaggtggtgggcacaacgaaagcactggccaacgccgaagcgtaggcggagcctccgcagtatggatttattgattagactctgattaaatactataatcgttgttcttcctatttctaccgtagcattcctttctatttgatcagctttgtataggtcatataggcatacattaatttatattctgtatgaaaaaatactttaatcgagtttacattaggtactactactggagacttggcgggttgctcggctaaattgtgaaattattttaatgctggaataatttatgtacatacctttgattgatttaccatttttttttacgggtttcatgcccatgtgatatatttttttatacaagaaatgcaggcggtgaccgaattgcatcaaacgcttctgctataaacctcggggtcttcatggcattctgcaattctacatgtagccctgctactattgtctttcaacagtaattttcggatttgaaaaatcgctgcgctaatttacaaattatgaaagcccagtctatatattgtaactcttgatttataaaggttaatttttgatccttttgaaagccccggcaattattaaaaacgattgaaatagaataatactatttctgaactttctccaattgttcgggagcttttgaatactctaggaagatgacatgccatagctatgaccacattgtacacaaatttagtagacgataacattcataccccgggtcactaaattcaaatcgattcagaacttctgggctacagctaggttgatattgtagtgaatgaagacgtgagatgaagattctgattctgacgatcgtagtcaaatgctaaccaagaaactactgacaagtctgacaatgacgaagaatatacataggcttcttcatgtatgtccatgacataggctttaatccgtatcttatcgcgaacaagttttgcaagccagtcattcgaatagagaatatgattacctttgaagaaagtaaaggcgtcgttttcgcacctgtagctcaaattagatctttacctgggccatcttgtcttttccaagcttatgtaaaattttccactgctaattagtggagtgaaacttcaattagcaggtgcgaatctcactcatgaatgtccttaaactacaaaagcaaaccaattgtagatagatagacagatagatagatagatagacagatagatagatagatagatagatagatagatagatagatagatagatagatagatagatagatagatagatagatagatagatagatagatagatagatagatagatagatagatagatagatagatagatagatagatagatagatagatagatagatagatagatagatagatagatagatagatagatagatagatagatagatagatagatagatagatagatagatagatagatagatagatagatagatagatagatagatagatagatagatagatagatagatagatagatagatacaattagactcggaatagttggtaatgagggataaacatttatcaaaaacactgctacttcatgctaagtatattaatacaaggagacacttcctgaaaaccaaaacaatttcatttctttttaaagtactacctgataatacagacgagtccaaaagtggcaacaaacatgaaaggtcgttgcacccaaccagcagagtttgcggttcctctcttggctgcgctttaccctagctatttttcataccgcagcaacgcttgaatgccttgagaggattgccgtgtgcttgggagggtgcttggtcggctggtggttgtggtggtttggtccacttgtgtagattcttggagattgctgtcttcaggtgataagtttcacacatattgctttccctattcatcctggtttgtcaaaactcatctcatagagaacgcaacagaaaagaaccctccctctgattgatttagaacattgaaaggagatataaccaggttggcccttgctcagtggaaagtagtcaattggcttagttgctttgtgcagtaccaacatctttcgttttggtcaaagaggtttagcagatagtacgtacaaaataactcgaggttcccagaacttcttacctgttaattttagagcaaaaatctagaagttcgttttgtaaagctggatcaacaaaatgctgatcctcattgagtgtgctcaactcgcagctaggcttgctcgcgcgtactgggccattgccttaacatccacagccgccgctgtgatttggaaggaagctgcagattggagtcgctatgggaagctacgaggtcttgtaaattctcaagagaccaaattagatgatgtcaaatcgattgggaatattattcgaaattggacagttccaaagcggtggtttgctcacttctacgaggtgtgttggcgatgggctttgttgctcatgattgcaacttacgcgggctgggatggagtgattcttcagtggatggagtcagtcgtgtctgacaaaggaattttagcatcctgttttggtatagtattgtgtaagtcaggacaaggctcgatcttgcgagaaactggctggcagcgtccttctacaatattgcttctcttagttctgcaagcaagacgacgtttgtatgaagagaacaacatgtttgtttccagctcagaagctcgtatgcatgtctttgggtattttattggtcttacgttctacctcgcctatggatggagcacagtgttcgactcttcactctataaattcaacaacccaatgtacatagaactcggagagaacatcgatgttataggcttactgggcattatcgtttttatcgttgcttcctatgaacaacaccggtgtcatcgaattcttgctggacttcggaactcagatgtgacctcaatggttcaccagaaaaggcaatactttatgccgaaagggcgtctttttgaatatgtatcatgtcctcattacttcactgaagtcctgatttatttaggcttagctctaatggatgtccacaacgtgtcgctatggcttgcagtaatgttcactggtttaaaccttggcctcacagctgtgcgttcccactcatggtacaaagcaaagttcgaggattaccctgcccatcgaaaggcattcattccttttattgtataattgtaaatctgaaatagcataatgcatgactggcctgtactttcttaacgtctgttgtgcgcatcttaggtgtgtctcctaagcgcttcattgctgagtcttcaaaaaataaaacgtttacaaagctattattcagcaataaattacaacaccacgtaattttagtttccttttttataaaaaatatatatatataagtaacacttttagataaagcccaaacaaacaaacaaacaaacaaacaaacaaacaaacaaacaaacaaacaaacaaaattcctgcttagctatttcgttatttcctactatatgctactaacataaattcaaaattgagctgctggttctttacaagcataaaattgagtcttcggcgattcgctgtttgctaatacaagtgcagaacaaagtctctgagcttttatttttgctgcgaggttgtcctttgctttgttaagcttatgtaattcgaagtatctatggcaaaacctgcaggcagcgaataacgtttgatggaattattttttcagaaaattcaaccatagatagtttttgtttcacctcttttcatatggcctttcctttcaatacaactgacgaagaagaataaaaattaatctgtgtatgctatgctatatctttaaatttggaatttgatgaactttaaaaaccaaacgggaaaatttgactcgtgagatgaggcgaatactcattatatacgctcaggttccagatccagaagtcttttgctatcttcgactgaaataagagcagtggaataggattatggtagcgacgattcatatttcgactcgaacccctctttcccgtcctttaattcctctgatagagcagcagtgaagaaggagtgaggtctttccagcagatcagtcgggagaatgaaactcgtattagtcttcctttctttaagaataacctcttccatggtgggcgctaattagttgcgatggttataacgatggaggtctcatataaacaaaaaataattaacgtatgtctgttgcacaaattatagataaaatcattctgaatttatgatgtaatacatttatttaaagaataaaaggaataaggcccaagatgacgtcgctattccctatatttcatgctccatcagatttactccaccttaaaaaacaccaaaaagctgacagctcaatttgtaacaaacaaagagggcgaaggacgagaagtgcctgacgttaagcttgttgcctcgcgagtccgtaagcacagttcttcgggcattgccaagcagtttaccttaagcagcattacccatcgcgtattgaacaagaggtacaatagtacgagcagcacagcttcagaagacagcatcaacgattgtggcaaaatcccattaccagatctcaccagggacccgcaaatcctacaagatatgcgcctaggccagtgcacattttgaaggtcgcattttttgggggaatgcgcagtgaagcatactgctcatgtaaatctctcatctatttcgatggtaaaacatgtcactgtgctcaagtgatggccatcggagatatcaaataaaaactgatacgctttatacaatattcaggtggaaagtcatgaatcatggcgttgttagcaaaaaggttgaagccatcctcaacaacctaacagtagttatcattacgagcaagtttggtactacattggatcatttggaaagaaaacgcgacggcagtgtttctctagtctctcatattctctgcgttttgtcaaa

SEQ ID NO: 85 - DNA, 12002 bp, unidentified
  misc_feature 1..12002: note = Fanzor polypeptide
  source 1..12002: mol_type = other DNA
gcacacgtctcgagacgcctgtggaggaggacgaggaagagagtgcaagttctcgacgacgaagtttgagctttgacgtgagtgacgtgagagtccgaaggcggtcaacaactcacccgcctacggcagccgagtcaaagcttgctgagctcgatctcagtgtcagtctgagtgtggttagctgctcgagcgattacttggatgaagatttctatgagggtgaggcaggtcaaaggaagacccagccgcccaatgtcttctccgagatccccgagttaccggagaccacgaacccgctgacgagttcgctacctccgaagccgtcggtcccgccgatgaacagtcaactgcgtcaacgtcgcgagctcatgcgtcgaatgacagagctgcgcaagaatgcagagagcgcattccagataacccaacggaacacggagatgatgcagtgtggcggtatgccgttgaaggcgcagtcggtatgtatttccacggtggaagtgggcatggacttggattaaacagacttcctcatagttaagagaactctacgcatctagcataacttcaacatcggtaatcgagtctcatcgtgattgttcagtcggttcggaaagcaatgggagatagaccaccgggcgaagaagtgcttgctgtctcccaaaggaggcagctcttcctagttgccatgtggcatcaactatcaactggatacaagcagactcgaaaagataattgaaagcagttcacggatactttcgagtatgcgcagacatcatcatgcaacactggtcgtcgataaataacttgcacaagtttctcttcgttgctcgactgctcagaggagactgacaagtatccaccccgattgtgtatgggcttaaaggaaacagaattcgcgtgagttcgttgctaacaggcagactaagctgtgcacgaggcttgtgccacaaaccagcagcgcaaagcacaaaacagtttctgctgctgctgccgctgctgagaacagccatgcacgtggttcatggactaaacgcagagctgcaagcacaccgagtgtggacgaacaacaaactccccatatcgagcgcagtctccttggccttgaaagcaactacacaccggcatttatagtgtttcgatgtgttagatttccgtcgccttttcgcctctggaacccccatctgctcctgccgaatgcgctaatccaacctcttcgtgccgtagagacgacagacactcggtttctgcattgcatttgcaactctgtcaacgacgactttgccagcaacagttgaacgctctcgtcgggtcccttgcgtcgcaagggcttccagtcatcttcttctccacaaaggcggattgtaacaatctatgtaccccgagcctggaagcgtcactttcttgatgacggcactcgccaactcgccgtcttcctcgcacttgtatgaacatctactccaccactgcggtactatcgagcaatagcaagtgattcgacaggatggggaagttcccgttgtcaagcgaggcgttcccgcccgtaacgctatcaattgagcagcaggacgctctagagactctggcggagcagcaactggcgatggccgaggcccagctagaccgccacattctggacgatggcgtggtggacaggaggcgatggaagcctctcaagacgagagaacgtatctccgtgttccgagaacggtccagcgccgccttccatcggcagtgccacggtcacagccagttccaaccatcggcgtccgcggtcttagggacacaaaacgatgatgactggccactgccgcaacttctaggggtcggagttctcaaagggacgctggaggacattatgtatggtatccacacacctactgctgtccacatgatgaccaaggcggtgatctcggaggacgaagtggtggacgctcaagtgcttcaagaactaaaaggccccaccattgcacaccccttccggtttcttggtctcaagtggctggtcaaggcgcatccggtggtgatgggggcagttgtgctgccccgggacatcgtgtacgtggaacacgcaggcatcaagacacgtgcggacggctccgagctcggacactttttaattcactcggtggagctaccgcagtatccggatcttcgacaagagcttggactagtgcgtgcgagagtgtcctcctgtgttctcctgcgtcagaatgccgatgatccgaacgaggtggacgtatttatgactgggagagtagctgcgcagggccgagtgcttgacagtctcgccctcttgtctaccgctaatggtctcacgtacttttggaaggctggagtctgcgctcaacgtcggaagttgacttggcgtctgcaacacaaacgaaaagcgccgcctgctgctgcttcagtatcgccgtcgaagtgccccttgtgtatgaaggggattgatcgtaccttctgctcaccaactcgctgtgagatgtgtggcatccgaatgtgctcgcgttgcagtgtgactcagaaattattgtttcctgggtccttcggtagcaaggagactcacttggtgtcggtggagctctgcactccttgcatcacacacaccacagaagagagtgccatggcactttcccgccaggaaattcgagccggccagtatggcgcactcacgtcacctcgaggtacgcgacatcgctcgctccgctcggcaggcaaacctcgccgagctcatttctctgcttcggctggccctccgttgacgaggaaccaactggaaagtaaaccgaggattgattttgcagcctccgctgaaccatcagagacgaaagctgccgacaacaagtcagtgacgagggaatccctgcaagccctggacaacttcttgcaggactcgacccacaatgaaaatcaacataaccgatgggaaaattcacatcacaacaaggagtatcaaggccgatggaaggagctcacaagcagcaaagaggaggcacacaatctcttgacacctcgacagacgcccatgagcattgaggacctagagtgccccaaaattgataacaacgtggataatgcaccagaccagacgccgccggcatcagacacgagcagctccacgccattgtggcagaaaatgtcggcgttgcgggtcatggccgagtccacgtaccacgacaccaagaagacgacggaaaagacgctgcaattaagtcacagcagatgatcgccgacgtatgtatcgccctcaacctcaccatgcattgagtgagggtagacgttttaatatttaactttctccaaaactccagaacaaattggaatcaaaatgaagcgtaaagtaattgctctcgttgctgatgaacgtctcattgatcagagtttatgataaactcaccgatacgtgctactagataccatgtcaaacatccgttgccaatcattggttaggagtgtattattactgatggtactgagaatgtcctactggtccctatgcctgaatatatggatgtggctggctacgcattcccgcaacacgtacactgcgagtctttccagccactttttttctgtctacgtttcttgtgctactgacctcgccgaaatgctctcgaccatctcgctccgtgcttccccttcagtccgctcttgagcagttccagcatattccttgctgcgttgacttccctgttccagaagttggcttttgtaatgggtctggtcatcccattacattggattgagggctgaaacaggcattgcgatccgcttgagctctcattgaattctatatgctccaaaaaaaaataggcaatgtggacattctcggtgcctttcatactaataacatgctttgggtttgtcatcgtctctgcaacttcaacctatgagtgacggtctgggtcgtaataaagagggtatgaaatgctgagatcatttattacaacagactgcgctagatacaaaattaatatcatcttttttcagatcatataaattatataatacacagaccatcactcacaaacgtagtcatttcgctagtattgaatcaaaaaccagcgtgtcatacccacttgccattttgcactcttccagtaaccagcaatctccatgccgcccaacgcgctctcatcctctcgtaacgagagcccaactgatgctgtggtgacctgccagatctgctgggaagaactcacgcggaaggaccagaagaagatcaatcaggtcaccaccaggttctgctccgcgtcctgccccgcagtgctgtgcgcaccatgtcttcaacgacatctggaggtgtccatgcaggtccaatacactggagcgttgcccaagattcgctgtccaatttgcctcgtcacagtgaacaagcagcggtggagacgctttctgagatcggatggcaagtacctactggagcagtacagcgaattgtgtcgagtagcatgcagtctcacttgcccgatctgccacaatgctcagtacacacatctaccggaatacttcacagaaccttctaggactaatattgcaaacgaaaatgttctcacccttcgaccaagcgacaaggctcgaatccctgagctccaacgtgtcgtgcagcaattcagtcgacaccacaagacaatcaccgcccgagatgtgatccgatatatcatggagcgtttcccagagtccaagacaatttgtatcatgcagaaagttcttgcaagaatcagcgacgaggagcggcgggctacactattgcttggataccacagcctctatcgccaagctgtcactcgctgctgcagggcagaagtctgcttcaactgcaagcgtcggcttttcggagaacagtgtccatgcgaagttgaagacgacgaagagctcggtgagactaactgtcttgagtgccgatcctgccgtgtgatgttggtgaaagttgacggctgcagcagtgtccgttgcctgtgcgggttcaatatgaactgggacgatgagcaacgaaccaacaaactcaaccgtcgaggattactttcagtcgatccatttgatctgaccatgtattactggtgggaagtctggcaaggcgcttttcgcgacgtgaccgaagaattgttgctcaaactccgggcttcagccatgctgcacagactcaacaagtcgtgtccgatctttcgagaatcgctgctcagattagtctggaaaaagcgatttcaccgcatcatcgagggttcagagcaagagttgcgccgcaagttcgtgttgcgagttttctctacggttaaagagagtctccgaactcttgtctggcaccgacgtcgctttcaccggaagctattggcagaatgccgtgttgcatttattgctcgtgctactcgacaagctcatgtgatcaagcccgtgatgctcaaatttatctggtcttgtcgattccgtttccaagtactgggttcattgtaccaccatttctacttcatctcgaagggctgggaccaacttaccgagaaggaacgggaggtggaagaggaaaaccttgcttttctcagcatcggcctcaattgaagtcattccgctggcattgcgctcttaggctgaagcaatatgctttatagttagttagtagatgtaccactggcgaccagcgtttcagtgctcgctctttcatagacactttcgtgccgaatctgatggagcaccttgtctagattaacggcgttgagctgtgccatgggattcaatttaataatgtgcataaataaccaattaccaccgaacggcttttccatcggagctagagttggctggtgcgaggctgatctggttagctaccataattgcattctcttcgcaaatgtttttgaatccctcggtcgcgtactgtccggattgccacaccatgaatgacgagacgtctgtgctcagattcgtgtcgtagaagtcgatcgatcctgaggatcctctgctgctaacaaaatgtataccttgacattcgacagatatgtagaacgccatcctgccgtcagacgagatgccggaccacaccgctgaccgactcttgttgtcccaacattcggtcagcgaaaagcagcgttgggccgtactgaacgaacagctcttggatgaatccgagtagttaccgccgctacgaatgttgatatcccatgcgggactcgccgactgcagtaaacaaagttgatagccaatactcccgtgaaaattcgagttatgacagcattatagaaattgcggtggaagtgcaggcaagcttgcaacatcctcggccatgaaatagaaactaaagccgtgaaatcagtaggacgcaaaatggatggacggcagtactcttcttgattcaaaaaggtcatagcaatatggataaggtagatggattcaaaagttcgacctagaatatgatggattttcgagactgacggcgatttttaaagtgcctcaagcatccgttcttaatgcgaacttcgatgctcgttgaccaacagctacttgctagtgctctcagccagtcgatgtgaatttgacactgtcgtccccgcggagatcgctaaacttccagttcgacagaccagcctcctcatcgtacaggatgaaagtgtacagcttgaaggcctgattgaaacttacactccccgctttgtttgaactgtagacgatgccaacggacatgcagttaacgttatcataaaacacaatcttggtgttggacggaagactcgtccaaattgcgtagaagacggtgggaagaaggaccgagttgaacttgtagcaacgctgtgtttcgggaattttgtagatcataatgcgtgtcttctcttcttggtagctccacatctttagtatgacgtctgtcgttgcttgacaagtccaggccatacagataagcactattgcaaggatgccgacaactgaagggagcatggttttgacggtagctcaatcaactacaagtgtggaataatacagagtttttttcttgcaaaatgatttatgacagcccctcaaaactccgtcacattaagtctgacggtcctgcacattactggggtagttgtcgaggaaggtggagggaactccaacgccacaaggtcgcgaatccgtgaaaccaaaggaacacggtggtgcggcttgaatttttgctgatggacaaactgaagcatgttgaccatggacaatggaacatacagaattcacttgaagagggaaaactgacttggctgatattgtcagcagcgctcagtatgaggagagcatcgttagcaacgtgaagatgatcgctgcgggtcgtcgaagataatgttttgaatcatcgaccaggctcagcattgccgtaaattgagctctcaagcgtacgccacgacggcagtagaaactaaacgttgcattgcatcttagtattttatgctactatggttgaaaagccggtattccagtagaattggcagacaaaggcttgtgagccggattcacacgagttttggacacggtctttcatgccaaaatatgtgtgtttctaaagtcagttatccccgacgaacttactgcagtgaggacgtgcttgtctttgtcaatctggcattcggggtccgagtagaatgcaatcatcgagccagacggggtatttgaccactgagcttgttcactgttgttatccccgcaggtcagcgtaaaacaccgctggattgccttgaaacgaaacgttttgcatgcgggagtgtctccaataccgggggataactcgctgctagtatagagaaagaggttcattgcgtagtatattgacttcagcaacacgagaacaataatcattacggaactcgtgcaaaatgtgcatgattaaaaatcggttgagaaatttataataattcaaggtgatgacagatagtttgtgcctgctttcagaattcctagaccttagatttgcaccaaacgacaatgacataatgaccacagggctactagatttaacgcggaggctgaagaaatttgtagtgtactacctaacgagggcggcgaaatggcgtttaagaaagctaccgcatgggaaattgcgcgcatccaggcattgtagtttcaagtaacaccaggcagaagacaagtttagttgatatagcgaatgaactgagctttggagctctaattcattttggacggatgagcacttacttatcagcgctaccagcgcaactacagcgccattttatccccttctacatcttcaccagagtttgagctggaggacgccattcgcgccgcaagcagattcatctggtctgccgtcagcacgagggcgctctcgtcacaaatactcgtgaaacccgccgtagcatattggcctgactgccaaatcataacactcgatacgttccccttgagatcggtcccggcaaagtcgacaactcctgacgattttttcttgttgacaacgagtcggtcgccaccgacttggcattccaggtctgaatagaaggcgatttctgccgttgacgggatgtcggaccaccgagcagctcgagtcttttgaccccagcaggcggtcagagcatagcatcgctgcgccgtgctgaaggaataagtcttgaaagcgtcggtgtctgcgaagccactggcgatggtgacatcccacgcacagcaaactggttgcaagacaagcaagacgagagacacgagagtagagacggaggtttgcattgcgaagcagcagcaaaattcggttgtgaatgcttgggcaagaaagaagatgttatgagttcatgctggtgacatcaaccattgtaccaccacgaactagtgctaccagcgcttgtacgtctttttgacgattaagttattacgaagggcactgaaaatgtccactttcattttttgtgaaaatgtatacaaatgagatcgatttcagagagacgagtatgctcttatctccggatcaaaggcttcactctcactcaaattgcggacatccttgatgtatgcgtacgaacagtccagcgatggctcaagggagagttcatgtcacctcgtcctttgagtcgagtcagcaagagaaaactcaatgaggatcaacagaaatcaattgtacagttctttctcagcaagaacacgagtacgaggtgagatggcatagcattcgcaaacaatgaatttcggattcatgtgtcctcacggactatcggacgcattttacatcgccacaatatatcattcaagaaggcgtctactgcatacaaggaagcaagtcacactcgtcaacaagagtttctagcaaatctgtcaagctattcaggaaaatcttggattgcactagatgaagctgccttttttctcaatcattctcgcaagtacgcatggagtatcaaagacaaaccggctattgtcaaaaagcctgggtatcgaggacaaatgcactcgctaattcttgcaacctcgtcaaaaggagttgtaggatggaatctgatgcaaggaagtatccatgcttttcgttttcatgcatttctcagtgagctgacaaacgacaccaacgtgattttagataatgtggccacgcacaaagctacccattcacttcgaaaacaaaacttttccacaatcccggaagtagcagaaacaaaacgcatgaacatgatctaccttccaccatattctcctcagatgaaccctgttgaactttgtttcaataccattcgcacatttgtgaacgcttgcgcgccaagaaactttgaagaccttcgttcgtgcgtttgtacagcaatcgaaacactcacaccagcgatttgccgttctatgtttacgagatgccttggaatccagtgaatggcagttccccttcttcatgcaatagcaaagagtttctgacggggattttgtcggcttcatgtaaccctctcattttgacttttccatcatgagtggcaagcgcaaaaagaagacggatccacctgacaaacccaagcgtcagcgccccggcgtcagcgaacgaaaagcgcgcaacgcgaacactgagtgtactattgtgaagtgttcgctcaagtcgtttgcaacgagagcgcgagcgctttgccatgggaaagtgtgctcaaggacacgaacaaggctgtggcggaagcgtacatcctcgcgaatctgtgcgttcttcgtctgtgtcaagctggtcggcctattccggttctggatcaaggcttctacaacaagtgtttgtctgctgtgactgcgggcttgaagactcctaaggagatagtcgacgaagatctctggcagtctgttcaactgtacaagtcgtggcgtgatcccagcgtgccattcgccagcagtgctcacgtcagttacggatggttccagaatgcaagcttgcagatgactacgaacgcttccagccacatcgtcgtgaacttctatcgtcggttccagaagtacatcaagcagcgattcggcattactggaaaggagcgctacaagctactgagagacgtgttggcgccaacgtatgaaggcagtgacaaacgtgtgatggagtttcgtggctggatccctcgtaacagagatgactttatcgacaaggacaacccacatttgattctgccagtgacgtatcgatttcttcagttcatcgaagaagagaacgaccgtcatcgtcgagaccctgaatttcagcaactacgatcgctcagtcttctcccattcaagcgtgggttcgagtgttctcacttcaagatgtgcaaacttggtctctatgctctcttgaaacgagcaggaattcaaattccaccgctacaagcaagggaaggaccaatctggaacgacgtcgtgaacgagtggtggtacaggctgttcaagatcaagaagtttgaaactgagaaccgcaagtttgctggagagatgttgacggacggaaaagcagtcagtatcgtgttgcggaagccgaagaaaccagagccaaagaaatcatcgaagccagagaaaaaaatcccaaaatgtacacctttggcgaagtatggggtctggatcctggtcgacgtgatcttttgtgacgacaaacaactttggtcgaacgatctcttgctcaactcgtgagttctacgaagatgcgaagtataaatcaagcaacaagacgactcgttactggattgatcatgatccaagagtgttggaagcaatccgcaacatgccgtcgccaaagacgagctctctccaagaactggaagcgtacgtgagattcctgattccgcgactcgatcgtttactcgactttcgtatggcgaagccgttccggaaactcaagttccggcgatacatcttcatgaaaaaaaaagcttcgagagctttgtaagaagttgactgcgagagctggagcgaacactctcattgggttcggagactggagcgcgaccgactacggaggcctgatcaagaagtgtccggcaggtccagtcaagaagttggagaacgagttgaagcgctactgcacagtcgactcagttccagagtttcgtactagcaaactgcatgtgggttgtcatcgagagttgacgtaccagtttgctttacgcatgtgcaaggacggagtcgttcgtcgcgtcaagatttacagtgtactccattgtcgacacaatggctgttttgatatgactgtgaaccgcgaccagaacgcgtccaagaacatcctcctccagattctgccttattttctggatcgaactcgacatccagcattttgtagacagggaacgtaggatatgatttagtgttatctagtgccctcgggttgctagacgatagctagttgattccccagcattattactcctgctcggataggcgacatttacgccttttgtggggtagacattttcgttgcccccggtaataagtacatgcatggatcgacagctagtgttggctgctccaactgtcgttgctgtgttcctcatctttctacgaaatatactatatagtacatcatcactgtctctgagggtgtctacgagtactctcaatgcctttttagg

SEQ ID NO: 86 - DNA, 12002 bp, unidentified; identical to SEQ ID NO: 85
  misc_feature 1..12002: note = Fanzor polypeptide
  source 1..12002: mol_type = other DNA

SEQ ID NO: 87 - DNA, 12002 bp, unidentified; identical to SEQ ID NO: 85
  misc_feature 1..12002: note = Fanzor polypeptide
  source 1..12002: mol_type = other DNA

SEQ ID NO: 88 - DNA, 12442 bp, unidentified
  misc_feature 1..12442: note = Fanzor polypeptide
  source 1..12442: mol_type = other DNA
tggctgcgcggagctcttgacatcgcgtgccagggtggcgtcctacgtggcatcatgactacagcaatcggaaattatgcctccctgccgccggcctcctcaccccccactcttgttgcccatgcgcaccccaggatgcctgcctgcctgcctctgagttccagcggatagtcaaggacctgtcttccattggggacaccggtgaggcagggaaggagggagggaggggtctcacagggctgctgggagagcaggggtggacgggaggcatgtggctgccagggtgtgcctgactggctgattgaggggctgaggggcatatgcgaggcgctggctgtgggagacgcatgtgacagcgcagatgcgggtgtgaccttgtggtcggctttgcggggctgggcaaactagagcctgcaataaacctatgtcaccccgcgatctattttgccatgcctgttgttgagctcaccggagttccccgcaccacgagtgttgaggacatgtgggctttgtgcgaaagcatcggggaagtgttgagcttggatttccatttcgaccgcgaaaacgggctcgctttggtgacatttgcgtctgattcggaggccttgactgttgctgacgtgaccgtaaattgcacacgttcgacgggtgacaggcttaaaggttttcacgtgcgttacatttacggttttcttctcgactacacaagcatggatgacgaccaagcaaagtatgtcgcatccaggaaggcagcaacttactacgactgcgacccaagaacactcgtcaattgggcggacaagggactcgtgccatttaggctcacaccggaaggacagcggaggtacgccatccccgtcaacgacgcaccccgcaaaaaagaggcggacaacacaaaagcaaagtactgctactgccgagtgtccacacagaagcaacgagccgacctcagcaggcagcaagacgccatgcgggcagaatacccaggccacaagctcgtctcggacatcggcagcggactcaacttcaaacgcccgggtctgcttgccattctggaatcggcaatgcgcggagaggtcgaagaaattgtggttgcccacagagacaggctcgcgcgtttctccatcgaactcttcgagtggattctacgaaagcacggagtcaggctcgtggttcaacacgcgtcgttggactcatcaccagaggcagaacttgtcgaggacctgctcgcagtggtcaccgtcttcgcctgcagaacccacggccgcagaagccataagaagcgcaaggcgggtgaggctgttcccgacaccacaagatgcgcaggtgctgaggcgctgggtggggtgctacagggcgctgtacaacacggcggtggctcactgcaccgagacgaagacatacaactacttcaaagtcaggccaacattgaccaacgacgcaactgtgccggcccacctcaagtgccttccggtcgccatgaggaagtacgcagtgaaggacgcgacacaggcgtttgtcacaaactttgccaagaagaggaagaactcggggcacagcttccaagtgaagttcaagaccaagaaacactcaaccaaggtcctcaagctggaggccgcaaagatgggcgtcaagatcgtggacggccggccaaggcttgtcgtgggagacgcaaggcaacaccagctagggcgtgaaggcatctccttcgaccgccggggagaggccctggtacgagacaccaaggacccggttcttcaaatcgacgaccttggccgcttctggctcatcaccgtgtgcacccgccagcccgagacccaagggcagcggacgcaaggtgtggtggccttggacccgggtgtgcgtacctttcagacgacctacagcccagatgggacgagctacaaacttggcgacaccgcgtccaaccgcgtgtacaggctgcttctcgtgcgtgacaagtacattggcttggcgcacatgagagggccatctcgccgtgttcggcggtcttacgggaaaaaggcagccaagatcatggcccgcatccaacacatagtggacgagctgcactggaagacggcccgattcttggcacaaggttggtccgagatcctgattcccgtgtttgggaccgctgccatgagcaagaagtaccaggcgtcgcgcgccaaacaccggtgcattggccgcaagacgacgcggcagatgttgcacctgcgccactacacgttccgccagcgcctccatcacgttgcgaagatgacgggcacgatcgtgcgcgaagttaccgaggagtacacgagcaagacgtgtggtaactgtggcgagatcaaggcggacctgggcggtgcaaagacgtaccggtgccaagagtgcggcgtgtgcttggatcgtgacggcaacggcgcccgcaacatattcatcaaaagcgtcctttaggggacttcggacggtacaccctctcttcggagtgctatacacccgggcaagagtcttttgacttggagcatgctccctttgttgcctgtttcttccatgggttacggatgaatgtggtgtttgaagtaccggcattggcttacgcaaagaatttaagtttgaccgagccacaatgttgtcatcatgagttcgtgaaagcactcgggcagggccgtgatgatgtagcggcgttcattgtacggccccggtggtgcacgcgaaatgaacgaagaggaaaacacgtctatcagcttgtcaagcatgtcaggaacgaggtgatctcgtatcggtacaaatcgatctcgtatcggtacaaatcgatcgtggttggttccccgtgcgtgcaccagcaagtgacccgggctgtgaatgacagcaaacaggctgtccagctcattcccagcaactttggccgcttgcacatccttcagccgtgctgcccgaaacctggcttcgactgcatccaggttctgcctgtaaccttcacgcagagcacggtccaattcagtgacgatcgcttcgacgagagctggatgggtcacctctgccgcggcgcccggtgttcctggcattgcgagcgcctcgacaaccagcgctgtgcccgttcccgctaatgttgccgtgaacacttgtaggtcgtcagtggcgcggccaaggaagttgaactcccccagggcgtggcgcatgctgacggtttgcggcggcggcgaggatgtgtgcatcctggaaaaacagaacgttcgggacatctgtctgaacgagcgaattgattccgaacccctgtttcagctacgcaaatgtgctgcggaaccctgcaatgccgtcagtgtgttgtactgtttgttgtactgcccacgaaggccacatttcgcatgctgagcctagcccgcgctgacaacttttcaagtatttccgcggccgcagtctctttgcaagccaacactcgtagcccgagggccgccaggcgccagtgcccagccccgtgccctacctcaatcggtatcatgaagccgcgtgtgaatgtgttttaggcagcacgtttgtctcgcgcgtgctgtagggctggttgctgactgaagagtacctgccgcaattgcgtgcaatacgaataacaactctgcacgcactctggccccgtttgtcccagggccacgccgcaaatcgcaaatcggacaaaatcggacaagtcgtcgccttgcgcgaatcgcttttcgcacctgcgttgcacaaccatggcgaccgctggccaggtaaacatcagagcactgatatcgcatgagagtgggtcatccaccaagtgactgaacctgctggcaacctgtttgtgacctcctccagatcgccaaggacagcagcagcgaaatcgatgtggtgcacagctcatccgagcttgtctccggcagcagtgactctccgtcgcaagacctggaacattcgtggtcatggcgccagtttgcgtccttttgcggttctggccttttgatggtcgctgcattcctggtgggcttcagatctatgatgcctgttatgtgcaggctgatgcatacagcgcgcctcttcctctggtttccgtcttcaatcacggtgctggtgtctcctctcacaggatcctggcaacctagaagctgatatccaagtaggcgctaagacaggttttgcacttctgtggtgggttgctcttgttacgcttatctgtggcagctcatttcagtgcctcagtggccgcttgggcctagtgacgggaaaggacttggcccgtcactgtggcgagcgctggccacgtgtcacctgctggttcttgtgggtaatgctggagctggccattgtggcagtggacatccaagagacaataggcagtgcccaagccctctttatgttgtccaacggacagttgcctctctgggcaggtactgtcgcgctaggtggactgcccttatgttgcggcctattagtgggatgattgtacctgagtgttgtatgtgcacctcccttttcatgcttctgggaagcgcacctgacgtgtagcctcacctacctctcccacgtatcatgtgtaggctgcattgttgtctctttctcagccttcattcttctgatgttggagcgctttggcacacgatggctggaagcgctttttggtagcattattgctctaatgggggtgtcaatggcagttaatttcttccgttctggtgtgccagcaaaagaggtggccctgggtgaggaagagaaattgtttacaggaagatgtgcatcagaatttgtatgctagatatgccgaacttgccgcaagtgcctaacagatgacctgattcatatgctgttgacgggttcactgccagcctgcttgctgacactgcaccttctccctgctgcaggcctattccgaccaacgctgccggcaggttctattggcccagctgttggcactttgggggccctggtgatgccgtacaacttgtttttccattctgctgtggttggtactcggtgcgaggcaaacgctcatttcaagtgagctacgctgctgcagagtttgcttgccaagccacgtgcctcttttctcctcgcaggcgtcccagcccaccatcccctggcagcatgcgtggtgtgctgcgctacctgcgtttggagacagttatcgtgctatttcttgccttcttgatcaatatgtgtgttatatgcgtgtttgcacaggggttctatggcactggtgcgtcggcatgctgtagctctgtttgcttccaagttgcaaaagtctgtgtcttccccattctgctcttccccataaatgctcagcgcccggatttgctgtagatcaagagattgggttgcaggcagcaggtgacctgctggccgacaagtttgggtcagaattcaaggtgttctgggcagtgggcctgctggcatccgggcaggcaagcaactgtgttccctgtgtagcacttcagttctgcggttcatgagcatgtcgttgcatagagaggtgcacgtcaggcattggtatgctgttgccccgggccatggctgaaccgctatgctgctaccttgctgtgtgcatttctaggtgtcgaccattgcattgacatacgctgggcaagttgtgatgagtggcctactgatgattgatgtgaagagctggctgcgcatgattggcacacgcctttttgctctggtgcctgcactgacaggtgcctgttcttctgctctagcttctacgcctgtcctcagcatgctatccccagttgcctttggctcatgcctcggtgcccagaaagatggcctactaaccctgctaagagcactccggctgtcccgcttcctttgtgcagttgcgctggttagccaaacaaacaatagctttgacaggctgaatcagatgctgaacgtggtgcaaagtgttctactgccttttgcaatcattccggtaaggtagcattgctcattgccttgatgctgtatttgagtgagcctgagcttgaacagccatgccgacatacgggtagctagctgttgcattgagatgcgcctctctctgggccatgccttgctcgcagctcatccacatggctggcaaccgggcagtgatgggcccaccgggtgcgtttgccacagcccgctggctcaatgtattttgctccgtggtggctgtggcacttgctgccatcaatggctatttcctggtgacttttcgacaagaaaatttgccagacggcactggtaagcttcgtgtgtaaagcgattgtttatctgtgatgataatgatataagcccagcatgcttgttgttttgttgtgcctgatcatgcttgctcggtggttccttgcctgtgcaagcaagcaacaatgtgcttgtagttaggcagcagtgaagtgcacagagttcgtgttagggtcgcgctgctgatgctcctaaacctgtggctgttttcaggtgtcatggtgggctggggcttcctgatggctgcttactactgtgccatggcgtgcattgcgattggtccagaacgactggatttatgggtaacaccccacttgcaccgtgcgcgaggctcagtaacaaaggcaagcagttcggccgttcgcgcagctggtggcatggcagagtgggtcaagggaatcaactggcgtgaccctgagagcctagtggaggtacacatctaagcttccagtattattgattactatcaatgcaccatggcaactggccttgctgggaagctgctcatttccacaccctatctttttttttttgagcacacaacaagctcacacatcatctctgtcccagcagctgatccagttccctcatgtacaactgcactgtttgtcttgttgcttttctgcatggagttagagcttgtctatcactctctgaacttttgatccagcaattcgtgccttaagttgcaagaaagcatcagaaatgtgatcgtcagagcagtcagcgtgccaagtttgtgacgatattgccatgcggatgggtgggttggtgacaagcacatgtacacatgcggaggcaaacatgcctctccagcagcaacagacatcactagtcagaacctctgctctgtgctgtgccatgactgaggctgccgttagtttctcgctacatacacctgcccacatgcagttgccgtgtgcaatttcagcagtgttggatgtagtacctggctttacaacaacagggtcgcaaggcacaatcaatcagcagcaaatacctatcgtgcaaaggtcagttacaatcaccccactggtaggccgcgtcagcagacctggggcaggaggcaaacagcaggtgcttataagctaaaatggcaaatggatgatgcagtgtttacgcatgtgtcagcaaaaggtgactagtactcacaaagggatgatgcgaggggtggtgcacagatacaaaattgacatctggtgcaacggctttgggaacagccataagggttgctgtgcacgataaacaacatggcatgcacgttaggtgcagggtgtgagcatgggcaggtgcaaaagtgcatgcaatgtgcaggctggacagctagcagctgctggctagctggcagcaggcagggcgcaaccgctctgcttgacaaacgggcctgtgggcagtggtttaacaaaattgtgggaattgtggccgacggaggggcttgtggcaccaccacaagaggccttggtgcacccagaagcacgctcatttggcttgcaactgctgccacactcaacgcggcaaccatgtgcagcgggcaaggcgcaggcgacctgctcagcagacaggcctgcgggcaatggctcaacagcattgtggacttcagaccggcttgtggcaccaccacaacagtgcttagtggacaccagaagcatgcttgcttggcttgcaactgcggccgcacttgacgcggcaaccgtgtgcaggagggggcgccggagtagagacagtgcaggaatcagaaccacagctgggacttggtttgtgggaagctgcctccatagcaacaactggccagcgccatttaagcagcctacacacatcaggtgcaaacgtgagcgagcaggaagcagtggcaagacccacaggtaagctgcctttacagcgacagcaattggcctggtacacaccgtaatgcattagccacaacaagcagcgaggcgccgacatccaccagcacagcaccccatagggtgaaacgccccagggctgccggaacgagcactgccacctgcgcaaacaacatgtgcgaggcaaaggtgaggtggagtggtgatgcggacggagaagatgtgagcagctatgccttcagcaataaggagaaatgaagccttttgacttgcgtgcaacgagccggtggtccgccggtggggcagctggccacaaatacaagtgcaacagggcaacacgtggcctgcccagttgctagcagagacagagcgtaatgacagtacttgagcaagtacagccaagctaaggcaattaacccacctttgtcacaactgagaaggttacgttctgccagatggtggccccagctgcacgcgccagcaggagagcagcgggcacggcgcgcacatcatttgtgaatagcgccactgcaagaacaaagaaaggggtgtcgctgaagggcaatcgcgtagtccatagccaaaccaagaagggggtggcaggaaggaatggatcgtgcgtgaagggcaggctgtgggcaagccaaaaccatgccaaccaagacaggcaaacaatcgcacacctgagccagcttccagggcggccgcgctgccagccacacccattgcaatgcctgcatctgctgctgccagcgcaggtgcatcgttcacaccatcgccgcagtgtgccacaaagactcgggtagggcggcggcgtaagcagcaggccgcagtgggcaaaaccccagggcagcagctagatgagccatgagcagactgagcatggttcttaagctctgcaaccttgtccagcttcgcttgcggcagcagctgggaaaaaacacagtctggagcgatgcctgtagcggcaccaacagccgaagccgcagcagccgcatctcccgtcaacatacaggcaacaatgccacagcgccgcagcatggctactgcttcttcagcttccgggcgcacaacgtcacgagcactgcacagccgggagcgagacggctgatcaccatgaggaaattgccagatacaagcagttccctgatgcagcctgcccactgccatatgcaacgcacgtcctgtccctcgttgcagaaccgaggatctcacctcagccagcccacaaaccggccatccaccgcaaccaggcacgcagtggcaccctcggcatcaattgcatgctgtgcagctgcgatttcaggtcccgccagatttgcacggagctccatcaagccagcagtaccagctgcaacccggcgcccatccacaattgccaccagccctgcaccttgaaccacctctaaaccttccacaggagcatcacacacagcgccctgggaggcagcatagcccagcactgcggcagccaaagggtgactgctaccgcgctcaagggaaccgagtaagcgcaacatctcttgaactgaccagccatcgcgggcctggagagacagcaaacagcagtgcagcacacatgaagtttgaaggagaagtgggcacagtctctgggacagaggtagccagagggcagacatgtggcgtaacatgttgcacagaacaaagtgttcagtgtgccagtgtgcatacctggcatgccaccacttggaaacttcccttggtcagtgtgccagtcttgtcaaaactcacgactgatacctgaaaaacactcaagggcagggcttaagaactgatcttcgcagaagtacatcaacagacggaatgacaaagcagctagcaagcacacaactcaccagcctcagtgccgcgagcgcggctccactcttgatcaggacacccttgccagcggcacgggctaaggcgcacacaacggtggccggggtagaaagcacgagggcgcaggggcaggcagtgaccaacacttgcagtgacaggtagacccaatcactccgctcgttagccggcacccaggcccagggcaggaacgccagcaaagcacaggcaaccagtacagctggcgtgtagatgcgagcaaactgcagaaagatgagcgttggcagaacagtggtattaaacattccacaaatggcaggtctccaatgcaaacaggcccatgcacaaggaaaagggagatcatcagcatttttgctactacttgcagtgcggaaagcgcaccgcaacgcattcacaccttagctacaagtgcttctgctgggctctgctgactggctgcttgctctaccagggtagccattcgggcaacagcagtatcgccagccgccgcagttgtgcatacgagcaaagtgccagccccaacgttgattgtaccagcttggacgaggctgccagggcggcgtgacactggcacagattcacctgcaagacgcaaagcaggaacaggtgagagcaatggccaagtaaaaagaggactgtagctgaaagacattgaaaacttctagccgcacactgttgctatgctttcccacacagccagacctgtcatcaaactctcgtccacgacagactcccctgccaccacagtgccgtccagcggcacagactctccagggggcactagcacctctgtgccaggcatcacactctccacggccacagtttctccggacactgccagcttagctacagcaggaacacaagcaagcagtgctggagtaacctgccaacaatgttgtagacaaggcatggccaagctgcatcaaaattgccaacatccaaacaaccctgcagcacaccaacagcaacaaaacaagaacaacgtgatttttcacctgactccgggcgtaagttgagaacagcggccacagcgttacgagccttttctgtgctgcagcgttcccagtgctcagccactgcaaacaagacaaccacggctgccgcttctgtatagtctccaatggcgatggcacctgccgcagcgaggctcatcagcaggtggatgtccatcacctagtgggagatagcagaggggcaaggcgaggtgagtgccaggaagagacagtatcatagggacccagcagcaagccaggaagtgcggttttgggtgaaatgcaagtcagatggcacaggagcaggcacctcgaaatggctaggtgcttaccatgcgacgaagcgccagcagtgcacgcaacgcaatcctcggcaaacacagtgccagagagcccaaggagacatacttgagatactccaatccggagacaccagtgggccccgccagatagtgcagcagcgataccagtagcagtaccgcgcccgccagcacatgccagggcggtagccagcgggtgcgcacctacagagaatacagagggagatggtgagcagaacatcatatatatgcacagcaggcaggaaggcgcgaccagcagcgaacataacacagggtgtacattcaacagcatacttgcagcagtaccttggcctgggtgcgcggtggtgctagggacgcttccagcatggcaccattaagagcggcaacaagcgctgcaggcggcgccagagctgcatcgtgcaccacgactacagtttgggtcatgacagccacctccacctgcaacaagaagacagtcggtctatgggtgatgggtgggttgttaaggaagcattatcatcacgcccagacagaatcctgtggcagcgcaaaactttagtgtccatgcaaaagctgctgggcgtcattatcagcaacatcatggatgagacatgaaaaccagcaggcacgcaaagatttggtcaggcgaggctggagggcagcgtctcacactatgtatgccgggcatggtatccaggatcgagtggatcaggggggcctctgtgggacagcaaatgccagcagcaaacacgcgagtggtccgaagcacagccgacggtgcctctgcagccgactcaacagccaacgagacacagctggcggcgggcgccgcaaaaggttcagcatggtgcagcaggccggcctgctcctgcacaactgggtgtgctgttggttgcctgcaacacaagcggcaagggtaatgttgagctgattccgggctgtttacaactgtgggttgtaccagcaccaaaccagacacagcctcgttccacatcccacctctgcttcagagttgagaggcggccgtggctgaccacaacaggcccactggagcactcaaggggacagcagctggaggtcacatggtgcaactcgtcctcaacctgcaaaactcgaggcaggatagaggcgcacacttgaggaagaccatgaaaagcaaacacttccgacggctcagtcgctcaccagatagtccgtgtggtcctcatgttcaacagagaggtgt

SEQ ID NO: 89 - DNA, 21809 bp, Chlorella sp.
  source 1..21809: mol_type = other DNA
gcgtgtctcgtggcatggcgttccacgatgcctacgcccgtgtgcgtgacgtgcgcccacacgtcgatgtgtttccacagtacgaatccgacacgaggcgctgggtggcttcgaagtgcaatggcgagtagagatctgtgttgctcgttattgttacatcagtccaatggtaatgttttcacaacagttgtcacggcaactagctgttgccctacgtccccaagacggcgcaaatgctcctccaacatgcgcttgaggacgctcaaatcttccatcatgccgctgcggcgcacgtgtgcgtattcatccaggtcttcgtgatatctcagataccgccccaagtccttaacagtgcgagcaaacatctccagcttttctgcttgatacaggagctcgtggcccgccattgccagcgtgtgcactgactccttcggcagagtcattctcaaagaatgaacaacaccgcgcgacctggcttttatacctggcttgtgtaccttgccacgctgagtccacgttggcacgccagcactacgcaccgcgacgcgtggctcgaggcgtcgaggaaaggacctcgtttttgaataccttcagccagttcagatgttgcttccgctgttcttccagaatttgcgattggaactctttgttgttgttggcgtgcatctctgcaatgtctgcggcgctgattctatcgcccttgcgagttttgtaccggggagatttcagctcacgtagcagctcataagcacgctgctggaaatttgcgttgtcttgtggcccgcagtatgttgcaatgtactctatatggcccaggttttgagcgagccgtttggacacaaacttgctcaatggcgtgtagaccgttcctgtttccgaggtctcaatgatgtgccgcttagccagttgcagattttgcagtctgggtgggccgccggatccgtgcatgttccggaagatggagcatgcaccgtcttcgggtggacatgccacgacaaggagtgccatccgctcgttgtcgtggtagcagtccatcatcacttcgacttctgcttggcttcctgaagggagaactttcgtcttcacaggcttggtggtggtggccgactcgtcgacagtggcaggtgctgccttggccacagcattctcgacgtcgccgcctcctgaaaccagctcagagcgcgacgtgatcccaacatcaccgcatctcttctcttggtgtctcttcacgtgagactcgtggaagctcgtgtatgcacagttggcacattggtggacggtcgcgcgaaccacatagggtttgagactcatgatcttgaatggtggaggtgcctttaaacctgcagctgaccggctgtatatacggaagacgtattggacgggtgcgaagactggaacgttctctgtatagacagggcgtttgagcgcatcccagacatgctgcactcgggtaaagaggtgctgcttgccgtggacaacacgcatacgtacaaggaagagctcatggcaaaggcctggcaccccagccggatggtcgattggtgcctggacaccgaagaagcggcagtgtttcgaaataaaagtctcgaagtcgtgtaatgagacccgaatcatactaccgcgatgccatcaactctggaaaactggataagatgtcagagaagaaacgggatgagttcctgacggcgatgatgaaggacagcatgatttccgccgacgaacggttccggcagcgatccccggtattgcacgccttcaggccgttgctgacccgcgtcgccgatgagaccggattctcggatgcgctgttcagggccagcaagtaacttaaccgaccgatcgattccctccgaatcaaagagatccggtgcacccccagtcgggaatgtgccttgacacgcgcaagggtgctctgggcttcggatgtgtgcaaataattatggctagaagtgcttacgtgacacacacaagggtgcatcgggcttcgtgcgggttagtactccaaagggctcccgtgcgtgtctatggacctgtaattatttgcaccctagtgttcacccttttggtggtgacctgcggacgaaaataattatgaaaatccttttgctgggaacaagttgcgctcaaaccgagagacccggatcgcgttcccacagcaacaaccataagccgtaattattttcgtccgcaggtcaccaccaaaagggtgaacacttgggtgcgaataattatggctagaagcacgtacgtgacacgcgcaagggttgtgttgggctttgggtgctgtagctgtaaaacacgtacccgtatcttctggaattcttcataactatccgcgccttagtgttcacccttttgatggtcacctgcggacgaaaataattatgaaaattcttttactgggaacaagttgcgctcaaaccgagagacccggatcgcgttcccacagcaacaaccataagccgtaattattttcgtccgcaggtcaccaccaaaagggtgaacacttgggtgcgaataattatggctagaagcacgtacgtgacacgcgcaagggttgtgttgggctttgggtgctgtagctgtaaaacacgtacccgtatcttctggaattcttcataactatccgcgccttagtgttcacccttttgatggtcacctgcggacgaaaataattatgaaaattcttttactgggaacaagttgcgctcaaaccgagagacccggatcgcgttcccacagcaacaaccataagccgtaattattttcgtccgcaggtcaccaccaaaagggtgaacacttgggtgcgaataattatggctagaagcacgtacgtgacacgcgcaagggttgtgttgggctttgggtgctgtagctgtaaaacacgtacccgtatcttctggaattcttcataactatccgcgccttagtgttcacccttttgatggtcacctgcggacgaaaataattatgaaaattcttttactgggaacaagttgcgctcaaaccgagagacccggatcgcgttcccacagcaacaaccataagccgtaattattttcgtccgcaggtcaccaccaaaagggtgaacacttgggtgcgaataattatggctagaagcacgtacgtgacacgcgcaagggttgtgttgggctttgggtgctgtagctgtaaaacacgtacccgtatcttctggaattcttcataactatccgcgccttagtgttcacccttttgatggtcacctgcggacgaaaataattatgaaaattcttttactgggaacaagttgcgctcaaaccgagagacccggatcgcgttcccacagcaacaaccataagccgtaattattttcgtccgcaggtcaccaccaaaagggtgaacacttgggtgcgaataattatggctagaagcacgtacgtgacacgcgcaagggttgtgttgggctttgggtgctgtagctgtaaaacacgtacccgtatcttctggaattcttcataactatccgcgccttagtgttcacccttttgatggtcacctgcggacgaaaataattatgaaaattcttttactgggaacaagttgcgctcaaaccgagagacccggatcgcgttcccacagcaacaaccataagccgtaattattttcgtccgcaggtcaccaccaaaagggtgaacacttgggtgcgaataattatggctagaagcacgtacgtgacacgcgcaaggctgtatcgggccctgtacgtgtgagtacacgaaagcgctcccgtgcgcgctgctagcttcgtaactttgacgtagttaccgcaccggcttgatgggcgcagacgtcgcttagttcatggggtttaaaaggttctcacgtacgacctggtgtttgtcgatgccggtgaccttcgacagctcggtcgcggccaagtacccgtggggccccgctggcctgcccttctccggctggctgccacgggtcgccgacacccacactctgccggccggcaatctcgctcgcgtggacagtgcagcgcgtcataccggcccgttcaggatatggcgagggagcgcccatgtggaactggactggggggagcacacgtgtgtcaatttgctggagctgcggttcgccaacccccatgggctaccgctgcaccacattattcatcgcgtcgccctggagatcggcatcagctgcgtcgatacagtgtaccccggagaacagctcgactggctgctggagcaccacgcgcgcggcccggtcacaacctcgtgcgggaccacgcgggtcccgctgccgctcggtggcacccacgctgaggacctcctgccgttggtacggcaccacgtggccaagctgaaggtcgatgtggcagacgggcacagcctcgagcacgcgcacttggaggtatgggcgatgtgctacaccgagccgtttggcatgcccgtgccagcgctgaccggggatcacgggccgccggcgcccatcgagaacccgtggcgggcaggtatcgctggtgcagccacgacgggcgcgtcgacccgcatctccaccgtgcacaagaacgcgtggaagaaccccgcgccacccggcaagcgactccacgtggtgcgcttctgggcgcccgcgtcaatgaccatcgaatgcatggcagtgtggccggcagacgacgtcgcgctcctcacggtgttagcctcccccggggtcccgcaggaggttctggccacgtgggagcccgagccggctggattcgaggacccgcgcgtgcgggcagcagcgggatgtctgagaatgctaccgcccgagctggtgtcgcggatcgtaaggccgctgttcatgcgcccggagccccgtgccgtcatctcgttctccacgcccgtcaaccccaacacggcaaacctgctggtggagctgcagttgagagaaggcgtaccagcggacacgaacttcggctacgcgaccattggcctcaatgccatggtgtttggtgggggattgttcggcctgatgtacggtggctgaggcggggaaccacgggctccatgtgtgtgagcgtgtgtgtgtgtctgtgcgtgcgtgtgtgtgtgttacaggttcaggtgtcatatttgctccaaaaatggccctgctcggctgggactgtttgccggaatattccaaaaaactatgggtgtctatggtaattaacgcgttaaatctcgaactttaatatgtctaccctcaccacgacaatacacaccgtgcaatgctcatctcaggcaagaaggcggctgcacagctcggggtctgtctcgacaccctcagacgactcgcagacgacgggcagctcgcaagcatcaggctcccctccggacacaggcgctacgacatctcagacgtacttgccacaagcacacaccccggtgacaatgccagcctcaagcgaaaattctgctactgcagagtctccaggaaacaccaacagcacgacttgcagcggcaggtcgagtacatgcgcgaacgcttcccagaacacgagatcgtcacggacatcgcttcagggatcaacttcaagcgaaagggcctgcagaccattcttcgacacgcgatgctcggaaatgtccaagaggttgtggttgcctacagagaccgccttgcaagaatcgcgagtgacctcgtggaatggatcctcacaaacaacggagccaaactcgtggtgctgcatcaggcaatggacagccccgaaggagaccttgcagaggacctcatgtcaatcgtcaacgtcttttgctgtagggcaaacgggcgcagaaagtactcggaccaaagcaaagaagcctccaaaagaaggaaagaaaccccaggcgacacactcgcggaaagttcgcatcttcccttgccgtgaagacggagagaagctgacgcaatggatgggttgccatcgggtcgtatacaacagggctctggcgtttgcaaagaagactggtcaacggaattacgcggagatgggcaaacggttcgtggcgtccagaaacatcgaggagccgtggttgaagcaatgccctcaggtcatccggagttgcgccatacgtgacctcaaggccgccttcgacagcaactttgccaagcggaagatcaacccagaacacacatttgacgtcaagttcaaggccaagaaggacgacgtgaccgctgtgcgcatcgagcgagtgaacggtgcgttcaaggtgttggacgacggcaagcacgtctccttcttccccaagtcgttgaagcccatgggggtggagcccagagctttgcaaggcatcgaactgaaacatgacatcacgctaacgaaggaccgcctaggcagattcacactccatgttccctaccgtcgcgaaaaccaagcggcacaggaaccggacacgtggtgtgctattgaccctggcgtccgcacctttgccaccgtattcagtccagcagacgcctgcaagattggcgatggagccgcgacgagactggccaagctgtgcgcacacctcgacaagctgacttcggacacgaccaaagccttgggcctccaaaggagacggaggatgaagaaggcacaagtgcgcgtgcggaatcgcatcatacacttggtggacgaactccattggcaggcggcttcgtttctgtgcaagcactacacggacatcctactgccagtgttcgaaagccagaagatggcttgccggctgtcgaggaagatcggttcgaagacggcgcgctccatgctgacgctgagtcactataagttccgcatgcgcttgatccacaaagcaagggagcatgggtgtcgcgtgcacctttgcacggaagagtacacgtccaagacctgcacccgttgcggcgcgttgaagcacaatctgggaggtgccaaagtgtacaggtgccctgtgtgtatgcttcgtatcgaccgcgacattgcaggtgggcgcaacatcttcctgaaaaacgcggtagctcttgattgagctgcctttgcctcgttagagcctcgtccaatgtgacgtgcagaagactccccctcatgagctgtggccatcgattcctgtggcaacgcaggaagctgtgaaagcagtaatgactgacgggcgagcccagactttatgttgaagtctgtgagttcttgagttttaatctagcggcccagatgcagacgacaacactcccggcagggacggcaaacgtcttcaaaccgcccggaagcgaatgtatggccgctcggagctctccggatacttcttcggagaattcggtttccagcgattcccacagcttgcggtgctcgtcggtcacactcgcccacggcaccatcaacggctccggattgaaggccgcgtgcatttcggcggcccaatctcccgtggacacgtagagcaagtactcgcgaacgtgctcggcttcggcgatcgcccgtcgttggcgcttggcttcccgagcggcggccctctcgagcgctcgctcggcggcggcagcctggcatacttccgtgagagacaaagacatcgagagaaaaaaaagtgcccgaaccataagccgtaattattttcgggaggtgcgaataattacggcctacgtggcttagcacgcgcagcacgggcctacttgaacagtcggttctcccgttcttacactttgcaatgtctgagttcgcgttgcttgtagagcacagcacggaaaccgtgttttacctgataccacaggcgcagcttacggaccccgacaggtcgttgttgggcaggctgcacggcaccgatttggacaatgacgggcaaacggaggacaaacaagcctacgagcgtatgatgtggcgattcgtggactgtggtggcgacgtcatctacttgccccgcggtggaaccgtcacgctcgtatgtcagctctttgtaacaacttgacagctctttggaacaacttgacagctctttggaacaacttgacacatggacacaattcagtgatgcgtgtggctcgtctcgctaccggcaaggcttgctgtctctgaggtgtcagtcacgtcagtctcgtccgtggtctcacgagtcaaatcccgggtctccttggggacctcgtgtgcgcgatcgttgttctggtcttgccgcagcttgtacttgccagtgtccttgtcaaactcgtacttgccattgtcgtctcccagctcgtgcgtgatggtgcggccgtagtgcaacttgtagagccagcccagcgtggccccatcagccaggatcgtgaggaacaacccggacagcgctgcgtcgatgggcatggcaccgtaccaagagccatacttcagctgcaagtttttcaagatcacgtacaatacgatgtacaggaacgcccccaccaggaatgtcctcgcgttgcgtttgccgtgcccaggttcctttgaagcaggcaggaacgagtgacacgcataccacagcatgtcttggctgttcacgtgacaaaaggaatccgtatttgacgcgtggtaattacatacagacaacacgtggatgcataccatgcggcagtgtcaatcggctggctaagtgatcccgttcaaacatggactccactgtggcactggccccgtacacctcgaggtccaacggtgtggttgtgcacagcatgggtgccgctccaaggtcgctgcgcagcttgatgagctccaaggcttgcgcattgatgcatttcagggcgggcaagggctgagccagcaacagatgagtctgcgttcgtatggtgccgagcttgcggatgactgtcagctcttccagcctgctcagggtgcccggccggtcgagcaccaccactccactgacccattcgcggtcttggtaatagcaagatcccagtaccagtctcttgaggcggggcgggtccacgtccaacagggccttgatgcggactggggcagccggggcagcctgaacggaccaagacaccgctcagaccaccactcatagcacaaccaggacagcccgtgttccaatgagcacaacgcaccttccgtctgttttggcaggtgccccagtacagcgcgcccagcacgagctcctcgagattgggcaatttcctcagcgcttcctcgaaccagccatcagcatggtaggattgcgtcgacacatccaggctggtcaacttgctgaagtccagccacggctgcttgcgctgacgccctatcatgcatctgaacaaggtgacggcggtcttggagcggcatacgtgcgcggcaacgactggctgcctggcccagtccttgcacaccaggcggtggtcggccgggcgggaggtcaggtccagcacgcgcgcctgtagctccgcgggcaaatcgttccatgtagcggtggatgcgcgcgcgactgacattgaaatgagcgaaatgtggctgcgcggagctcttgacatcgcgtgccagggtggcgtcctacgtggcatcatgactacagcaatcggaaattatgcctccctgccgccggcctcctcaccccccactcttgttgcccatgcgcaccccaggatgcctgcctgcctgcctctgagttccagcggatagtcaaggacctgtcttccattggggacaccggtgaggcagggaaggagggagggaggggtctcacagggctgctgggagagcaggggtggacgggaggcatgtggctgccagggtgtgcctgactggctgattgaggggctgaggggcatatgcgaggcgctggctgtgggagacgcatgtgacagcgcagatgcgggtgtgaccttgtggtcggctttgcggggctgggcaaactagagcctgcaataaacctatgtcaccccgcgatctattttgccatgcctgttgttgagctcaccggagttccccgcaccacgagtgttgaggacatgtgggctttgtgcgaaagcatcggggaagtgttgagcttggatttccatttcgaccgcgaaaacgggctcgctttggtgacatttgcgtctgattcggaggccttgactgttgctgacgtgaccgtaaattgcacacgttcgacgggtgacaggcttaaaggttttcacgtgcgttacatttacggttttcttctcgactacacaagcatggatgacgaccaagcaaagtatgtcgcatccaggaaggcagcaacttactacgactgcgacccaagaacactcgtcaattgggcggacaagggactcgtgccatttaggctcacaccggaaggacagcggaggtacgccatccccgtcaacgacgcaccccgcaaaaaagaggcggacaacacaaaagcaaagtactgctactgccgagtgtccacacagaagcaacgagccgacctcagcaggcagcaagacgccatgcgggcagaatacccaggccacaagctcgtctcggacatcggcagcggactcaacttcaaacgcccgggtctgcttgccattctggaatcggcaatgcgcggagaggtcgaagaaattgtggttgcccacagagacaggctcgcgcgtttctccatcgaactcttcgagtggattctacgaaagcacggagtcaggctcgtggttcaacacgcgtcgttggactcatcaccagaggcagaacttgtcgaggacctgctcgcagtggtcaccgtcttcgcctgcagaacccacggccgcagaagccataagaagcgcaaggcgggtgaggctgttcccgacaccacaagatgcgcaggtgctgaggcgctgggtggggtgctacagggcgctgtacaacacggcggtggctcactgcaccgagacgaagacatacaactacttcaaagtcaggccaacattgaccaacgacgcaactgtgccggcccacctcaagtgccttccggtcgccatgaggaagtacgcagtgaaggacgcgacacaggcgtttgtcacaaactttgccaagaagaggaagaactcggggcacagcttccaagtgaagttcaagaccaagaaacactcaaccaaggtcctcaagctggaggccgcaaagatgggcgtcaagatcgtggacggccggccaaggcttgtcgtgggagacgcaaggcaacaccagctagggcgtgaaggcatctccttcgaccgccggggagaggccctggtacgagacaccaaggacccggttcttcaaatcgacgaccttggccgcttctggctcatcaccgtgtgcacccgccagcccgagacccaagggcagcggacgcaaggtgtggtggccttggacccgggtgtgcgtacctttcagacgacctacagcccagatgggacgagctacaaacttggcgacaccgcgtccaaccgcgtgtacaggctgcttctcgtgcgtgacaagtacattggcttggcgcacatgagagggccatctcgccgtgttcggcggtcttacgggaaaaaggcagccaagatcatggcccgcatccaacacatagtggacgagctgcactggaagacggcccgattcttggcacaaggttggtccgagatcctgattcccgtgtttgggaccgctgccatgagcaagaagtaccaggcgtcgcgcgccaaacaccggtgcattggccgcaagacgacgcggcagatgttgcacctgcgccactacacgttccgccagcgcctccatcacgttgcgaagatgacgggcacgatcgtgcgcgaagttaccgaggagtacacgagcaagacgtgtggtaactgtggcgagatcaaggcggacctgggcggtgcaaagacgtaccggtgccaagagtgcggcgtgtgcttggatcgtgacggcaacggcgcccgcaacatattcatcaaaagcgtcctttaggggacttcggacggtacaccctctcttcggagtgctatacacccgggcaagagtcttttgacttggagcatgctccctttgttgcctgtttcttccatgggttacggatgaatgtggtgtttgaagtaccggcattggcttacgcaaagaatttaagtttgaccgagccacaatgttgtcatcatgagttcgtgaaagcactcgggcagggccgtgatgatgtagcggcgttcattgtacggccccggtggtgcacgcgaaatgaacgaagaggaaaacacgtctatcagcttgtcaagcatgtcaggaacgaggtgatctcgtatcggtacaaatcgatctcgtatcggtacaaatcgatcgtggttggttccccgtgcgtgcaccagcaagtgacccgggctgtgaatgacagcaaacaggcgttccagctcattcccagcaactttggccgcttgcacatccttcagccgtgctgcccgaaacctggcttcgactgcatccaggttctgcctgtaaccttcacgcagagcacggtccaattcagtgacgatcgcttcgacgagagctggatgggtcacctctgccgcggcgcccggtgttcctggcattgcgagcgcctcgacaaccagcgctgtgcccgttcccgctaatgttgccgtgaacacttgtaggtcgtcagtggcgcggccaaggaagttgaactcccccagggcgtggcgcatgctgacggtttgcggcggcggcgaggatgtgtgcatcctggaaaaacagaacgttcgggacatctgtctgaacgagcgaattgattccgaacccctgtttcagctacgcaaatgtgctgcggaaccctgcaatgccgtcagtgtgttgtactgtttgttgtactgcccacgaaggccacatttcgcatgctgagcctagcccgcgctgacaacttttcaagtatttccgcggccgcagtctctttgcaagccaacactcgtagcccgagggccgccaggcgccagtgcccagccccgtgccctacctcaatcggtatcatgaagccgcgtgtgaatgtgttttaggcagcacgtttgtctcgcgcgtgctgtagggctggttgctgactgaagagtacctgccgcaattgcgtgcaatacgaataacaactctgcacgcactctggccccgtttgtcccagggccacgccgcaaatcgcaaatcggacaaaatcggacaagtcgtcgccttgcgcgaatcgcttttcgcacctgcgttgcacaaccatggcgaccgctggccaggtaaacatcagagcactgatatcgcatgagagtgggtcatccaccaagtgactgaacctgctggcaacctgtttgtgacctcctccagatcgccaaggacagcagcagcgaaatcgatgtggtgcacagctcatccgagcttgtctccggcagcagtgactctccgtcgcaagacctggaacattcgtggtcatggcgccagtttgcgtccttttgcggttctggccttttgatggtcgctgcattcctggtgggcttcagatctatgatgcctgttatgtgcaggctgatgcatacagcgcgcctcttcctctggtttccgtcttcaatcacggtgctggtgtctcctctcacaggatcctggcaacctagaagctgatatccaagtaggcgctaagacaggttttgcacttctgtggtgggttgctcttgttacgcttatctgtggcagctcatttcagtgcctcagtggccgcttgggcctagtgacgggaaaggacttggcccgtcactgtggcgagcgctggccacgtgtcacctgctggttcttgtgggtaatgctggagctggccattgtggcagtggacatccaagagacaataggcagtgcccaagccctctttatgttgtccaacggacagttgcctctctgggcaggtactgtcgcgctaggtggactgcccttatgttgcggcctattagtgggatgattgtacctgagtgttgtatgtgcacctcccttttcatgcttctgggaagcgcacctgacgtgtagcctcacctacctctcccacgtatcatgtgtaggctgcattgttgtctctttctcagccttcattcttctgatgttggagcgctttggcacacgatggctggaagcgctttttggtagcattattgctctaatgggggtgtcaatggcagttaatttcttccgttctggtgtgccagcaaaagaggtggccctgggtgaggaagagaaattgtttacaggaagatgtgcatcagaatttgtatgctagatatgccgaacttgccgcaagtgcctaacagatgacctgattcatatgctgttgacgggttcactgccagcctgcttgctgacactgcaccttctccctgctgcaggcctattccgaccaacgctgccggcaggttctattggcccagctgttggcactttgggggccctggtgatgccgtacaacttgtttttccattctgctgtggttggtactcggtgcgaggcaaacgctcatttcaagtgagctacgctgctgcagagtttgcttgccaagccacgtgcctcttttctcctcgcaggcgtcccagcccaccatcccctggcagcatgcgtggtgtgctgcgctacctgcgtttggagacagttatcgtgctatttcttgccttcttgatcaatatgtgtgttatatgcgtgtttgcacaggggttctatggcactggtgcgtcggcatgctgtagctctgtttgcttccaagttgcaaaagtctgtgtcttccccattctgctcttccccataaatgctcagcgcccggatttgctgtagatcaagagattgggttgcaggcagcaggtgacctgctggccgacaagtttgggtcagaattcaaggtgttctgggcagtgggtctgctggcatccgggcaggcaagcaactgtgttccctgtgtagcacttcagttctgcggttcatgagcatgtcgttgcatagagaggtgcacgtcaggcattggtatgctgttgccccgggccatggctgaaccgctatgctgctaccttgctgtgtgcatttctaggtgtcgaccattgcattgacatacgctgggcaagttgtgatgagtggcctactgatgattgatgtgaagagctggctgcgcatgattggcacacgcctttttgctctggtgcctgcactgacaggtgcctgttcttctgctctagcttctacgcctgtcctcagcatgctatccccagttgcctttggctcatgcctcggtgcccagaaagatggcctactaaccctgctaagagcactccggctgtcccgcttcctttgtgcagttgcgctggttagccaaacaaacaatagctttgacaggctgaatcagatgctgaacgtggtgcaaagtgttctactgccttttgcaatcattccggtaaggtagcattgctcattgccttgatgctgtatttgaatgagcctgagcttgaacagccatgccgacatacgggtagctagctgttgcattgagatgcgcctctctctgggccatgccttgctcgcagctcatccacatggctggcaaccgggcagtgatgggcccaccgggtgcgtttgccacagcccgctggctcaatgtattttgctccgtggtggctgtggcacttgctgccatcaatggctatttcctggtgacttttcgacaagaaaatttgccagacggcactggtaagcttcgtgtgtaaagcgattgtttatctgtgatgataatgatataagcccagcatgcttgttgttttgttgtgcctgatcatgcttgctcggtggttccttgcctgtgcaagcaagcaacaatgtgcttgtagttaggcagcagtgaagtgcacagagttcgtgttagggtcgcgctgctgatgctcctaaacctgtggctgttttcaggtgtcatggtgggctggggcttcctgatggctgcttactactgtgccatggcgtgcattgcgattggtccagaacgactggatttatgggtaacaccccacttgcaccgtgcgcgaggctcagtaacaaaggcaagcagttcggccgttcgcgcagctggtggcatggcagagtgggtcaagggaatcaactggcgtgaccctgagagcctagtggaggtacacatctaagcttccagtattattgattactatcaatgcaccatggcaactggccttgctgggaagctgctcatttccacaccctatctttttttttttgagcacacaacaagctcacacatcatctctgtcccagcagctgatccagttccctcatgtacaactgcactgtttgtcttgttgcttttctgcatggagttagagcttgtctatcactctctgaacttttgatccagcaattcgtgccttaagttgcaagaaagcatcagaaatgtgatcgtcagagcagtcagcgtgccaagtttgtgacgatattgccatgcggatgggtgggttggtgacaagcacatgtacacatgcggaggcaaacatgcctctccagcagcaacagacatcactagtcagaacctctgctctgtgctgtgccatgactgaggctgccgttagtttctcgctacatacacctgcccacatgcagttgccgtgtgcaatttcagcagtgttggatgtagtacctggctttacaacaacagggtcgcaaggcacaatcaatcagcagcaaatacctatcgtgcaaaggtcagttacaatcaccccactggtaggccgcgtcagcagacctggggcaggaggcaaacagcaggtgcttataagctaaaatggcaaatggatgatgcagtgtttacgcatgtgtcagcaaaaggtgactagtactcacaaagggatgatgcgaggggtggtgcacagatacaaaattgacatctggtgcaacggctttgggaacagccataagggttgctgtgcacgataaacaacatggcatgcacgttaggtgcagggtgtgagcatgggcaggtgcaaaagtgcatgcaatgtgcaggctggacagctagcagctgctggctagctggcagcaggcagggcgcaaccgctctgcttgacaaacgggcctgtgggcagtggtttaacaaaattgtgggaattgtggccgacggaggggcttgtggcaccaccacaagaggccttggtgcacccagaagcacgctcatttggcttgcaactgctgccacactcgacgcggcaaccatgtgcagcgggcaaggcgcaggcgacctgctcagcagacaggcctgcgggcaatggctcaacagcattgtggacttcagaccggcttgtggcaccaccacaacagtgcttagtggacaccagaagcatgcttgcttggcttgcaactgcggccgcacttgacgcggcaaccgtgtgcaggagggggcgccggagtagagacagtgcaggaatcagaaccacagctgggacttggtttgtgggaagctgcctccatagcaacaactggccagcgccatttaagcagcctacacacatcaggtgcaaacgtgagcgagcaggaagcagtggcaagacccacaggtaagctgcctttacagcgacagcaattggcctggtacacaccgtaatgcattagccacaacaagcagcgaggcgccgacatccaccagcacagcaccccatagggtgaaacgccccagggctgccggaacgagcactgccacctgcgcaaacaacatgtgcgaggcaaaggtgaggtggagtggtgatgcggacggagaagatgtgagcagctatgccttcagcaataaggagaaatgaagccttttgacttgcgtgcaacgagccggtggtccgccggtggggcagctggccacaaatacaagtgcaacagggcaacacgtggcctgcccagttgctagcagagacagagcgtaatgacagtacttgagcaagtacagccaagctaaggcaattaacccacctttgtcacaactgagaaggttacgttctgccagatggtggccccagctgcacgcgccagcaggagagcagcgggcacggcgcgcacatcatttgtgaatagcgccactgcaagaacaaagaaaggggtgtcgctgaagggcaatcgcgtagtccatagccaaaccaagaagggggtggcaggaaggaatggatcgtgcgtgaagggcaggctgtgggcaagccaaaaccatgccaaccaagacaggcaaacaatcgcacacctgagccagcttccagggcggccgcgctgccagccacacccattgcaatgcctgcatctgctgctgccagcgcaggtgcatcgttcacaccatcgccgcagtgtgccacaaagactcgggtagggcggcggcgtaagcagcaggccgcagtgggcaaaaccccagggcagcagctagatgagccatgagcagactgagcatggttcttaagctctgcaaccttgtccagcttcgcttgcggcagcagctgggaaaaaacacagtctggagcgatgcctgtagcggcaccaacagccgaagccgcagcagccgcatctcccgtcaacatacaggcaacaatgccacagcgccgcagcatggctactgcttcttcagcttccgggcgcacaacgtcacgagcactgcacagccgggagcgagacggctgatcaccatgaggaaattgccagatacaagcagttccctgatgcagcctgcccactgccatatgcaacgcacgtcctgtccctcgttgcagaaccgaggatctcacctcagccagcccacaaaccggccatccaccgcaaccaggcacgcagtggcaccctcggcatcaattgcatgctgtgcagctgcgatttcaggtcccgccagatttgcacggagctccatcaagccagcagtaccagctgcaacccggcgcccatccacaattgccaccagccctgcaccttgaaccacctctaaaccttccacaggagcatcacacacagcgccctgggaggcagcatagcccagcactgcggcagccaaagggtgactgctaccgcgctcaagggaaccgagtaagcgcaacatctcttgaactgaccagccatcgcgggcctggagagacagcaaacagcagtgcagcacacatgaagtttgaaggagaagtgggcacagtctctgggacagaggtagccagagggcagacatgtggcgtaacatgttgcacagaacaaagtgttcagtgtgccagtgtgcatacctggcatgccaccacttggaaacttcccttggtcagtgtgccagtcttgtcaaaactcacgactgatacctgaaaaacactcaagggcagggcttaagaactgatcttcgcagaagtacatcaacagacggaatgacaaagcagctagcaagcacacaactcaccagcctcagtgccgcgagcgcggctccactcttgatcaggacacccttgccagcggcacgggctaaggcgcacacaacggtggccggggtagaaagcacgagggcgcaggggcaggcagtgaccaacacttgcagtgacaggtagacccaatcactccgctcgttagccggcacccaggcccagggcaggaacgccagcaaagcacaggcaaccagtacagctggcgtgtagatgcgagcaaactgcagaaagatgagcgttggcagaacagtggtattaaacattccacaaatggcaggtctccaatgcaaacaggcccatgcacaaggaaaagggagatcatcagcatttttgctactacttgcagtgcggaaagcgcaccgcaacgcattcacaccttagctacaagtgcttctgctgggctctgctgactggctgcttgctctaccagggtagccattcgggcaacagcagtatcgccagccgccgcagttgtgcatacgagcaaagtgccagccccaacgttgattgtaccagcttggacgaggctgccagggcggcgtgacactggcacagattcacctgcaagacgcaaagcaggaacaggtgagagcaatggccaagtaaaaagaggactgtagctgaaagacattgaaaacttctagccgcacactgttgctatgctttcccacacagccagacctgtcatcaaactctcgtccacgacagactcccctgccaccacagtgccgtccagcggcacagactctccagggggcactagcacctctgtgccaggcatcacactctccacggccacagtttctccggacactgccagcttagctacagcaggaacacaagcaagcagtgctggagtaacctgccaacaatgttgtagacaaggcatggccaagctgcatcaaaattgccaacatccaaacaaccctgcagcacaccaacagcaacaaaacaagaacaacgtgatttttcacctgactccgggcgtaagttgagaacagcggccacagcgttacgagccttttctgtgctgcagcgttcccagtgctcagccactgcaaacaagacaaccacggctgccgcttctgtatagtctccaatggcgatggcacctgccgcagcgaggctcatcagcaggtggatgtccatcacctagtgggagatagcagaggggcaaggcgaggtgagtgccaggaagagacagtatcatagggacccagcagcaagccaggaagtgcggttttgggtgaaatgcaagtcagatggcacaggagcaggcacctcgaaatggctaggtgcttaccatgcgacgaagcgccagcagtgcacgcaacgcaatcctcggcaaacacagtgccagagagcccaaggagacatacttgagatactccaatccggagacaccagtgggccccgccagatagtgcagcagcgataccagtagcagtaccgcgcccgccagcacatgccagggcggtagccagcgggtgcgcacctacagagaatacagagggagatggtgagcagaacatcatatatatgcacagcaggcaggaaggcgcgaccagcagcgaacataacacagggtgtacattcaacagcatacttgcagcagtaccttggcctgggtgcgcggtggtgctagggacgcttccagcatggcaccattaagagcggcaacaagcgctgcaggcggcgccagagctgcatcgtgcaccacgactacagtttgggtcatgacagccacctccacctgcaacaagaagacagtcggtctatgggtgatgggtgggttgttaaggaagcattatcatcacgcccagacagaatcctgtggcagcgcaaaactttagtgtccatgcaaaagctgctgggcgtcattatcagcaacatcatggatgagacatgaaaaccagcaggcacgcaaagatttggtcaggcgaggctggagggcagcgtctcacactatgtatgccgggcatggtatccaggatcgagtggatcaggggggcctctgtgggacagcaaatgccagcagcaaacacgcgagtggtccgaagcacagccgacggtgcctctgcagccgactcaacagccaacgagacacagctggcggcgggcgccgcaaaaggttcagcatggtgcagcaggccggcctgctcctgcacaactgggtgtgctgttggttgcctgcaacacaagcggcaagggtaatgttgagctgattccgggctgtttacaactgtgggttgtaccagcaccaaaccagacacagcctcgttccacatcccacctctgcttcagagttgagaggcggccgtggctgaccacaacaggcccactggagcactcaaggggacagcagctggaggtcacatggtgcaactcgtcctcaacctgcaaaactcgaggcaggatagaggcgcacacttgaggaagaccatgaaaagcaaacacttccgacggctcagtcgctcaccagatagtccgtgtggtcctcatgttcaacagagagg

SEQ ID NO: 90 - DNA, 4141 bp, unidentified
  misc_feature 1..4141: note = Fanzor polypeptide
  source 1..4141: mol_type = other DNA
catgttcatgtctgaattgaatcaacctaatcgtttgagagttggaagagtgtctgtggagatataaaatgagaaaactctatctattagcttaaacaatattgattcgtcgaatggtttgttgtgttgcaatgtagtgcagttttatatgttatttttttctaatgatgagtgagacggaatgattgtttgattgctcttatatcgttagaaatcaaagtggcccgaatgacaccttaaggttatatacttgtctggcataaacattctggtcgtgttgcgtctggacgtcgttggcaagacgacttcggcaaacgagatgatgttcggcggcgtccacgcactcacgaatcgctcctgcagtacatcaacaacatctcgaatcttccacagcttgtcttggcggttcgggttgtcgttgttggcgaagtggagatcgcgaaggatcgacgtgcagcggttacgactcatgaacttgccgaatgctcctgcagtcagagcaccatcgtcagtcatcgcccagtgctgggaaaagcgtcgcgttgggttcaacatgtgagccacgagaagaccaatcactcgcagtatctcgcgcggcgtgtaatcgtcctccctgcgaatgcatcgtcggagatcgcggagcgtctgcatgttctccgttctgggcaccctggctcgctcaaaacgcgctcgctggtccacagtctgcctcttgacgcggttggtctctctggtgatccgcatccacgggctcttcggtaggaaatagaacatcaagtcaagaggtgagtccttcctcgcgcgtagtcctgggattggatgggcggtctcctgcgccaagccgcgaaaacacgacacctcgtcctcaaacactgacgatgctgcactccacttcaggtcctgaagcgcattctggtccatctgatcaatggacaaggagccacccagtgcctcaataaaggcagcatccatgtgtggtgactcctcgtcatcagacccgtcctcatctggctgaggacggacaggctccacgtagtcgtcgtccgaaaactggccatagtcggagttcgaactcaaactctcgtagccgtctcgatggtccccgggcttcatcaagttcacgtcagctggatctcgcggcgcgagtggtcctccatcgtcatcacacccgcgatcgtcctttgcctcctccaccgattcatctccagagtctgagtctggctccatctcggagagcagccgctggaaggctccgatcacgacagtatgctccgtgacgtccatcgtgtctgccgtatctggttgggatagctcgaaagctcttccaactatgttctgcgacaaatcgggagtttcaccgccctctctatcgctcctgaacagcgcatcgactgtgttggctgagagcgccacgctgcagtcaatttgcgacgctcgcaccatctcatcgccacctttatcgtccacagtgccgcttacctcgccactttcctctccattgtgccctgcattctcaccaacgtcatctctactttcctcgcccctagcatcgttctcgtcatcctggatcaatctggtttcaatcgcgtgctccacgacagctctctcccctatcacataaagttagtagcaacccgtattcatacagcaggtgcgaaacgtaccatagaaaacgctctcgccttctacgggagcatcgttcgacggtttatagtacgcccacatggtggacagtccggtgggtcgctttgatgtccatcctgcggccttcagttagcgccacatgtggccgaagtcaacgagatgcgcatctagcgctgatgccgacgcttgcgccgcagctttcgttctcatactggctcgaaccggcatctcgcttgtcgctgacgcagcaaaatctcgaatggctgagaattcccccctcttctcttctggtcacgaatcatttgtgacagttggaaaggtgcactcttacctttcccctggtactgtcttgtgtgtgcagcaaaaacctctcccgtcttatatcctttcgccccaaaaataaacttgattttagtatcgggtcgccgtttccgagccaactcctgtttgagaaaaatattaagtcgtaacttacgacttaaaaattggactacgtcgtaacttacgacgttggtaacagggggttaactgtacacattggtatacattttctgtaactataccgcttcgtaggccctgtgtatacggactatatgcacattttatcattagtgtccacttctgtcaattgaggcgccacagagataagtcgacctgaaacaacaaaagtaccggcctaaagtcaggtcgtcagtataataactgcagcaaatgtcaggttatcagtgcttagaagctagcctgatttgaccgaaacgaagaataattaccttacagccaggacgaaaagcgtcaatgtcgcttctcgctcaatcaataatgctggagtcaactagctaccgcctagcaaacctgagggcactaaacgtcactaatgttgcgtgccttgcgtcgggtatcttcgattgttcgtttgcgaccggtcgataaagtgaagccgtgaagggccaggagatgatgcttggcgtactctctcaccagacacgccaccatctgcgggacaggttaaaatcgaagattcccgacgcaaggcacgcaacatggcgcgagtgcgatgcgtctgaaagtaaggaactcctcagtttattttgtgccagttgatcggcgcacgcaagcacgatggagtccatcatggatggagtgcggagccgaaccttttcatccgtgttgactcaaaccctgcgggatcgatcgcagatgaacaacttgtcttgcttttcgtattgctacctgtaaatccttcacgacgaccagccagcagctcttcattttcctttttttcgccatgagcggcaagcgcacaaaggtggacccgcctgacaagaagaccaagcgtcaacgctcaggcgtcggccaacgcaacgcacgaaataagaacaatgagtgcagtattgtaaagtgctcgctcaagtcgttttgtcaggagagcgcgagcgtgtttccgtgggacaacgtgctcaaggacacaaacaaggcagtggcggaagcatacattctcgcaaacctgcgcgttgctcgtttttgtcaagcgggtcgacctattccagttctggaccaagagttctacttactaccagtgtctgtcaaccgtaagtgtgggtttgacagctcggaagaaggttgatgacgaagatctccggcagtctgtcgaactgtacaagtcgtggcgtgatcccaacgtgtcgttcgctagcagtgctcacaccagttgtggatggttccaaaacgcaaggtcgcagatggcagctaacgcttccaaccacgtcgtcgtgaacttctatcgtcgctttcagaagtatgtcgagcaacgcgttggcatcactggcaaagagcgctacgaactactacgagatgtgttagcgccaacgtacgcaggcagtgacgagcgtgtgctggagttccgtcgctggattccccgcaacgctgaaggatacatcaacaaggagaagccacacttgatcctcccggtgacgtatcgattcctccagttcatcgaacaagagactaccgcaagcgcgaggggccgagatatgagcagctgcgatcgttcagtcttctcccgttgaagcgcggttttgagtgttcgcacttcaagatgtgcaagcttggcttgtacgctcttttgagacgagcagggatccagatcccagatatcaaacgaaaggaagggcaaccttgttggaacgacgtcgtggacgagtggtggcgcaggctcttcaaggttacaaagtttgaaacgtgtgacgaggcggaatgccaagttcgcacacttctggtacaagcggctcagattttggacaggcaggcgtggacctgggcaaccgatgggacccagaccacttctgcacagcgggctatgaatatacagcacgctgttggtcggcgctcacaaatgtgtatccctttgggtcggttcttttgatcgaggcaatgtaacgagcccgtgcaatgcttggacctcgccactaactctccctttcagactcctttcgcaggg

SEQ ID NO: 91 - DNA, 14882 bp, unidentified
  source 1..14882: mol_type = other DNA
cgccagaatccaacccgccagtacctgccgcaaaagccccacaaatggggcacgaagttcttcgtggcatgctgcggcgacaccaactactgcatgaggtgcgttctatgcgaggagtctaaccttttttttgcccggcgagcttcggctcaccgggcttttttttttttgcttcgattttactatgttggatataactgacatttgtttctcgcatccaacatattatccaacatagactggagatgtttgttggtgcgaaaacgcatttgacagtccctgttccagcggacaactcttgcggtgctgcagctgtcatccggaacatgaatgccctagttccgccgtcctcgagctcaccgtaccgcatcgtagtgacggatcgctactacacttctgtggttctggccttggagctactgcaccgccgcctctacttcaccggcaccattcagacgcgacgagcgggctacgcagacggcatcattacaaagaagaaggtgtcaaagagtcggccatccgaacctccgcgtggcacagtgaagttggcggagaacaagacattcccgatgatgactgcagccatgtggatggacagtcatcccgtgcatctcctcgggactggaggcagccgcgtactcggcgacgtgtgtaagtaaaccctgctgtgatgaatggacatgcagttagaatgactgacacatattatgctgtgaattgtgtttcataaagtccgccaggtcggcaagaaaaaggagaacttccctgctccggggctggtcagggactaccagcgatggatggggggcgaggacatccatgaccagctccggatgcagcgctacagcgtgcagctggcctacaagccgaagaagtactatcgctcattatttctgggtgttgtggacatggtgatggtgaattgctacatcgtctaccgccattaccgtaaaatgactgatcagcgtcccgcgaagcactaccagttcttcgagttgctccatgagcagctcttggcagtggacgaggagaagtttgcggaaattgaggtgagacttgcctggtttggcttgtagctttctatactgattttgtttgtatttacacaggcggcaacacgagcggaagacaggacggcggcatcgccgcgaacgacacccacctcacaacgggccgctggtgggatcgaccctgggcataggtacgctgagtgccccgacttcgtggacacctccaagggcaagaagcgcgtggcgcgaagctgtaaggtgtgcgccgtgtacttggtggagccgcgcaagtacaccaagtggtactgtgtgggctgctcgactgctccattgcggtgagttgtgcagactcatatttgaatggtttcatacgtggtctaatggtaatgatgctctgtttgatcggcaggaagcacatgtgcaacattgcccgtgacggcaagagcaaaacgtgcttccaaatatggcatgaggattggcacaatggcgaagacatctcggggcagcttctggcccgtcaccgtgtccaagaccgccgaccaggtgcgcagagcaagcgcaaccaccggcgccgggtgaacatggctgaaggagtggacgaggagacccaacaaggggagcaaggagcggacgacgtgcttagcgtggatgaggaagctgaccaagagtcaggttgagcattgtgcgagcgggcggaatgtgtatttttgttcgtttttgcctttctctagtgacttccagtcagcgtaatgatcagcagaaatcactgcacctccttccttttcttttgattggccatcgtttccatgtgatgttgatgacaagacagcttttggccagaaaatggatactcagataaaaaggacgtcataaatgttggacccaccttattaatttattcgaatccgtctaatcggcgccaacatatacacggatatgctggatatgtcctgtcttgcacagaatcacctacccccttcccccatccttcccaatccaacaaaatagtacaaaaagggaacatatacaaattcctatattaaattatgctggagccaccaacataaaaataaaaatataccctagggttagctgccgggggttgaagggttaagggtcaacatcaaaaacggattggaaatgagttaccgttcgcaaaaggttgctttcgggcaatcatgctgacgtcttgctgctgattatgcgttgtttacttgatcgttgccaccacacacatgtcacttcacttgatcgctacgtggcatttgtcatccgctgtgcgatataatactccttcgctctcgatcaacactcgtggatttcccccgagtttacctcgtatcctgatacgtggccgtgctcaactgccagtgtcaacgccgtgctgccgtcatccgccatcaagtcgacctttgcgcctggaagcagaagggaactcgccgaatcaacatggtcgttggcggtcacgtgcattagtggtgtttcgctctctcggtccgggaaatcgacgtcggcgttcgctttgattagaagtccgaccgcttgctgcttctccttcgctgcagcgatccccagggcagttcccccttcttcagtggcgagatttgccttggcacctgcgtcgataaatacctccatcacctccaagtgtccctttgcggtcgcttccatgagcggcggccggtctttcgccaactcatgatccagaatagcgccgtgcttgatgaggataccggcggcctccaggataccacgttcagcagcgatccagagtgtcgcggtgttctcagtagtgaccgcgtgcactgtgtcggaggtttcagccagtacgaacttcatgaactcgacgtgtccactgtacgtagcagccacaagtggagtgaatccctcggagttactggcactcacggtcggcgccacgtttgagcagtagacgggcaactcgcacgcagttgttgtaggccgcgaagtgcatggcagtacaaccgtccgaggatctgatggcaatgtccgcgccgtgttggagcagcagcttcacgatgcggagattgtccagtcgcgtcgcttccaccagcgccgtgtggccgtcggcgttcagagcgtctacgtcagcgccacgcctcaccgcccgctcgacgtcctgccagtagccagccacggccgcagcgacgagagccatgtcgttcacaaatgattggaccaccagaatcgatcaaacggcggtcacgataaagaagcttgaattaatcgggagattgaagcacagctaaattaaaaccaagacgaaagcgtcaatgtcgcttttcgcacaagcaataatgctggagaatcaaccagctatcgcctagcaacccgagggcactaaacgacactaatgttgcgtgccttgtgtcggatatcttcgatttttcgttcgtttgcgaccggtcgataaagtgaagccgtgaagggtcaggagatgctgccgctggctccttggcggactctctgcttgccctgacgagctcccagcggggacaggttgcgaacgaaaaatcgaagatacccgacgcaaggcacacaacaaggcgcgagtgcgatcgtctgaaagtaagaagctcttcagcttattttgtgccgtttgatcgacgcacgcaagcaagcatgcacgatagagtctatcatgggtggagtgacggaaccgaaccttgcatctgtgttgactcgaacgctgcgggaactggaacgatctttggatcgatcatagatgaacaacttgtcttgctcttcgtattgctacctgcaaatccttcacgacgaccacccaccggctcttcattctcatttttcgccatgagcggcaagcgcacaaaggtggacccgctatataagaagaccaagcgccaacgctccgacgtcggccaacacaaagcacgaaataagaacactgagtgcagtgttgtaaagtgctcactgaagtcgttttgtcaggagagcgcgagcgtgttgccgtgggacagcgtgctcaaggacacaaacaaggcagtggcggaagcatacattctcgcaaacctgcgcgttgttcgtctttgtcaagcgggtcgacctattccagttctggaccaagagttctactaccagtatctgtcagccgtaagtgtgggtttgacagctcggaagaaggttgatgacgaagatctccggcagtctgttgaactgtacaagtcgtggcgtgatcccaacgtgtcgttcgctagcagtgctcacatcagttatggatggttccaaaacgcaagctcacagatggcaactaacgcttccaaccacgtcatcgtgaacttctatcgtcgttttcagaagtacgtaagcaacgcgttggcatcactggcaaagagcgctacgaactactgcgaaacgtgttagcgccaacgtacgcaggcagtgacgagcgtgtgctggagttccgtcgctggattccccgcaacgctgaaggatacatcaaccaggagaagccacacttgatcctcccggtgacgtatcgattcctccagttcatcgaacaagagaactaccgcaagcgtgaggggccgagatatgagcagctgcgatcgttctgtcttctcccgttgaagcgcggttttgagtgttcgcacttcaagatgtgcaagcttggtttgtacgctcttttgagacgagcagggatccagatcccagatatcaaacgaaaggaaggacaaccttgctggaatgacgtcgtagacgagtggtggcacaggctcttcaagattacaaagtttgaaacggagaaccgcaagtttgctggcgaaatctcgacggacgggaaggctgtgagcatcgtgctgcggaagccgaaccagagaagtcaccgagtttgaagaaggacccgatgcaatacaactttggcgaagtgtggggtctggatcctggtcgatgtgacctcttcgtggcgacgaacacctttgatgaaacgatcccatgctcaacacgagagttctatgaagatgcaaagtacacgtcgagcagcaagacgactcgctagtgggctgatcacaacctgaagatattggaagcgatccgcaacatgccttcaccgaagacttgctctcttcagaagttggaagcgtatgtgaggttcttgagtccacgactcgaccgcttgctggactttcgcatggcgaagccgtttcggaaactcaagttcagacgatacatcttcatgaaaaacaagcttcgagagctgtgtgcgaaattgactgcgagagctggagcgaacactctcgttgggtttgggaactggagtgcaaccgactacggaggcttcatcaagaagtgcccagcaggtccagtcaagaaactggagaaagagttgaagcgctactgcgtcgtcgaatccgttccagagtttcgtacaagcaaactacacgcggactgccatcgagagctgacgtatcagtatgctctgcgcacgtgcaaggacggcatcgttcgtcgcgtcaaggtttacagtgtactccattgtccacacaatggctgctttggtatgactgtgaatcgcgaccagaacgcgtccaagaacatcctcctcctgactctgcctcattttctgggtcaagaccgacacccagcgttttgtcgacagggaacgtagtgtaggatatagtgtcgtttgatgccctcgggttgctaggcggtagctggttgattctccagcattattgcttgagcgagaagcgacatggacgcttttcgtcttggctgtaatatagtacatttgccacgttaccagcaagaatcgaaaattacatgatcgtagccaggggggtacatcgtaacccagtttcccgtccgccaaaggccggagcatattggatccgttccctcggccgtgatggagaacccgtcgttggagcgcacgttccgcggccacaagtcggcggtgacgggcgtgagcttccacccgaatgtgcagcaggtggcgtcgtcgtctctggacggcgtggtgatgatctggaacttcaagccacagctgcgagccttccgcttccgcggtcacagcggacccgtccacgccgtgagcttctcgccgacgggggacgtgttggcgtccgcgtcgcaggaccgcaccgtgcggctctggacgcccacggtccgcggcgattcggtggtcattaaggctcacgcgggcgccgtacgcagcgtgagcttctcgtcctcgggtcgggagctgctcacggcgtcggacgacatggcgctcaaggtgtgggcgttgcccactcgccgcttccgctgctcgcttacaggtcacagcaactgggtacgcagcgcaaggttcagtgccgacgcgcgacgtatcgcgtcagggagcgacgataagaccgtgaagctctgggacaccgaagcgcgtcgctgtctgcacacgttctatgaacacgcaggcatcgtgaacagcgtcgcgttccacccgacggacaatggcaacaccctggcgtcatgcagctacgatcggagtgtgaatctgtgggatacacgggcgggacggctggtgcaccactacaaggcacacgacgctagcgccacaagcgtggcgttccatccgacaggcaactacctgctctccacgtcgcacgacaactccatcaagctctgggacgtgcgtgaaggccaagtgttgtacacgctacaaggtcacgatggcgccgtgaactgcgctgagttctcatctgactgcaagctgctggcttcgggagcagtggactcgtgtgtcctgatctgggaggccgatctggacaagtgtctgcagatagatcgccctccaccgcaggtcgaagcgacttcggcagtggatgagcagcgtcgaaatggcagaagcaaggaggagagcgtcgactcttccgctagcagtcaggtggatacgggccgacgaccagcagcggagaccccggcggcttctccgcccccgacgcccacggctacgccattgccgacgccgcagcagaagcctcgacacccatacgcggcgtctaagtatgagatgcgacctacgcctacgatctccccgatgaaatcgccatctcccagtgcatcagccgcgcagccgcctccagctccgcttcaaatgccgacgacgcctgggagcgaaccaagatcgacttcaagtcgagaggggacaccgacgagtcgcgtgaatggggagcggtactcgatggatatgaacaccacgctgcagcacattgtcggccagctggagatcatcactcgcacgctgtcggtgctcgagcggcgaatctccatcaacgaggaccggatctgcgatatggccaaggcccagaaggagctgctcgagcgtcagaagcagcagtctgcacggcgacctgacctgtgaaaggagaactgagctcaccaatatcttacccgcagattggggtcatgcagcaaccttgcgtgccatcagagctccttcacattgcatgactcgccttgccagtgttgtccgttcttgaagacttgctccagttgaatgtcgagtgtattttcactgtcttggtcgctttcttgagtcaaagccgagcgctcctaccgcgtcaccttctatctgcaaaacgaaagcagccaccaccaatgtatccgccaatgtatcctccatacgagttcaggaactgacctcaacgcaaaagctgcttcacgctttggcaaagtcgcttcgcgtcccccaacgcaagtctaaagcgtggccgtgttcgtcgaccgtctacttcttcgcggggccaaacagtccgccatcagcatcccaatcggaatccgacgagtcatccgagtccgactccgcggcgcgcattcgagcggcagcactggggatcggcgggtgaacgaccggcgctgcggtagtggccgaggaggacggcgcgctgaacagcgacgtcgatggtgctgtagctgcctgaggtggggcagtcgtgacggacggtgccgcggtcggagtcgccttggctggagcaggcgtcgatgtcggcgcgccgaaaagcccaccgtcgtcgctccagtcatcgctgtcgtcgtccgaagagggcttccgattgatcagcggcctagccggcggggcgctggtcactacaggagctggcgttgggacgggtcgcgcgggtgtcgcaccaaatagtcctccagcatccgactcggcctcgctggaatcgctgagcacgcgggatggtcgagtctgagctggcgggacaactgcaggcttggcggcgacaggcttggctttagctggggcgccgaacagtcctccatcgtcatcatcgtcgctatcgctgtcactaacggtccgtgtgagtacaggcggcggtctcgcggcaactaccggaggttttgccacggccgggggtggagcagacgcactagtcgacttcttcgcgccgaacaagccaccgttgtcgctatcatcgctgtcgtcgctgtcgccctcaccaaatagatcactattcgaagcacgttgagctggctgagagcggggagttaccgccagagctgctgcaggcggcttagtggcaggtttggcgccaaagagacctccatcgtcatcatcagcatcatcgtcactgctatcggaatgcgtgctcgctcgtggagggatccgagctggggtaggaagcatcaccggttgtttcacagccggagcaggtgttttcttcggtgcggcgccaaaaagaccgccgtcctcgtcgtcctcgctgctgtcgtccgagaaattgagacgctgcgagcgctgtggaggtggtagcactggaacacccgctggagccttcttcgtatccgctttgacgttagattcacgaccaaagagaccgctcacagttgactcagcctcgctgtcgctcgcggaaaagtagcttttcttcgattcgagcgcaggaggcgggttcgaagtggtttcgcccatgggcggcaagcggaaaccttgcggaggcgcttgggtggtgggcgtcttgggctccttcgagctgccaaacaacccgccgccctcttccgacgatgacgagtccaaggaatctgatcgtcgtggtgtcaaccgcttgctgctgccacgccgctttggggtactgctactgccaccgaacaggtcgtcgctggtcgaggactcctcagcaaagagagacggtcgctgcttcggttcgtccacttcgtcggtagcgaacacgcgcggcttcgtattggtggtgggtgccgagccaaacaaaccggcgtcactctcttcgtccgagctgtcgaagaactggttcttccttgctggggtcggcgcagcaaaaggtggcggcgcttcatgttctcggcgactcgctgcgctctgtttgcgcttgggcgtcttagcaccatcatcatcgccgctagtccactcgctatcgtcactctcttcctcgtcgtcatcatcgaaaacggggcgacggcgagagcttcgagacgacgaagctctgggcagcgacggaggtgcttcggccacaggcggacgaccgaacagtccgctagtgtcactctcatccgaatcagcacgtcggcgcggaggtggcgcagcgactgacgaatcatccgactcttcagaactggaacgatgacgcgcagccccgcgcttccgacttttcggcgcaggcgacgcatccgaagaagacgccgactcggaatcagagtccgagctgctgtatgaagaggcgtactccgagccactatcgctgtccgagtcatcgtcctccggagcagcacccaatcccagcgtctcgtcctccaggaactcgcgcgtaccgatgataaacggcaacggccgctcgttgtagatatccaataccgtgtcgaactgtgaggacgtctcgctcttgccgtcctcatcctcgtcgtccatcatggcgaacagtttcatagcctccaagcccatgtccagcgcggagcggtacttggtcacaatggactcagcggctgccttcgttcctccgtcctgcgccgcttctgctggcgcgtctcccgcggcctccgcagcctccacgccggtcttgtccgtttccttattgtctgttgtcggctgcgaggtctcaacgccgaagaaatcctcctgctcctcgtcgtacacgcgattctcgatgaactggttgttcgagagcatcaggaactggttgaaggtgtttttcagccgcacatgagccgaatcggcctcggccgcgatgtcccgcacgctgttctccaagtccttcgtgcgtgcgaacaagtcgttcgagtacttcttcaggaacgcatgcagatcgtggtccgagtgcaacgtccagttgggtacttcttgagccaagtccgacagcgtcttcgcctccggagccttcggcaggcccgtttcctccgcgggttcggcctgcgcgccatctacggacggaggaggcggcgggggagcgaccaccaacgcgccctcgccaccgggggcggcctccagcgccagcatctccgccatcgtccttcgctctgattactgggctttccttctgatcgtgagattgaagagggggaatgcttctggaaatttagagctagaaacgcgtttctaacgacaacgtgtgcgtgcattcggaaccaggtttacccttgattgagtgacttcatgagttcccattcatttgtagcacacatactttatcgttgcaacaggcgtttcccttggctttactgaccggcacacgacagcaaagtgtcgcagggaaggttaatggatatttctaacgtccatccacacgcaacgcgaaattgaagtcactttccatttcgcccgcggagcatcaaggcaagttgaagagggaggaggaaggacgagatggagccgcgtcgccccaagcacaagcaggcgccgccgctggaggtaccgcaagcagagctggagcgcgcgctgcgtgacccgaaggcgtacgtcttctcgaactcgaatgcggagcgcgcggcgttcccgcgcggggtgcccgccacaaatgaggacggcatcccagtgatccacacacacatgtcgatggtgttcttgctgcctgagcgcgtatacaaggtgaagaagcaggtggatttcgggttcgcagacttctcgacgctgtaccagcggtttcaagcttgctttgctgaggtgcaactgaatcagcgcctcgcgcccgaggtgtactgtggcgtggtgcccatttcgatgaaacgagacacgcgcgagatctgcgtgcgctgcgacgacttctggacgcttgagaagagtaacaacttggactattggcttaatgacgagttcggagagattatcgagtgggccgtgcacatggtgcggttgcccgacgagtgcacgctgctgcatcgtatggatcagggcgagttgacgcagcccatgctgactcaagtcgccgagaagctggtgaatttccatgccaatgcgcgtcgaggaccctgcctcgaccaatttggtcaagaaaacatgattcgccgcaatattgagcagaatttccaacaaactgaggcacacgtgggtgtgacagtcagcgaaccggtgtacaaccgtgtgagggagttgacgtacgcacgcttgaagcagctgaagcccacgttagtctctcgtgtagagaacggttatatctgcgacagccatggggatctgcgacttgagcatgtatacatgctgccgggcaaatcgaccgcaggcaaagagacggcgcgcttcgtcattttggactgcatcgagttcaacgagcagttccgcttcggagatccgctgtctgacgtagctttcttgatgatggatatctggcgaaagggccgtccggaccttgcgcggttcttgcaaagccaataccttctcaaggcggttcaagacagcccagagaatgccagcctgtttgcattctatgcagcataccgcgcagtggtgcgggccaaagtgagcggctttcgtgtgatggacaccactttgtcgacagcgcagcgcgcatccgaggcccaacgctcgcgctgttattggctggtggcactggaatttttgagcccgcctccgcagcgaccctgcatgcttctcattggcggcctcccagcaagcggtaaatccaacctggcgcgaatgctggcaggtgatgacagctccacgatttggctgcgtgccgatgcaattcgcaaagaacttatgaagcagcaaaaggcagctgcgagcgagacagaagatggttcgctggttaagggcggagggagcttcgaggaagggctgtactcgcctgaaatgactcagcgcacgtatgacgagatcttggcccgaagtgttgagcacttgcgtcagggcgggcgggtgattgttgatgccacatttcgtgacccgcttcagcgacagaaattcgtcgcagcggcacatagtgaaggtgcactctttgcgttcatcatatgtgagtgcaaccgcgagattatcaaaggccggctgttggctcggaaggacgacgtctcggacgccacctgggaagtttacgaaagcatggagaaggagtggcacttcccggaatgcagcacgatggcagagtgcagcgttgtgaacacggagaaggagcaagagttgacactgcgtcgtgtgcaggtattcttgcgcaagatcgggttgctctaactggtgcgaagtaagcggtgctgaagctcgagcgtatcttgagacgacgacgatggagtagctggctagtacggagctttgcagacaatactgcacgtagtacgcgctgacgctggcatgttgctggtgaaactcggcagattgaagatggagggagatacagctcatgacaggatcgacaattgaaggtgcttgctttattttttttgtttttttattttctgtgccacattcggcgggagatttgacggaaagcccttccattacgacgtctgctgttctggtgctgaaggaggcgacaccatggactgcggcgcgattggctgttgcttgcaaacgcatggctgctccgaacgcccgccacaatagcagcacttggtaagcactttggagccgaaggtggtccgccagtggggcggccacgtcgtctcgatcgacgcacgcgcgcacaagcgcacatagaacatggccagtcgaggatacaggccatcgagctgcaagccacaccggacagcgtacgcgatgttggtgaagagcgtgaaatcgcataaatacggcgtgtccgggtccacgaggaactggtggccgttcaagtacgcctcccacagactcagctcgttctccacggacgcccatttggcgtccaccaaggccggattgcgcttcccttgtgggaatcgacgcagatacaccaccaagtcgcccacggcggacaggatctcgttcgcctcgtgcagtcgcgactgtgccaccgcgtacaatgctggcgactctggcatacaaggcatcagcgggtacttcttctccagatactcgagaatggcgcccgactcatacacaatggtgcggtactgggctgcgtccggcgtcaagaggcgcgagatgcccattgccgccgctgccactgcgtctttcgtcgccttagcagcatcgctatctccctcggagaccatcggcagctctgccggctccaccagcacagggatgcgcatccgcgggttgagcgcacggaagaacggtgtcttcaacacgccgctcgagaaactgacacatacgctgcggtacggcagctgtttctcctccagcgcaatcaggatccgccaagctgttcacgcacaaccacacacatgtacgtgaccatcgtcaattcctggaaatgacaggatgacacgcatccatgcagcttttgccgcctgctctgagtgctcagacgcaccctgtggactaccagagccccagtacaccacgcgctcgtgcggcagtggcgccgcgcgcagcagctcctcctccgtggacaccagacgactggcgtccgcttctaccgccgttggttgccgccgccccgcctgcatcatgatctcaggtacgcgctgcttgttctctcgcccttcttcgctcaaatcgggagctgtgggtctgtcgccttgatgcagcgaggatgggtgtggtgtgtgtgcgcgacggagaacaggcgtatgatacgcgtccgattgaagcgtgcgatacgcttgccctgcggaagttgatatctgtgatgacgcgcgtggcgtgacgttatgttggtggtggcattctctcccattttttgacgaaccaaaggcgcagagcgaagggatgcggccaatcagcgtcgcgaacgacgccgaggtggatttcgcggcgaatcttgtgcaatcctttgcgctcgcagtccgtccaagcaacgctgccaatgacgagcatcctgccgcgcaggtgtccgcgcacccatccagcgactcgcatcgatgatctcatccacaataccagaggcttctcaacgctgtccaagctccgccaacgcgaacgttgaatgggttgcagcttcaaagcaatccgtgaagtgaagtgagaggacatgatttcgactttcagacgcatcggccgagtggatactagagtactggtgtcacccatgtccagcatgttcatgcggttgatggggccaactcaaaggtaccatcgcaacctacgttaaaagcacgttatcgctcgctaacggacgttaccagctgcatagtcagctctacattccgccacggagtgccgagttgcaatggcgacgatgcgcagcttcagtcattctccacacgtcgccaccacccacccacatgttcatacgacttcgctggccgtggtggcgctcgcgtcattcccagaggcggcacgactcttgcggattcgctggcgcaaccacaagtcgcgcagctcgcccggag

SEQ ID NO: 92 - DNA, 4085 bp, Klebsormidium sp.
  source 1..4085: mol_type = other DNA
atccgtgaccaacatcaacacgatcgaatgcacgaactacatgaatcctccggctcctcgagtggtggtgagcaagatgataggcaagccgggcgaagcccgctcgttcgactgtgggcccgcgggcctcagcggaatgctcctgaaagcgtcggccgtggtggattccatccaacccatctgcggcacggacctgggcacgaaggacgtcaacgcgtacatcaaaggctacccctggtccaccggtgcttccatcggcggacctaacgcgccccagttcgctcaatggtgtgcagccggcagtcgaccggccggcgacaaggctctcataacatccatctcaggaggcccggcgaacaacggcaaccaccctaatgatctcagcaagttgtcgttcacgtgcaaagactttgcggaaatcgatgccgtgaagaacgatccagagcggacggcggacgtctgcatcgggacggatccgctgacgcccgaactgtccggcgcgatcgactgcaatggttcgatgaagggttactgcaccggtactcgggcctggtccaacaagtgcaacatctacgtcggcaaggttccgacgcaagccgccgatcaagacagagcgaagatggaccactgctcgacgggtcagaactacaagagtcaggtctgtcaagacttttgcctcgccggcggagtcgacatgtacgtccccggcggcccgggaaggcccgccttcaaagatcagtgtaacgtgctctatgcgaacaagtgcaagggggactcttcggacctgtgctcctgcgtcaacaaaccccgtctagaagactggggggcggaccagacgtaccaagcggtgatgagcgccgtgaacggaacggcaggagcgaatcgcaatccccagtgttacttcggaccttgcaaggaaagaggctacaaggccgtcagcttctcgaaagctggatgcccgagctgcttgaacagcatcaccgtctcaggaaccgacggaggagtcgctagcctgggcagtgccgtccagtcctgcctcgccagcgatgcgccggcaccagccgccgctccctctccctccaagagcggcacgtcctccggttcctcggggtcccttcagacgccagcgccctctccacccaaggggtggctgtatgctttgctcatcctcatcgccgtcgtcctcgtcgcagcgctgctcgagtgggtcttcacaggcgacaaacccactccgagacccgcagcttccaccatgaaccatgcgccgacctagccggtcttcgggaaaataatctgatcttctttccgaacggtatgtcggaacccttaccgcgatcgagcgattcgggcgaccagacctcgaatcacaactccgacgctagggctaagaaaccgccaccgagtactcatccgccaaagaagaacatggatgcaggcgttccgcccccgaaacccatcgaacgttccagcagctggttccgttacctcaccggatcttggttctaaaagttgtggaactactccctatgcatttagagtctgcgtaagtctgcgtcccaaagaatgtttgatgtcgagaagcaccgatgggtattgacgtttacgccatttgtccagacacgcttattcagaagagcatggaatccaggatgttagaagagcttggctggacggaacccagaggtccttgctgctgccagctttgcttctcgatcctactcaatccttctcgaaacctatcgaacttcggtcacgtcacaccttattaagaccgaacaacattgctgaggtcaccctgccatcgacgcgcctataaaagcccggattacaaacattctctctcatttccaaagatgctccctccacacaatgttcctcggcttcaaggccgccaaggcccacttcggggtctcctcttgcacactccgaaggtgggccaatgaagccaaggtcgtctccaagcgcaccgctggcaaccacagggtcttcctcgccgccacctcccaagcggaagaaggccgggaacgcctcgcctactgccgtgtcagcagctccaagcagcgcgacgacctgcagcgccagaaggactttctcgctcaccaataccccggacaccgcattgtcacggacgtgggctccggcatcaacttcaagagacccggactgctatcccttctggaacgagtcttgcaaggccgagtatcgcaagtggtggttaccagcaaagaccgcctgtgccgcttcgcgttcgagctccttcaatggatctgcctccgccaagggacacagatcctggttctcgattcaggagacaagtcaccaaacgaggagtgcacagaggacatcctggccatcatgcaagtattcgctggtagatggaacggcaagaggcgctacaagcagggaggcgcgcgcaagcggggctcccccgacggcagttcaggtggctcgggcgtgcccgactgtgtgcaggaagatccgggccttcccgacggcgcagcagcgcaacatactccggaggctggtgggcgggtgcaggaagctgtacaacgaggcggtctccatgatccgggatcgcaggctgccgttcgcgagcgaggcggagttccgggaggccgagcgagagcgagggctccggctcgccgagcggaagcgcaaggccagaagcggccaagaggaggagagcgggcgaggggagggggcgggagcgtacaagggcacgaagcacccgtggctcgacaaggtgtacgtgaagaactttctggtcccggagaagagtgcattcgtgcgggcgaacccgtacctgaaggacgtgcctaaggagacgaggcagcaggcggtggaagacgcgatcgaggcgtgcaaggcggccctgagcaacgtgcgagcgggcaacatcgagcacttcagcctggggttccggaagaagaaggacccgcggtggtcgctggcagtggcgttcaatgcggtttcaggcagcaggttctggccgcgcaagatcaaggagttcgggcagctgcgggtggcggagccagggcacctgaggccccactacgacagggagctgaaggtctccaaagacgagctgggccgctactggatgctggtcctgagtgcgaagggccccgccaggggcacgaacgaggctgcggccagggtggaggcgctggcagagtcgacccgcgagaaccaagcgggggaccggcccgtagctgccatcgaccccggcgtgcggactcggcactcgatctacatgacggacggcagggtggtggacgtaggcgggggagacatcgcccgtgtggtgcggctctgccgccacgtagaccgctgcatctccgcgctgaagaagggagaattctgtgtgtcacggaagcacgtgaggcgtgagcctggtgcgtctactatgcggctgttcgaccactaccgcccggccaagaaggagcagggggcgcatgtcgtcccgctagacgggcgtagcagggagcacattcgggcgaagatgcaccggctgagggcaaaggtacaggcgctgaaggacgaggtagacaatcagacggttgcatacctggtaagggagtgcaaggcggtgctcctcccgccgttcgacacgcatcgcatggcgacgcggctgaatcacaagacggcacgggcgatgatgcagtggaggcacggggcattcaaagccaagctgttggagcgggcagcacggatgggcgtgcaggtgatggtcgttccggaggcgtacacgagcaagacatgtggggcgtgtgggtggctgcacccaagcttgggaggggcgaagacgttccagtgcaggagctgtggagtggagttagaccgggaccacaacggtgcccgtaatatcttcctgagagcaattcggtcttggggagtagatagccccgaatgaacctggcgctgccggggacgagtcggagagatggctcctagtcccagaagtatgaggggcttggtactaggctagaggtaggagatagcacggtacacagaaactgagtaggattacttaagtttcaaccatcggatctgtggcagacggaagtgtagtctgtccatatcat

SEQ ID NO: 93 - DNA, 18004 bp, Klebsormidium sp.
  variation 3787..4166: note = n is any nucleotide
  variation 9044..9095: note = n is any nucleotide
  variation 11581..11600: note = n is any nucleotide
  source 1..18004: mol_type = other DNA
ccggattgatgtggcgattgaagagtttctgggcgtccaccacgaagtacctaggtttctgatctgcactctacacttcaccatcgtttaggcggaaggggtcgaagaaggaaaacttctctactttgtctttcaacggcgaccaggcgtgatcgaacgagccatacgtcccggcaacgacgcgtttcaaccgtggtagcgtgcagagcgactaaaaggtggattctacatggtcaatgccagtccatcgcgagcgctatgttagggaactgctccttcatgatgtccttgatcttcgatgctatctccttgtgctcgcgctgtgagccgttgctactcctgaggtccacgtaatgtatccagtccctcgcgttcatggtcatgtacagcttggtctgcgtggacatgggcaggacgaaacgtgcacactcctttgctatgcctttctccaatgcctgcgaatatgtggcgtacgaatccttccacagcctatcctgctccgccacgaaccaggccttcacgtctggcggcaggtcgtccacggacgactgcctgttcttggggtcctggctcctggcttcgtacaccacgttcgcatcggcctttgcatacctggtgctgaattgctgaaaagtagccgacctgtgcctcaggatctgctctgctatggctctgctggtggttatctcgaccgtcatggaggcggtctcgaagaccgaccagtgacgattcttgatgcaataacgcaacagcttggcaccgctctcgtagttcctctggttctggggattggaaacccgcgcggcgtgcactatgatgtcctccggccctagcccctccagttcgcccgcgcctctgctgagtgccaccagcttcacctcgcaagctgccatctttttatgtggactacaaaaatacaaatccagtgcctaaaccgacacatcactttcgtagcacgttcagaaacatcccgatcatctccccgtgaccctccaaggggtatactccgcctaccgcgtcggtcagtcgccagcaggtgtatatcgccaagtctcggactctggattcgatactcaatctaggtatggcaagagccagctgcgagttcaatctacgcagacgttctccgttatcgtccttgcagagctccatcttggcaatgatctccagcagcacccacacccgatcttccaccgtggactcgggagacagagtcgagaatctcctttggagctcgcccaggacctcggcagtcgtccgaaaccacatccttgtctgacgcaaaaggaaaaaattggatccatgcacccgaagtcgaactttcggacggtatgctcgcagttttcctacgcccgaaaccgaccgcccgagaaatttctttcgggcgccacctttcgcgaaaatatactcgtaggtttttcacgcccgaaaccgaccgcccgagaaatttctttcgggcgccacctttcgcgaaaatattctcgtaggttttctacgcccgaaaccgcccgagaagtttctttcgggcgcttttcaagcagtatgctcgcggtatgcctcaaagcgaaagcccgagaagtacttttcggacggagatcgctctataaaaggaggttcctctcgttctcattctcaaaaacgcacttggcctcccccttcccaacagcttgcaagcaactccctcgcacacagcatccttctgcctatctgccctttcagcagcggcacagcttagccgcttccttctctcccaacagcaccctattctcccacagctcgcttccctttcctccactcaccagccagcagcacctcatactcgcacagctcgcttcctccaacaccagcagcaacgaggccaagtcgcgtcagatagtcacgccggccggccttttgccttgtccttgttttcctttttgctggtctgcgcagacctctcttttcttcttcgtgtctctgcaagcctggccaggctgtcgtgtcatgctgctcttcggcagctcttttttctgccgtgtcttagctgggctcccgcttctttgcggctcccctccactgtctttgtctttcgctggcctctcgggccttgtagctgcctcgtgcagctccttccgagaagtatcaaggtgagcattagtgaagtaggatatcttgaagttactccatgatctgcttctcgtttgctttgcgaaatatttgcatagaaatgttccctctgttgctcttcaaactcgttgtttgcagcatcctcgcatcgactacctcctgaggctccgctcgcatccgctagctggcctctcggcccttgcagctgccttgtgccgctccacacctatcaatcagataagttccctctcttgctctccaaacttctgatgtttgcagcatcctgcctccttgagtaggctccgctcgcacccgtcgggcagggtgccgataagagcgagcatttgcggctctgtgggtagtgccgtttgtccacggtacgcataccactctgcctgtaggctccgctcgcacccgtcgggcagggtgccgataagagcgagcatttgcggctctgtgggtagtgccgtttgtccacggtacgcataccactctgccttttcactccgtctgacgatgtcgaaaagctgtccgagctactgatcacttttacgctccactcacaggtcctgatcatcgagccttttgacgagcggacgcgactggagatcactaccctgtgcctcgtctacgatcaggggctcgacacaccatctatggtccagatttgaatcaaacggaggcaagtctcgactgagtcttcgaatgcattcgctgctgagtcatatgcacagggcgtttcgttccttcgtagcagcaatgacaaaatcccccctgccgcctttgtcttaagagtaacatgtttctttttcttcttacaggatatcgctcgccgcatggaggagtcttcgtttgcactctgagtcctttttctgggcgtgtgctttctatgtgacgtgattctgggttcttttctgggcgtatggaatgatttttctgtgacttttcttcgacttcttggctgtcagtctgtctttctgtctctgtcgagtcggtcggtcggtcaagtccagtcgagtcggtcggtcggtcaagtccagtcgagtcgagtcggtcggtccgtcgagtccagtcctgtcccgtcggtcagtcccaccagctatacacaccctacactagacaccctacactatacacacccctcaccctcttacccactccaaataccctactgccttacccttccctcccacacaccctacttcttaaccctttcctcccacataccctactgcccttacctattcctcacaccctaatactacccttacctatccctcacaccctatactaaccttacctccctcacaccctatactacccttacatatccctcacaccctatacttacccttacctatccctcaaacacacccgcagtagaaccacagatggctgctgcgacccgcagctggggttcgattccccatgtggttggacgacgttgcacatcgaattattgccggttgagattactggttgtgaatacgtttcttagtatacttttctctctacatcatgaagacaacaaccagcaaccagcaaggttggggaacttaagggagttcagagatcgatctgtccaatctagaaagatcagatcgatcaccccttttcttagggtcattgaaaaatggaccggttgccggttgctggatggtgacgtggcacatcgaaaagnnnnnnnnnnnnnnnnnnnnnnnnnnnnnnnnnnnnnnnnnnnnnnnnnnnnnnnnnnnnnnnnnnnnnnnnnnnnnnnnnnnnnnnnnnnnnnnnnnnnnnnnnnnnnnnnnnnnnnnnnnnnnnnnnnnnnnnnnnnnnnnnnnnnnnnnnnnnnnnnnnnnnnnnnnnnnnnnnnnnnnnnnnnnnnnnnnnnnnnnnnnnnnnnnnnnnnnnnnnnnnnnnnnnnnnnnnnnnnnnnnnnnnnnnnnnnnnnnnnnnnnnnnnnnnnnnnnnnnnnnnnnnnnnnnnnnnnnnnnnnnnnnnnnnnnnnnnnnnnnnnnnnnnnnnnnnnnnnnnnnnnnnnnnnnnnnnnnnnnnnnnnnnnnnnnnnnnnnnnnagagatcgatctgtccaatctagaaagatcagatcgatcaccccttttcttagggcctctgaaaattgatccggttgccggttgctgggtggtgacgtggcacatcgaattattgccctgacatgcggtgggatgccctgttcctcagggcactggcgttcctcctctgaaggcgcccagagaacaaagtctccctcgttctcgtaatgatcatcgaatccttcgcttcgatgtacgccgatcgggtccatgggcgcgatataggaaggtcgcacgaaaagtgacgggtacgcggatatggaccctagattgcacatcctgtcggtcggcgaagagcgcatcgtcgctacttgtctcgcggacgtcagagacaggaccaactccctagccgctcctctgatcaggagtctcagtgacagaacgtgcacggccagggccgtagagttccgcgactacatgttcgacaagcagtctctggaggccttgagcgagtacctctccacatctacgaagctggaaaggatagtctttgggaacggctgtgcttccgagatatgcatggccggggccagcttgtctagagtgatcggtgcgtgcgacagggatgtcttcatagagggctccttgccgcgggcgatgggccacgtgagcgtcatccaggcggccgaccctaccgggcagcgattgcgacgggctctgctctccttcgagccggagcactgggcgtacgactggtcttccgactcggagacgctgggtctcatgccttccgtcaccaacggagacttcgtctggactcgactacatccggatggcatcctgaccttgaacgtcacggacgaggatatgctacaagtggagtggagcgtttgcgcgaacgagctcaagagcacggcgctacactctgcagacgacgtcgcctcattcgccagggctcctcgcactttcggctccctagagagcttgacggtctcctcgtgcggatccaagggactcacttacttcggacggcacctagcggcggagacgcgcgtgagacgcatccgttcggagggtccgttggcggactcggtggctctgttgaagggattcgaggaagggctcgtcgaggggagaccctatgaggccgagtgcacgtcgcatctcgctcatgacggattgggcgtgaggctccgcaggctggagaatctgtgcttcctcaggtgctaccgtctgactctgcacgtccgagtagacggttgcaacggtttcgagaggaggcgcttcgacgagaccatgacgttcctgctcgggtggttcccgaagctggaggccctggaggtggacatcggcggagactctatgggcggcccttaccaagggtgcgtccccatagggcgcttcgcagctgcggtgccgcggacgttgaaggagctgcggctcgctttcggtggggcgtccacgctcttctgtgccgcgagtcggctccacgagttcttagaggcagctcgatgccggttgcggtatctcagcatcgagggctgggcagccggagcggaggccctatccagagtggtacggatcgagggtctcgagcgactttgcatacctcaggcttgcacctccgtagcaggcttgaggaacgctttacggagacggatgagagagctcgacgtgggaatctcgctgctgggcaggagggatatagcagagttcgctcgcctcgtccagagcttcgccagacccacccgtccgagcaagctgctgttgcggaacggcgtccgaagcgagatgatgggggagctaggacgagctctgagggcagcaggatgcttcgactacgtctacacgtctgccgatgagaagacgatcacgatctggctcgctctgcccgaggaagaaaaagattgccaatgacagtaggaagatgcatctcttctctacttctaccgtcttggtcgtagcccgcgttctcttgttcgcatgcgtcaccggaggggtcatgtggtggttctacctgaaggaggagaaaaggaccaagcgccctgtaggagtggtaggatcgtgcgatacggagagagtcgtgcagccccaggaatcggaaaagactccggagttgcaggatataccccctggtcacgaaaaatacgctaatgtattcgagaagcatgccgagaggttcgacgatgcatacgataagatccgggaggagacactctgcctggccaagaggaggcggcagtattccatcatgttggacgcttcgtccaggtgcatgcgttgcctctacaatattcgcatgtggatgcacaacgacctcgccatggaggaacgcatgcgcaccttcgagctcatatgcgacgactacttcgccagatgcctcaggcatgcgtatgatcgttcgtacactcctgccgacgagacgctgatcccgcggcgttggaataggaggtggtcggatccatctccgagcgtcgcgtgaaagaaatattctgagttgagatacggatctggtctataccgtccgagatgctgcgttggcatactgctgcgttggcgtgctgcgttggcgtgctgcgttggcatatattgctgcagcttctgcagcattgactagaaaacacggcctataaagaaggcattaggcaccatgtgcgtctcattctaaatctttcttctcgacatgtacagtagctttcggagagctaaggaccattttggcgtctcctctagcaccccgcgtagatgggctaatgaaggaaagatcgccaccaagcgcaccgcaggcaaccaccgcgtcttctccatccccagcctcgaagagaaagaaactcgggcatgcatcgcctactgtagggtcagctcctccaagcagcgcgacgacctgcagcgacagaggaggtttctatctgaccaactccccagacacgagagtgtctcggacgtgggctcggggatcaacttcgagagaccaggactgctatccattctggaacgagtcctacagggcagagtatcggaggtggtggttgccagcaaggacagactgtgccgtttcgcattcgagctcgtggcctggatattcgaacgtcaagggacacggatcgtggttctcgatacgcgagataagtcaccgagcgaggagttcacagaggacatcctggccatcatgcaagtattctcttgtcgatggaacgggaagaggcgctacaggggtccacaagagcgggggcgcgataaaagaagcggaggtggctctagcattcccctcgaggtgcaggaagataagggccttcccgacgggacatcagcggctaatcctgaggaagatggtgggagggtgccggaaactgtataacgagacggtggccatgatccgggacaggcgtctcccgtttgcgaacgtagaagcattcgaggaggcagagcgacggcggaagaccaggcttgaggatagaaaaaggaagaaggcggaggatgatggctccgagttcgaagaggtgcactacaaggggacgagtcacccttggatggacaaggtgtacgtcaagaactttctggtgcccgaggacagcgacttcatgaaagcgaacccctacctgaaagagatacccaaggagaccagacagcaggcggtggaggatgccattgaggcgtacaaggctgccttcagcaacatggcagtggggaacatcagcaactttgaggtgggcttcaggaagaagaaagacccgcgttggtctatcgcggtcgccttcaatgcggtttcggggagcaggttctggccacgcaaggtcaaggatttcggagagctggtcgtggcggagccacggcacctgaggaagcgctacgggcgggagctgaagatctcgaaggatcagctcgggcgctactggatggtcatcatgaacgacaaaggacccaaggctacgacggaagaggcggcgaagggcgtcgaagagctgcgcgagtcgacccgcgagaaccaagcgggcgacaagccggtggctgccatcgacccggggattcggactcgacacaccatctacatgacggacgggcggctcgtggaagtggaaaatcaggacatacagaggatcgtgcgtctctgtcggcacgtggacaggtgcatatcggctctgagcaagggagagctcgcggtgtccaagaagcacctgaagaggaacccgaaagcatccgtgatggccctcttcgaccactatcggccttcgaagaaagtccagggccagcatgttgtgcgtctgagtggcgaggacaagaacaggatacgacagaagatgcaccaactgaaggcgaagatagagagcttgaagaacgagatagacgaccagacggtggcctacctgcttcgcgaatgcaagacggtcctgttgcccccattcgacatgcactccatgtccacaaggctgcaccacaagacggcgagggccatgatgcagtggagacacgggacgttcaagaccaagctcgtggaaagagctcccggccggggggtgcgggtcatgatagtgtcggaggcatacaccagcaagacctgcggggcgtgcgggtggctgcatcccagtctgggtgggagcaagctatacgtctgtcgaaggtgtggggtagagatggacagggaccacaacggtgcccggaacatattcctgagagcgattaggtcagaatgagccccatatgaacccggcgtgccgggggatgggtcggagagatagctcctagtctcagaaggtttgagagacttggcaccaggcgagaggtaggagatcgtacggtgcacagagacttgagcaggattgcttaggtttcaactatcggcggcgatactcaaccatgttgaacgcttcctctagatgcatgcgttgcctgtacaacatnnnnnnnnnnnnnnnnnnnnnnnnnnnnnnnnnnnnnnnnnnnnnnnnnnnnctcagacaagaccaagcccgcctgggtggacgccggggtcgcgcacgacttctccgagttcgccgtctccgggaagaacctctgcggcatcaaccccgggcagggcacaaggtcttctgcaccgccgactggaccgcggcagcgcccgtcttcaaaccgctgcagggagacggcatgctccgcaacctgtccctctcgggaacgagcctgtgcggagcggacgcccgtcccggcgtagacaacatcttctgcagcaacgacttcatttcgaaaccattgactcaagtacaaggcagcggcaacgtgaccgctcaggggaagggcaggctctgcgtcgtggccaaggaccaacgagtgttctgtaccgactctatcgtccaaaaccccgtctggaccaagagaggggacctcgccatagacctcgccatgaacgagtcgggcgggatatgtgctttgaaccccgacgggaccatcttttgccagccggacctgacgtcggggaaatgggtggccacgaacgtcgccgaaaagaagaacgtgaacctcgccacgaatattcatgggacgaagctctgcatcttcaacagcgataaggcccccgcttactgccatgacaacgtctttgcaggcgacaaggcgggttggtatgggttggcagctgctggacaacggttcgggttggaaaaagtgtaggccctcatgccgtcagagctggcgcgggtgctggaacgtgggtagtgggttcgagcgtgcgatcgacccagagagggttgagcccggctaggactcctcccagtagagggccgacgatgaagacccagatgtgagtccattgtttccgatcgttgctcccggatgcgaccgccgttccgagggatctcgcgacgtttatagagcagccgtctaagggaaggagtgccagatgacagaccaggaccgcgccaccgatagcgatgggagcgtgtccgtacaacttggtagcggcgtaggaagtgttgagcacgaccgttacgaggaaagccgtcgccagtatctccgccaacagggcttgccacagggcgtgtccatctaggacgtgattgactcctttgccgcccgcgtcgtagaggtcccaattgctcacgagcctcgcgtagcaggcgccgcatatcgcccctatgacctgggcgacgatatacaacgcagccttctctatagatatcatcctctgcaacaagaaagccagagtcacgctcggattcaagtgagctcccgagatggagccgaaagcgtacgctaaggtccctatagtgcctccaaatacggaagcgacacccagaggcgcgagaatgctgccgttatcatagatagggagagcggggtaattcgtgagagacagtgtgatgatgaagaggaaaatgccacttccgacgaactcggccgctaccgccttgtacatgatggcgaccgatacctgataaactacaagcgagaatattatgccggccatacgcccgaggccgcggcaggcatcgttcgccggcttagggcaagcaggcctccccttgccggtgctataggattgcggtcgatgcacatggtgcgtttcgcgaatatcttcgcggtaagatatatcgagtatcgagtaccttttgatggacgaagcgaggatccaacggaacatagaggaggcgataacgctcttgagacgtggcctctctggggacgacatcctcgcgatcttccaggcccgaaacgaaggtcgcggacccacgtacgctctgcaccccgaggcttgggccaccgtgatgcggcgtgcgaagcggagagcttctcgcctagatcccatccccgtcccgactgcagctcctgcagggccgagtgagctatttcagctggacgaagcgaggatccaacggaataccgaagaggctataacgctcttgagacgtggtctctctagggacgacatcttcgcgatcttccaggcccgaaacgaaggtcgcggacccacgtacgctctgcaccccgaagtctgggccaccgtcatgaggcgtgcgaagcggcgagcttctcgcttaggtcccatccccgccccgactgcagctcccgtccctccacgacctgtaccgagaccatttgtacctcccgtctctccacgacctgtaccgagaccacaggtacctcccgtccctccacgacctataccgagaccacaagtacctcccgtccctccgcgacctgtaccgagaccacaggtacatcccgtccctcagcgacctacaccgagacctcccgtagctcccaaccaggatcagaatagaccagctaccctgttcgactgccacgacgtccctggtgatgggaattgcttttactcggccgtcgcggtcgcgttggcaaacaggccgcttcctctacctcaactacgagagagggctatgcagttgcgcaacgccggcctcgaatactttgataggttccaagaggcgctcttcgtcaatgcnnnnnnnnnnnnnnnnnnnngtgatgcggcgtgcgaagcggcgagcttctcgcctagatcccatccccgtcccgactgcagctcctccacaggcaaagccgactgagctatttcagctggacgaagcaaagatccaacggaacaccgaagaggctataacgcttttgagacgtggtctctctagggacgacatcctcgcgatcttccaggcccgaaacgaaggtcgcggacccacatacgctctgcaccccgaagtctgggccaccgtcatgaggcgtgcgaagcggcgagcttctcgcttaggtcccatccccgccccgactgcagctcccgtccctccacgaccgataccgagaccatttgtacctcccgtctctccacgacatataccaagaccacaggtacctcccgtccctccacgacctgtaccgagaccatttgtacctcccgtctctccacgacatataccgagaccacaggtacctcccgtccctccacgacctatgccgagaccacaggtacctcccgtccctccacgacctatgccgagaccacaggtacctcccgtccctccgcgacctataccgagacctcccgtagctcccaaccaggatcagaatagaccagctatcttgttcgattgtcacgacgtccctggtgatggggattgcttttactcggccgtcgcggtcgcgttggcaaacaggccgcttcctctacctcaactgcgagagagggctatgcagttgcgcaacgccggtctcgaatactttgataggttccaagaggcgctcttcgtcaatatttttggtctgccctctggtgacagaaaccgagtgcgtcgcggacgacgcgctaccttcatgtatccgcaatgggcgaaccacgtccagatagaatgtgtcgcccgcgctatgcggtgtcggatacgcgtgttcggcatgtggcccgatgtatatagtctcgccgtaagactcgcagaacctttgacgctggaacaactggacctcctgtgctcgacggtagacgatgggcaactacggaggcggagaagtcattacgtaaacgatgatccgaacaactacgacagaaccatttcattgataaactggacggacacacactttggagttgtcttgccacacgtgaggggcaggccgaggcaacgtgtgagtgctagcgggaatataccccctgcgaatgtcagttatggagaggctctgcaggtgacacaaaggctcgctggacgcgaggcgatactcgtgagggagaggcgggagagagcggaccgagaaagacagatgaggggcaggagtgcggcaggagtacggcagagtgctacggtcagtgccaggtatgcgaacacgagtagcaacgaggctctggcactcgccttacaggagttggaattctcagaagattgactctttttcttctgatcgaatcgtaggataggatgaccacggccaccatcaagacgaggaaactgctcgtagatagcccggacgcggatgactttctgatcgtctccaacggtgtgcaactggtgacgaacgtgctcgtagacgggtccctctccgcgtcggtccccgtgatgaccttgcaagcaggaacgattcagtgcttcggcagcaacggcgacgcctggttcctctcgcgtgcggcggacgggacggtctcgctcgggcagaacgtagcggggtctcgccgtgcactggcatcgctcgcgtgctcagtggacgacggtgcatctggattgggaacgttgagcgtcaggtctctacagaatgtcgaccaggccggtcgttacccatttcggacgcgcattgacaccgacaagagtctggtgacgcagtgctccaccgacggcacggcttggacgacgatacggagagatgctgcttccatcgctacctttgcgcaatccatcctccccgcatcgggcaatctcaacgtggggaccggcagcaaccgctggcttggactgtatgcttccaacgtagatgcggatacgatcgcatgtggggccgcgacgttctcgtgtaatctatcggtttcgggcgatgcttcggtcggggggtcgttgcaggcgagcagtgccgtggtgggagggagtttagcggtgacgggtcccgtcgctctatcgaacgctctgacgggcacctctgcgacgttttctagcaacgtgaccatcgctggatcgttctcatattccaacctcgcactcagtgggagtttatccgtggctggtctcactactatttcaaacactctgagagccacttcggcgacgttctccagtaatgtgaccgtgtctggaacttctactctctcgagcgatgcgaacatcagaggagcccttgctgtgaccgggccactcactctttccagcgccctttggggaaattcggcgtctttctcaggtaatctaagcgtttctggagctacgactctctccagcaatactacggtgggaggaagcttggcagtaaccggccccgtgactctgtccagcacgctaggaggcacttctgcgactctctctagcaacctgaccgtctctggatctacgactgtatcgggcgctctgggcggaacaacagcagctttttccagcaacctcagcgtctctggagttacgacgctatcgggcgctctgggaggcagctctgctaccttttcgagcaatctgaccgtctctggtacttttactctctccagcaatgcgacggtaggcggaagcttgtatgtcagcgggcccgtcaccctctctagtaccctgggagccacgtcggctactttttccagcaacatgagcgtcgccgaaataacctctggaaccctatcagcgagcggaccggtcactctctacaacaccctcggagccacctccgccacgttttcgaacaacgtgtcgattggcggcaccctgtcggtagcgagcaatctggcggtcaccggccccgccacctttgcatccaacatcaccatctcaaacaccgatccgatcaactctcacaagacgtgggcctcttggaccccatcttctgattctaacgcgacgttaacgactttcttcgcgagatacacgtcgatcaataagagagtcacggtcgcttactcgctgagtttcactgtcgcgtcgtccgtggccagtaccagcatctccctgcctccaggacattcagttgcgtattcggcacaacgcacgcagatcttcagcaagaacggcgggtcgaacatctacgtgacaagctacgggagtatcaccgttccgaccgcagggactgcgacaggtctggtcacggccgacagcactacttctcggctagtatttgccctcacgaacttcttggcgggtacctggactgcatcaggtaccttggattatgagatcgcttgaatggtccctccttttttcacgtctctctgatagcagcccatgtcttcatccgtgtactgccccaccttgcacaccagctacggctcggtcgcaccgctgtccccattcggcgagaaggtcggcgtgcataagacgaatatcttcaatctgaagcctagctacggcctcagcgtcatacgagacgacacgtacacgaccggcaacggcaccgtcactggaactttggggcagccagaattcgtcctgacggctcccgcatcgtcctcagctagcctggtgagtgcggagcgtggtcgctatatcgccggcttctccgccgaagtagggatcggggtgcgggtgccacaagccctgacgggcactcagacttttcagtggggatacacagacagtagcttccagaacggcttctactttcagatctctgcctcagggctgtctgccaacatcgtgcgcaacggggtagtcagcagcatcccagcctcctccttcaattgcgaccgtctcgatggcaccggccccagtggccagatcttggacatgaccaaaggcaacatctggcacatcgtctactcgtggtatggttacggagcggtcaacttccagctggtctgcaccgatactttcggtaatcagttcgtgcagtcgctccaccgttgggcgccgtccggtcagacttccacgatgtttccgaacctcaacataagtacgttgctgaataacaccggaagcggcaccatcaatgcctacgtcgccggccgccagtattcaatatacggggaggagagcacgactcaccgcgtcacctccggttacaaccaggtcaccgtgacttcggcgacctggaagcccatagtctccttccgtcgcaaaaccggttggacgcactgcggcgttcgtctgatctcctacgatgcattcgcgaatcaggatgcatacctgcaggtgcgggtgacgtctacgctgacgggagcgtcctggactaccgtacaagattctctcgatgcggagacctgcctgcaggtcgacacgtccgcgaccgccatcagcgggggtctggtgctatacacgaccggcgtgagcagcgcaaaggccggcggatcgaccgacgtgctcgacatttacctcaacgagacggacatcatcacggtatgcgcaaagtgcatcaccggcttcagcggcgccatcactgcagtgctgcgaatggaagaactgtggtgagacagcggagcttctttttctcgggtacactcaggagggcacacccatgtcgctcattccgggaaacgccaccgtggtagggaatctggccgtggcgggcaacataacttctttcaccaatcaagttccgacggactcctgcggcgacatccggacggtcgaaaagaccaacatcatcgacctcaactctacctgcggcctcactcagctgcgcgacgcggtgaccacgaccggcaccggcactttgacgggcaccgcagggcagccggagttcgtactgacgctcacgggctccggcgactccgtactcctgcagagtgccgagcgcggccgcttcgtagcggggtacacgttcgaggtatgccttatcctgcgctccgtcgtcggtgccgccgcctggggggcggggcagtatctcaaggtcggctactatgatggcaccaacggcttttacttcctcgtcgactcgaccggcctgaacgcgtgcacgatgcgcaacggcgtggagaccaggaccaatcaggcaaacttcaacgtggacaagatggacgggaccggcccgagcgggctggtcttcggtatgaccaccgggtgcatgtttaagatcatctatggctgctacggctacggggcgttggtctttgcttcttgcccggtcacttctgcaggcgtgcagtatctgcagcacatgcaccgcatggtccccggcacgcagacctactctatgtaccccaacctgccgctgtctatctacgccaccaacggcacgaccgccacgagccgcacgttgtacatcgccggtcgtcagtattccatgatcggacactggctgcctcacaagcgcaacaacgcggcgtacgttctcaaccgcggaggggtctccacgaccttcttacccatcatcagcctgcgccgcaagagcaattacctccactgccccgtacgcctaaagggcatcgacgtcctctccaccaccgactgtctgatccaggtccgcgttgcgacgaccgttaccggcggcacctggacggatctacaggatcagccaaccaccgagagcgctctgcagtgcaacacgagtgcgaccgccgtgtcgggagggatcgtgatctacgtggagatgctccaggcggggcgcatgctgaacgacaaggaccaggtagagttcgactttagggacaacgacgtgcttacgttatgtgcgcgcaccttgaccggcttcacgagcatcaattctgtcctgcgcgtcggagaaggattctgagtcatctgtacaaggggtctttcttcgactcctttcagtcaacaatcgaagacgaggacgggtctcatcaccaagtacttatttctagaagattcattcgatgcacggtttagggccgctctcggctgaggtctccacttagggcggtcgatggacggtttcgggtccttgttcatcgagccggtggaccgtcgtcgattcggcaggaccgcgagggacgagatcaggatcagcacgccgcacggtgccttcgccttcgccacgtcatccgtccgagcggtcaagctcggccacgtggtcgctccagttcggaccctacttaagacggacggatcggatagagatactctcattcgacatggagccggacgcgcagaagcgaaagagggaggagaaggagccgaccggcggggcgaagttcacaaagaccatccgggggtggagagcggacgctaagcagccggaatatgcgacgctgttgcaaaccctcacggatctcttcctgaagcacgcattcgttcccgactcggaggtag

SEQ ID NO: 94 - DNA, 12856 bp, Coccomyxa sp.
  variation 10699: note = n is any nucleotide
  source 1..12856: mol_type = other DNA
ccatcaccctcacacagggcgtgtggtcctccttcgtcctggagcacactaccgccggcaccaccaccgaaaagctgctggtggagtgctcgtcgaatgcgggcacgctgtacagcaccctcgcacacgggaccgcaagcggtatgttccaattcgcgtacaacctgcaggagttcccggcggcgcagctcgggacgagctacgcgttcgggagggtgtactttggcgacacggcgcgcatgggcaccggcatgatcctgccgaacgccaactacttctcgggcaacacctcggagctgaacaacgacgccgggtacatgaagcagctcagcgctgccaatgcatttcagggcaggttctactccgcatccgcgttcaccacgagcaacagtacctggacctgtccgagctcgggtattgctgttgcgacgaacagcatcccatccattaatgcaaacgtgggcaccagcatgaactcaagtgctttgacttacaaccagtcccttccaggtatctatctgcctgtcacaggtttgtggcacatgaccggatactttcagatctctcagacggcgttagagatgaggtggacagttatgtcgatgccagcatttcagggcaatgcagctcagaactttggctcaacggcatacagcaatacggccgcagtgctcgcgttgagtggattcgtaagtggaacatcagagaacgggctgtcggcttctgcaatacttcctgcaggcactgtcattcagccatgggtcattgcgacctcgggtggctcgacaacgttctatggcgtcgtaacactgggagccccaatgagatgacagctctcagcctgcagccatgtcatttatcgaagagcgactgcaaggtgagacaaccgtacgtctctcaggatttcggggtcatcaaaagcgctgcaggagagatatgctcatagtgatgtacggcgagggtggcgatgatgcagcgatgttggttgcagctgtgaagtagagggtcggtgtgagcacatcaccagcggccaggggccctgtgtagctgcaggttgtcacagtgtactgattgacgctgatctgtgctgcgcctagtcggccgctacctgatccactccagtcgaaccacatctgctcaacacctccgactgatccaggatcccatccgagcgtcatggcatagattcccctgtagggtatgacgatacctccggaggcattcatgatcgtcacgcctgcaggaatgctggaaacactggacagaagcgtccagaaagctggtgtcaacttgggaggagtgttggcaggtgcgctgacagccccactctgctgccagtaggcagtcaagggcgtgggattgattgctggtcctgtagtggccacagcactggaggccggtgcgctggaagatggtgcagcgtaagttgcggtgccagtaggtacagcagtgacaggtgtgacatccccaagtgcgacgatgtcgctggtgttaaagttggacagaatccaatttgccggaatacccgtggcgtttggcactccaagctgcagatataggtcgtactggttggtcaacgtggaggatgcgctctgcgtcagcaccaagctagcggtgatgattgtcggagtcgcccaattgctgctgtcccaggtgtttttctggaccactatcggggccgaatcaggtcctgtcccggtgttctgagcaagcacaaagacagtttgacgagacccgcctgcagactcagagtttggataaatttctagggtcagggcatggctctggttggctgccgagtttacgaaggtcgcaaccttgatccaagtgcctttcgtattggcgctgtggtccgtagacccgagcagggccaggcgggtgtccacgctgccccccacgaccgaaaaaggctctgcgatgtccgatcgagacgtcaggatgagcacactcagggtgattacaaagacgcacgcggcgaacaggtagtgacggggctgcatgctacctctgataacagggcctaaaaaaccatcatgtcagctaatcatactacaggattccagtgcaaattcgatgggcgaatttgcgctagagtcagagtcggcattcagcaaaacaaagaacacacaaattatgttgatacacgccatcatcctgtctctcactgccttcgccgctgccaaacacaccgagccctacatcaacgccaacacgacactcatggcggctcggtacaacaacaacacgcgagaattcgaaaaggacaccatgagagcgtttgcaatacaggttatgatgcaacagacgatgcatccagactccctcaccagtatcgccaaggccttcttcgcaagtgctgagccgctcgaagtgaacgtggggttgctcagcatcaacttgacaatcaccgacgaggtcggcactcccgtcgcgaatgtcactcagatgcaggacggcagcatcatgtacaccatctaccagatgcccgtctctgtcaacagctccaactgcgacgtgtatgctcatgccaaggtgccacgcacacgcaggggtggcaacgctactttggacagtgatctcagaacgctcatcacgaacgccgaaatccagtgccggaaacacatctcagcccttgatgaatactcactcgagaaagtcttccctggctgctggaacgcacagaacacgacctcacgccttcgtctggactgtctgcagaccaccgtcaacagccgcacggcattcatgaactccctgatcgcgcgtctggcgactgaggagatcgcctccggtctgcccacagacagagtcaatgcagaggtctatcagaaggatctgaagaatcaggccaacctggcgatagccgagggtttcttcctgaacaccctcataattcccttcacagttcctcagcttcgctacgcaaacaagctcgatcgtgagctccgagcaaacgcaactatgcagcacggcaccgtgacgactcaatagacgatacctactcttttcctactactcttttcctactactctttttactactctagacaatgccagagcactctggcttgattttttattctttttgcagggccgctgccagcgagtctgcattttctgcatacacagtaccgacatgagttccgacgtcgtgaaccgatcgaagctcgcgatctcccgggcgagtcttcctcaggccctgacctacacggggagctccaacacatccctgcctggcaacctggccatcaccggctcgctggccatctctggttcgctctcggtagccggtgtgtcgaccagcggggcaggatcgagcgcacccgacaacgtgtatggcagtgtcctcatgcgggtctttgacgacagcaccgtgtacgccggtcagaccctgacggccgggacgccactcccgcccccattcctgacgcgcccgttggtcgatgtgcctaccggatcgatcacgctgacgcaggcagtgttcgggtctgccacagcctattcggttcggctggcgggttacgtgtgtcctccgaccaccgggacgtacctgtggcgaacgacgtaccgggatggggccaccatgtacatcggcacgcagaaggtggtagattcatggtcgtacacagggagtgtgacgcaggctgtgggcaccctgagcatgacgcagggcgtgtggacagacatcgtgctggaacatgctgccagctcgacgctgaccgaacgtctgctggtagagttctccacgaactcagggagtgtctacagcaccctggcgcacgggacagcctctggacagtttcagctggcgtacaacatccgggaggttcccaccgccatgctcggcacctcctacgtctctggtaggacgtactttgccgacacagctgcgttcaattccgcgttggtgctatcaaacacgacaggcttcacaggcagaagcagcgagctgctgaacgacgcaggatacttgctatccggcacagcgacctccataacatgccagagcctgactgcgagtgctatcgtgccaacgactgtcacgggcacgctgagcatcacaggcgccagcctgtacaatccaattcctgccagcacaagcactttcttttacgctgccttcagcggcggcagcatatcaccgtcaggcggaggcaattacgtcctgccctttcagacggctgtactgagcaagggtctgaacagcatcagttacaacaacagcacatcgaccttcacgtgtcctcgaacaggatactggctcatcacggcaaccagctcgtactacgagggtagctcgtcagcctgtaatgccaccattgcacttttccaaaacggcaatagcgtggctaccgcaaaacaggctgtcatcacggccggggcagccgtgacaaacgtgctgaccaggttgctactactgaacactggcgacacgctgcaggcactcatcaacttcgatcagagcctgaacttttcctaccaggaccagaacgtgttctacggacaactgatttcattgtgagtctatatcacgcacatgagcgattcgattctgcgcaccctgctcgggaagctgcacgccggcagcgccttgaccaccaacatcgccagcactctcactgcgacagcgacctctgtgcccctcaccgggactctcactgccatcgcagcgagcataggctctgtcacaaagctggcgatcgatactagtggcaacgcgaccacacccggcacagtgacagccctgcaggtgacggggagcaatatcagcatcgctggctcactcacactgggtagcagaatcgcggcgaagctgccgcaggtccaggcccagcaggtgttcggccccttcacgggaggcacgaacacgagcttcgtgtttctcggcggcacccaattgtggcaggtctctgccaatgtatattgcacgtcgtcggcgagtggtagagcgacctttagcgtgcaggtcgatggtacgacacccatcggtagcggctccaatgtcgtctacttctatggcaacacaacgtgcagctcggacctctcgtatcctgtcatgatgttcaccacgactcttgcagccggaacgcacactgttcagatgagttccacaggcacaggatacacgtctgactccaacaagatggcaaaccttgcggtcaccgagtaccccacgtgatcgtaggcacgcctacatagacaagccagtcctcactggctccctgctcacattggactcgatttatagcttttacaaatctaaggaacaaggcacgatgttccgactcgccagtcagccagtgtggcctgcgaggcaagccatacccggatcccatgtcaagccagcgagaagacggtcggttatcacccggtctgtgcaggttcagacaaggttggactgtccgacgcccttcttcgagcccctcgtcaggtccttcctgctcggcgtcggcacaggggctctgttcgagggagcgcacgtcagcctcagcgccctgcgtctcgtcggagatgtcggcctgcacagagtatcggaggccttgccggcagccttcgcaggcttcacacccatgttcctcggcgatcacgtcgtcgccctcagcagttggctcctgttctacatcgtggaggcagtcgcgatatacgcggtcctcaagcggcaccccgatgacgcagagaaggcagcgaaggcgttggacaggctgaagaccctgccgaagaggctcctgccgctgcgccttatggtcatcaagcagatcatcctggcagggttggataccggtccgctacaattcgcaagcgtcgccacaactgtggagaccacagagtcaaccatcctgcccaggcctgtgcggatacccccacacccggtcggcaacgcccaaaagagcagggagcgagagctcagcgaccggcgcaagttcctcaggaacgcctggtacgccatcgcgatctcggaggaggtcaaggacgatccggtaggagtggaggtcctggaccagcacctcgtcctcttcagagacgagttcggggacatcaagtgtgtcgactcggtctgcccccaccgtggagctcccctcgacaagggggtgatgtcagagcacggaggaagacgttgcgtgacatgtccctatcacgcctgggcgatagacggagaggggatcctcagggacgtgcccgctgcggagcactcggaggcatggccgcgcagaaaggtggtcgacgcccacacggtcaaggaccgtgggggattcgtgtggttcatggccctggacaggctacacccgctcccggaggcagagtggccgccgatcccatacgtgtacgagctggacgaccccacgtggcgacccactttcgggtccatcgagttcgagtgcaaccactcgggcgtcttcgagaacgccatcgatatcagccacatccacctgctgcacggggactcgttcggaaacgcggagcagcaggtcatccggggcatgcagtgcagagcagaccccttctcggtgacggcctcctttaccctctccaacaagccggcgagcgctctgtgggagttctccagggtgccagaggtgcacgtcacagcccgcgccatgctccccagcagcagcgtgatcacattcacgctggccaggggattgtccttcagcacggtcgtcaacacgaccccgatcgacgagcatcgcacggtgaaccgcttcgccctggtccggaagcttgcagtggatcctgtgggggccgccgtgttcaactggcctgtgtgggacgggctggcgcgtcaggccatgttgaagatcctcggacaggacaaggtcatggtggagcagctgaggcccgagtgcctggacagggaggtcagcgtgcgtgcagacatgattcaggttgcattcaggcggctcaggcaggcgtggctggatgctagttgatggagagtcgtagcagacaactcatgatcgattggctcgctgatcagctctccaagctcgttgtcgtcttctgtcacgggcgagtctgaccctctctttgcagcacaaagaaagactggcgagctctttcttctccggggttcattttctcgatatcctttattcaatgaacagcatggctctggttctgcggatactcaaggtttcggcaatggtgctgacgaccatctctgtgctcattgctgccattacaatttcgttccggaataacccaacagacgacacaaagcagagggctgtgtggagcgcagtgatcgctgtcagtgccagctcacagatcatcctcattattgtcggggctgtgtgggttgccgctgttgctccaagcgcccacagctcgctcttcagagtaattctgttgaacagtgcaagcgcaatattcgcgctcatatatgcaggccttctcgccagcggtcgagatggagtggctctcggagcattcgctgtaataatcaccgtcacatacacaatcttgaaagctgtacgaatgtctgtttagtacagggacgatgtcggaagtccgacatcgtcattcatcctcgtctcgtgcaagctcctcccaaaaaccgagccaggcattcttgatggccttcctgcatcgcgcaagtccctgaacagcttcgtgggcgttgttgatgtaagacggcaccccgagcgaacaccccaaatgctccagaagccaagcactaccgtggtgacagttgttcctgatcaggtcgtatgaagagcctggaaaatttactttgtattgcgctatcacctcttgaatccacaaggttcccttgttggtggttccaaggatgttgccctttacgaatcgcctgtgcacatcctccaaggcaatgtagggagtgatgaagactccttgtggaccgaaatgaacctctccgatgccgtcgatatagacacctgtgtggtatataccgatttttgctgcgatcaagatacagttaccagggacgcatgaggcatactcgaccagccgtatgtgcttgtcctgccccccatgaaggttgagatgttccagctctttcagcatggcatctccctcctctctggacaccctgtagtatatcttccagaagttagaatcctgttcacgttgctgtggtgtgactggcacttcagcatcaagtgcgcctgctggactgatctcgaagctgtcaaaggacgcaaacatggtagcgcgacttgtgtcatagctttccagggaatctcacaacagatgtcaatttcctgtattgagagagtcatgcactcagtaattagcaactcctctttccccagtgcaccgctttcagtggtaaaatgtttgttcaacctccccagggagcacctgaacaggacgattgacaggtccgaatcgagcgatgtttgcacagaccttgcgcaattgagtgttcacaacagactcttggagtgtgttgtgggaagtggagatttcacaaatcaaacacacgcagcgtgcctgtgactgtttctctacatatggggcaccgagtcccgcatgcttcgccgcaagtcttgcacgtcactgtgtgtccacaaggaatgaatgccacctccggcgctgtctcctcacatatgacacacatgggcttggctgctgggggcggtggagcgctcgcctcgatcaatgcaagctcgccgatccgggcccagcaagtcctgaaatcggtcgtggtcatccccatggcccgcaattcagcaacaagtctatcgttgtccctctgcagcacatcgcagcgttcaatctgttcgtctcggagttgcctcttctcaatcaggtcggatgcgcctttgaggcgaagcctcaccacctcttgcctgagtgaatccctttccctttcggttcgttccagggtggtgcgaagcgcttcttctcgaggagaggcgggccgtcttcgtgaaaacatgcttgcagcgttgatgccatgtggtggtcggtaacgcaaccctcaatcaattttttgatgaatcgcacaccacgtctgtgctacctcgaagagtcaaggtattacccctaacgctcagaatgtcacttacccctagcgcccacaaaggcagtcatcgagatctcagattcttctgagattccttcctcacctactcaccaacccctctccacatcatgaggcctcaagccatcagagcttgtttcttccgcatgcgctctcagggatgttcctttcgacacatgtccgatgcactcgctgtctctcagagacagctctaccggtggcagcgcgcgcccctgctcatggcacggcccctggacagaagtcatctgcgtcggaagacgacgacggcgatcggggatgccgtcatctgttgggtcacccggcacaacgtcgccaccctggacgcgatccgagagcacctcaggtccagcctctcggtgctgccctccaaacagtccatttcccgaatgctcagagagcgcaattggacgaggaagagaggcacgaaggcgtacactgaggcggacgcctccaggggtgcacagttctcaagatccatagcggcagggttgagctcgcgcaatctcgccctcgacgagtgtgctttcttcctcaaccacagccgacactacgcctggagccctcgaggcacccgagctgtggtcaggaggccaggacggcgtgggagaggctattcgctcctgttgtgcatcggacacagtgggtacacctcctggtccctctttgagggagccgtcaccgggaagcgatttcaggactttctgcaccatttgccacctggcagcgacctcatactcgacaacgcagccattcatcgtgccgctcgcgtcctgaggctccaaggtgtcccgaccatctccgaaacagccgatgccctgggcatcggcctcaggtacctcccaccctacacaccccagctcaaccctgtggagctggcgttcaacaccatcaggcagctcgtgaacctcaggcagcccagggatcctgtcacgctggagcgatgcatagcagaggccgtcgcacggctgacacccccagtctgctccgcaacctttcgtaaatgcttcccggcaacctcatagagaatctcggtgcgtcaggatctggacaaataaatctggaggacatcaaggtgagatgaagagaccgaagaaacctcccaaggatccacaactccgcctgcaggagcagtacctcgtctacgccaagaacaagctcttcaaggagagagaggtgcaggagaaggctgtgaggaaggatgtgcaggagcgcgcgctcaccaacgccaactccactttcactgtggtcaagaccacctggaaggcgctcggcagacgcgccgtccgcctgctcgatctggaggctgccctgctcgaggtcaacaagaccatcgccgaggcctacctcctggccaacgtgcacgtcgcacgcctctgcaccgccggcatcccactcggcaagctcgaccagacgttcttccatcgctgcctctcggcagtcagcgtcagcgagaagcgaaagccagagaccagagacttccagctgctcgtgtctgcgaggctgtacagatcctggcgccccgaggggtacgtgccaccggtgagcacacatctggcctccggtttccaccagcaggccagtcagcagatggcgaccaacatgcgcaactcgacggtcgccaacttctacaggcgattcaagaggtacctcaagctgcgctactcgttnaacgcaaccctcaatcaattttttgatgaatcgcacaccacgtctgtgctacctcgaagagtcaaggtattacccctaacgctcagaatgtcacttacccctagcgcccacaaaggcagtcatcgagatctcagattcttctgagattccttcctcacctactcaccaacccctctccacatcatgaggcctcaagccatcagagcttgtttcttccgcatgcgctctcagggatgttcctttcgacacatgtccgatgcactcgctgtctctcagagacagctctaccggtggcagcgcgcgcccctgctcatggcacggcccctggacagaagtcatctgcgtcggaagacgacgacggcgatcggggatgccgtcatctgttgggtcacccggcacaacgtcgccaccctggacgcgatccgagagcacctcaggtccagcctctcggtgctgccctccaaacagtccatttcccgaatgctcagagagcgcaattggacgaggaagagaggcacgaaggcgtacactgaggcggacgcctccaggggtgcacagttctcaagatccatagcggcagggttgagctcgcgcaatctcgccctcgacgagtgtgctttcttcctcaaccacagccgacactacgcctggagccctcgaggcacccgagctgtggtcaggaggccaggacggcgtgggagaggctattcgctcctgttgtgcatcggacacagtgggtacacctcctggtccctctttgagggagccgtcaccgggaagcgatttcaggactttctgcaccatttgccacctggcagcgacctcatactcgacaacgcagccattcatcgtgccgctcgcgtcctgaggctccaaggtgtcccgaccatctccgaaacagccgatgccctgggcatcggcctcaggtacctcccaccctacacaccccagctcaaccctgtggagctggcgttcaacaccatcaggcagctcgtgaacctcaggcagcccagggatcctgtcacgctggagcgatgcatagcagaggccgtcgcacggctgacacccccagtctgctccgcaacctttcgtaaatgcttcccggcaacctcatagagaatctcggtgcgtcaggatctggacaaataaatctggaggacatcaaggtgagatgaagagaccgaagaaacctcccaaggatccacaactccgcctgcaggagcagtacctcgtctacgccaagaacaagctcttcaaggagagagaggtgcaggagaaggctgtgaggaaggatgtgcaggagcgcgcgctcaccaacgccaactccactttcactgtggtcaagaccacctggaaggcgctcggcagacgcgccgtccgcctgctcgatctggaggctgccctgctcgaggtcaacaagaccatcgccgaggcctacctcctggccaacgtgcacgtcgcacgcctctgcaccgccggcatcccactcggcaagctcgaccagacgttcttccatcgctgcctctcggcagtcagcgtcagcgagaagcgaaagccagagaccagagacttccagctgctcgtgtctgcgaggctgtacagatcctggcgccccgaggggtacgtgccaccggtgagcacacatctggcctccggtttccaccagcaggccagtcagcagatggcgaccaacatgcgcaactcgacggtcgccaacttctacaggcgattcaagaggtacctcaagctgcgctactcgttggacggcaagcaggcctacgaggccctgcagagcatccgagccgtcgagtacgagggcgatgaccccctggtgaagcggtacagagacctgctgcctccgaagcccgagaagggtcgcctggaggacaatccagagctggttatgcccctccaacacctcttcctgcagcatttcgaggcagcgcagtcggaccggcagacggacaggcctccgcggctcttctctctggtgccaacgaagaaggggttcgagtgcagccacatcaagatatgcgcgaacggtctttacagcctgctgaagaggaacggcatcaagcacctcccgaaggacgccgacacgttccgacccgtggccgacgcctattggaggcgcttcttccacatctcgaagttcga

SEQ ID NO: 95 - DNA, 2411 bp, unidentified
  misc_feature 1..2411: note = Fanzor polypeptide
  source 1..2411: mol_type = other DNA
gtgccccggggtcgttcgtttcatatcacagggtgtgcagggctgggcctggatgtaggcagacgcactgttgcctggaccctgctgcatgtatgttatatcaaatgtaatttccctgtggcaacttcgccggctttgccgacaaagttggttttggtgcgcagcaccaaaacttgggcgccactacgtggctgcccaacccgggttgcaagagagtggcacactgtgccactctttgccacctcagtcgccgaaatctcagactctgtctgagattccttcctcacctactcaccacccctcttcacagcatgacgcctcaagccatcagagcttgtttcttccgcatgcgctctctagatcacaccttccggcacatctcccatgcactcgacgtttctcagaggcagctctatcgctggcagcgtgcgccccgactcatggcacgccctctcgacaggcgccatctgcgtcgaagaacgacttcggcgatcggagatacggtcatatgctgtgtcacccggcacaatgttgccactctgggtgcgatccgagaccacctccggtccaccctctcggtgctgccctccgaacagtccatctcccggttgctcagagagcgcaagtggacgaggaagagaggcacgaaagcgtacaccgaggcggacgcctccaggggtgcagagttctcgagatccatagcggcggggctcagctcgcgacatctcgccctcgacgagtgtgccttcttcctcaaccacagccgacactacgcctggagccctcgaggcacacgagctgtggtcataaggccaggacgacgtgggatagcctactcgcttctcttgtgcatcggacacggtgggtacaccacctggtctctcttcgagggagccgtcaccgggaagcgatttcaggagttcctgtcacgtctgccgcccggtagcgatctcatactcgacaatgcagccattcatcgggccgctcgcgtcctcaggcttcagggtgtctcgaccgtccccgaaacagccgatgccctgggcatcggcctcaggtatctcccaccctacacaccccagctcaaccctgtggagctggcgttcaacagcatcaggcagctcgtgaacctcaggcagcccagggacccggtcgcactgcagagatgcatagcagaggccgtcgcacgactgacacccccagtctgctccgccaccttccagaagtgcttcccggcagactcataaagtctgtgctgcgtcaggatctcggggaacaaatctggggaacaacaaagagatgaggagaccgaagaaacctccgaaggatccacagctccgtctgcaggagcagtacctcgtctacgccaagaacaagctcttcaaggagaaggttgtcaaggagaaggctgtgaggaaggatgtccaggagcgcgcgctcaccaacgccaactccactttcacagtggtcaagaccacctggaaggcgctcggcagacgcgccgtccgcctgctcgatctggagaccgccctgctcgaggtcaacaagaccatcgccgaggcctacatcctggccaacgtgcatgtcgcccgcctctgcaccgccggcatcccactctgcaagctcgaccagacgttcttccatcgctgcctctcggcggtcagcgtcagcgagaagcggaagccagagaccaaagacttccagctgctcgtgtcggccaggctgtacagatcctggcgccccgaggggtacgtgccaccggtgagcacacacctggcctgcggattccaccagcaggccagtcagcagatggcgaccaacatgcgcaactcgacggtcgccaacttctaccggcgtttcaagaggtacctgaaggtgcgctactcgctggacggcaagcaggcctacgaggccctgcagagcatccgagccgtcgattacgagggtgaggaccccctggtgaagcggtacagagacatgctgcccccgaagcccgagaagggtcgcctggaggaggcgatttttgtggtgcatagcaccacaaaagtcggtttgtgggtttcacccacaaacttgggcgccaggctttgcctggctgcccaaccctagggcacaagggtggctatggccaccctttgcccctacagtcccgagctggtcatgcccctccagcacctcttcctgcgcactttcgaggcggcgcagtcggaccggcagacggacaggcctccgcggctcttctctctggtgccaacgaagaagggattcgagtgcagccacatcaagatatgcgcgaacggcctttacagcctgctgaagaggaatggtatcaagtacctcccgaaggacgccgacacgttccgacccgtggccgacgcctattggaggcgcttcttccacatctcgaagttcga

SEQ ID NO: 96 - DNA, 20606 bp, unidentified
  misc_feature 1..20606: note = Fanzor polypeptide
  source 1..20606: mol_type = other DNA
aggagcttgcacacgtccggccggtcgcgcttcacaagcaccacacccttcagcatcaggtcctgtgtcggggggacgggcttgaactcgaccacgccagacgccgtcttctcaaccagaaccttgttcgcgacatacgtcttcttcttgaagaagatgatggtctcgtagatctcgccctcgagggacatgttcacgggtatcgggaagcatgccttcagcgccgtctcagtggatgtggctcgggcccacagggcgggaaaattgtcggccgcgattcccgggaaggtcacatagcacgagtccgtgtccccgtaaacgaccgttgctccgagctcctggaacttggccaccgcgatgcccagcgacatccgtcccagcgccgtgcagctgctcgccccctcgttgagcggcagcatgccgtgcttctggacccccagcaccccgtagatcgagttggcacacaccttgagtgcctgctggcgcttgtccagcacgttgtactggacggtgtacagctccgtcgtcttgaggatcttcttcacggccttgcgcgcgctcagcaggtcccgcagcagcttgggcacaatgccctctggttccttgaggaaatggtggacgttcttcgccccgcccttggcggacgtccacacgaccgtgtggtacatctgcgggggcatggcgggcggctcggtgcccaggtaagtgctgtagcagatgttgtaggccatgagcagactggggtacagcgagtcaaagtcgtactgcagcacgttgtggtagaggccgggcacgggctccagcacgcaggcgccctcgtacttggcggccaccaggtcgttctcgtcaaactcttcgggctcgtacgcaaagtccagactgtcgatcgcggcgtcgcagtcgtcgacgatcttgcgcttggcgagcttgattttctcggcgagcacgttctccctgtggtggttggcgctcacccagcgtgttccaacccgcacatgcatcgccttcgggtagttgaggacaattcctcgcgtcgagcatgtctgatacattttggaaaacacgcgctgctgctgccctgcaatgtggatcgtatcaatggagacgctgcattcgcgggacagctcgatgaggtagatgagggccgtgaccttgtgggcgagcacgtgcaccagggcggagtccttgacgcagtacagccccacatccgtgtacagtgtgctcgttgtgtcgcggcgcgtctcgtagccgtcaaagatatccgacacagtgatggggtccttgtggtcgcccacaaagtcggcggcgacgctgtcgagcttgtacgaggagcgcttgaacatgtccttgaaaatcttcatggtgtccatgttgattatgccaggcattttaaggtactggatatcgacgacgccggctcctgatgacgaccaccggacactggccgtggacgactggctgaccccgttgaacgaggaccccgttgttgatacaccaaacagcgcgcaccggcaaagtatgtactcccaatcgaacccaaacgtgttccacccggtaacgacgttgacccgcatctcacggatgtaggccaggaaagccgcgaggagcttgggctccgtgtcaaaggaccgcagctcgatgcctggaagcccgtcggcgtcgcagccgtcgagggcaaacagcacctgctcctcctcgctggtgtaggcggagatctggaacacggcgtcggacggcttgcttgcatcgggcatcttggaccggtctatggagtaggcctcgatgtcaaaggccatgatgcggaagagaggcacgctgtggtcgtcgacagcgagagggctcacatggatttgcttggtgcggtggcccacagaggtcgtggtgaactgtgcaatgtgcacccagccgctgaatcggattcccttgctggtgacaaactgcagctgcgagctgacgttgtgctcgtagacgtgctcgcgcagggcggtgtacttgccctctcggtcaaagttgagggtgttgatcagggccctccggttctcctcgttcttgaagcgcagccgggccatgcaacgcttgctcggggcgtagtacagcgtggtcgagaccacgccctcgagtgtgtggacgatagcagggctggcgtgcgtcttgtcaatgagcgggacccagcggtcctcgcagcgagagaaggtcttcgaggtctcgagcttggcgcggaggcgtgagatgtcggagcccgcggcctgcaccccgacatagagctgcgggaagacatcgcaaacgttgacgatgtgggtggcgttggcgcggtcgatgccgtacataagcaccttgtcgtggtcgttgatgcgcttggcgggcacggtgtgccaggcgtagatgaacaggtccatcggtggtcgttggtcgttggtgtgtttacaatgtgtttacaatgtgcagagtgtgaaagtgattcattttttgcaaactcgatgattaatattccgagaaaaaaaatcacttggaatgtataaatgtcaccatatacacagagagcgtgccccgcaggcaaagcgcaaaccattggtggaggtggacggggccaagacctgtcgccttgccagggctgcaacaagatcccatctctagagggtggtgcgaagcctctcaggcctggtggcgcggactaggggtcatcaagccgccctggtccatcggtgtccaccagccccagcccctcccccagacacgtataaatataccattcctttcctacaattcttcacttctcggtgtagagactgatcctgcgtgatctgcgccaatgaaatgcacggagacagatgaccttttaacttgaacatgggccatggtgtagagactgattctgcgtgatctgcgccaatgaaatgcacggagacagatgaccttttaacctgaacatgggccgtggtgtagagactgattctgcgtgatctgcgccaatgaaatgcacggagacagatgacgttttaacttgaacatgtgccatggtgtagagactgattctgcgtgatctgcaccaatgaaatgcacggagacagatgacgttttaacttgaacatgtgccatggtgtagagactgattctgcgtgatctgcaccaatgaaatgcacggagaccgatgacgttttaacttgaacatgtgccatggtgtagagactgattctgcgtgatctgcaccaatgaaatgcacggagacagatgacgttttaacttgaacatgtgccatggtgtagagactgattctgcgtgatctgcaccaatgaaatgcacggagacagatgacgttttaacttgaacatgtgccatggtgtagagactgattctgcgtgatctgcgccaatgaaatggacggagacatgtatcgcgaacatgtaccctactaggcagttattttttgtcgatacaggctcctccagctcctgccggctacctgcagagctccacgaccccatggccttcaagctcacccccgcgggctcgacggcagctggtcgtgggctcggtcggcggctggtgatgcctcgcagcccctgccggctcctcgcacccctacaggctcctccagctcctgccggtgagccagccgactcatagaggaaaataaaaaattaaatatattattgtgttgcatttttatttctgattcattttcacactaacgtagttgctgaaagtattttgtgatcatgtcgaaacgctcatccgatgcccgttcaccccccgtggtgaaatccgcccgtctgacgggtggcctctctgactacgacgatggactgggcgacgggctgtccgatgctggcctgggtgacgggctgtccgatgctggcctgggtgacgggctgtccgatgctggcctgggtgacgggctgtccgatgctggcctgggtgacgggctgtccgatgctggcctgggtgacgggctgtccgatgctggcctgggtgacgggctgtctgacgctgacctgggtgacgggtctggcgctggctctgacccgggtggctctggtctggatgctgaggatgacgtggcatgtgagtgggatgcctgcaccgagcgactgcgcgacactcaggctcttgtcgagcacgtaaagcagcacaagttggccacgacatgcaaatggagaggctgtctgcgagaccaaccctttagagattcttacaatctgcgtcaacacctggagatgcataccggagagaccgtcgactgccccgagtgccgcaagaaaatcacaccgtgcaacctcgacagacacttgaagacgcatgatgtcagcagaccgaaggattttatctgcgacgtgacgtcatgtacagcgcgcttctacactaaggcccatcttcaggctcaccaggcgacgcacacaaatgatcgtccctttgtctgcgatttgaaaggcaaatcatcgcacactgtctgtgggaaaaagtttaaactgtccgataaactgcagaagcacaagcgggaagttcacgcgagaaccaaatcttatgtctgcagacatcagggctgtgccgccgccttcccgtcgagagacaagctgacaaagcatgaaaaacgacacagcgacgaaaaacgacattcttgtacagtgtgcacggcgcagttcaacactaaggacgatcttaaacagcatgagaggactcattctgatgacagaaattacgtgtgtgatttcgaggactgtggtaaatcatacaaacaatcctgcgcactgagtcaccataagaggtgttggcattccggggaacggccgttcaaatgctcctggttggttctatcagacgatggtgagtctacacgtcagtgcggcaaaacgttcaaactacccagcctattgcaacgacacgagagtatacacaaaaaggactattcttgtccatcgtgcgacgtggagtgtacctcacctaagactctcagcactcatctcaaaagacagcatccaggcgcacactgcccctgcaacaaaccagcacctgccggcagcctgtgcctgtatcactccgggtctctgaggtaccggctacgccagaccactgtcaaccagtcgctcaaccggctcatccaacaggaccccaggtggacattcgcctgggaggtcccggtcgacggcttccgtgtcgactcgctgtatacctccacgactcgccagtacgtcgtgtcgacagacgaggagcagcacaagcatgagagtgccgaggacttcctggaccgcacacgtgtcatcacgagttccctcacggagagctcgaagaagcccctcgtcttcctccgggtgaacccagatgggaacaatgtccatgtcccgacctcgctcggtgagcgggttcgcaagacccacgcaacaatgcagtggctcgacagcctcgagctggactgcggggtctcgtacgtcgtcttcatcgcctacgatgtcgtgcgaccgggagtgatcactcgtcgggcaaaggagctgctccagcacaagggcgtccgccctgcacgggacgatgacgacctcgctggtgaagaggatgatgtggtcatcatcctccccccatccatcagccccacacccgagcccaccgacggctgggacagctctgtcgcgagcgacctcgagtgggggacactgcgcgaccttggtgcgtacagcgtgccggcatcagagcgccggcgagagagtgtgcggtacaatctcaagctcaggtccgagaacacgatcttgaactacctattataaatatgttcatcttattgcacgagtctccaaaatataaaataaaacaatggtgtcaacttaagcgattttctttttttttttgggttatagaactattgttttcaaattgtcaatatggacaaattaaaatcattttgcaacctccaagaccacaaatggattcttcgaaaacggtctataactacattcgacgtcgtcctccactacatcctcactgctgtgttgaacatcggtgttcgcacagcagttgccatgtccggttgtacgtgttcccccacggcaatggcaaaggccatgaatagaattccctgctacgtactcgaatcgatattgcgagagtacacgccacaacaaccatatccgttacggatgcaaacaattgcggttgacggctcgtttatccgccttcggcctagactaagggcggattttaaagtgtcgaggaatagccgtaaatatccccatgcgctaattagcacaatgtacgactgtcatacacatcgcgtcgtcgattcacaagttttttgtatcacacaacgaacgcgacgcatttcttgctagatttgtatctcgcggtgatatgtatgtatttgataggggctatttcagccggacgttggcggacaaaatacacaccaaaggatcgtactttgtctttcgcgttaaacataatcagagatcattcccctcttacacacggcgacactcttacatacacgacggtaagacgtaccatgtcttaaccaatctgtctgtactaagtcctgggcagattgcccaggcgtatggacatcgctggaaggtagaaacttactttcgccatatgaaacagacacttggcaaccgggtctttcagaagcaatcgattagtggtatgcagaaagaattacttgtcaggcagattgtggacctcatctctcgccaatccgattcggtgatgtggagtaggtctgatgttatgactcaacttgcaacattactccgagatcatactgcaccacgtcgatcaaaagcacctcatgtgattgaaatgtatccaattatatctcttacacctatatcgcgtggaatagttcttaccagatcaccaccagcgattgatggcgttgcgactgtattcaattggtctagatgtaaatcgggaatagggtaatccccctgtgtccaagaaacatggctgatccatggaagacatcctactcttaaggtttatgaatcggttttgaatgatgatacgtaaaactcggaattagtatataagggcattcaaactgtcaaatacaattcacaattacactgtgtatgttttatacagatagatttgcaacacaatgcccttaatcagcaagcgatcgctctacatcgatcttgcaacctgtgcgaatcagaccccccggacttaatgttagtatgatcgacaagacatccgctgagatgatcgaggtcttagcgggatacaatcacgctgtcgtaggtggatttcagcgtctggtctttgttctacccctctaccaagttgactcaatgaaatctatgcacaagttggtgcacgacgcaagatacaagattaaccatcggcgtactccacctatcgtctggccccatgtgctgatagatgcagcccgggttggcattcgtcgcaaccatgtggacattgtttctagtgtcgatcctgctcgatggattgcaacaaattcgtccaccgaggatgttgtgctgactagagataaggtagtactatgggcaagaggtagacacaccaccaacctcaagtacttgtactcggcagttgactccgacatgattgagacattagacgactatagtaatacacccacacccaattcgatcattgactggtgcgtgtacgaagtaggaacactacggcgagcgtttgccatgtcaagaatgacagtggtaaatgccacccacgccgatcgctgggaccccaatctatttcagtctcggcgccgaggatcatcatgtagatcagatgatgcgctatatcagggccgagtatgaagaaatttcggttaagcgcgagaataccacgggtcgagctgagtcgaaattggacaagcggttggctgttttggatgcaatagatcgcatcgatattagctggttcggacacctactatgtcgcatgacatcagatagcccagtcgctacgcgtgggacgcctatgcgtgcatttgaacaatttgacttgtttcacaacggggagctgtctttgtcacagtgtttgggggaggagaagcatcaactgcttcagaaggtcgcaagaagtgcccctaaacgaaaattagcatctcgcctttggaccaggcagaaacagaccaaagagaattcatccacccaacgtccaaagaatgggagagtatctatacctagaacacgcaagttcacctgggaagttggacgcgaagaagcactgctctactggggtgtgaagaatgaaagacccaaccgctttgtcgggttgttagagatggcggacactggagcattcaagaagctgggaaacgatgaaactatagactatgatccgacgtcgaacaccaggaggcctaaaggagatttgctgatatgtgaaacgtgtggagagcgcgttcaagacctgatgaaacacaccaaggcggaacattggttggaatgtccagtgtgcaacaagtcattcgagactctcaaggaccacatatgcgtcaagtgccccaagtgctgcaagacaatgtcaagtctaaaaaaagcacaagtgccagatgtgtgggaagtgtgggtcattcttctatgcaacgcgacactattgtggtgagtgtagcgggtgcgatgccaagtttaaatctaagaacgctgaagatgcacataagtgtcccggaagacgaaggaaaggtctgtggacaacacatccaaacgacgcctgacgaaggcgtctgaacgagactctataggggtgttgaagaaacagaagttggacatcgactctgttgcaaaaaattatacccgtgaagagacggaagcgcagcggggattctaatgttgtgcgcgataaactggctcttacaaaggggagtaagcgtcaaaatctggatggatgtagaaatagaacaaggtataccaccattgggcgacttccacatgcaaaatacaccatccatagatacatccagcgatgtaatcgggagtggtacaacaggttgtcgttgtttattgatggagcgtcagatagaactctcgagggacttcttggtgtgtttctgggattagaagccggtgtagcttcggttgacgtgggtgagagtgtagaagatgtggtgggcccacttgatgatgacatagctgccggtgacgagctgaactctgacgtagactcggtggatgtgaccaaattggctagtcgtctcaccgccacggtaaaggatctggtatacaatatccgacgaaaggattggcgacatcgtttattgaggtgacaaagctattttgtcaaaattggatagagacattgcagaggcgatatgctgaactccagttgcttgtggacacaccggggacgtttcaggtcatctattcgaccgtgagaagtcatgatgatattgttttggacaagctaacaccagttggtcgaaagctgccacttgcaatccgaattgatccttctgcattactcgggatggcaaaatcgtgttggtccacaaccgagggtcgaggtcggaagataccaacagtcgacgaatcgcagtacagtcaatttgatgtagttcccaacacagaccaattgacgggtatgcatgtgcttatcggcaaggatcttaccctggaggttgtgaagcggatgaacaaggcgaacaacaaactggtaagaccatcgttgatgatctcgaaaggtgttgtgcgactacttgagcgagttcccgactacaacaagacgatgaagatgggtgatggggtcaaccttgagactattctcggatcggagtataaggctggtggattgtttggttcagcaaaggtgggtaaacagattaatcgaacatatctggcaacactgaaagatctgtatgcacagtatggtgacagtgcaagagcaaagtttgtcaaccgcccgattgtgaccgtggacccgaatatgcatgaggttgtgtttggagtattctatccatccagactgagggtgaaatatgttgacaacgatatgtccgaacacacaaagtacaaggtgtcagtgacgtacaggacatttagtgtgagtgcagctacactgaggaactcgtcgaagctatggcgggtgtacttggcaaaacacccgatcgcgaggaagggtcatttgcaaaagtcgcaaaatctgtatttaaatccgaagctgtaggtgcacgtggactgggtgagcggctgaaggtccagtttatacagcacgtgatgcggatgttgtcaaggtactgcagtgaagggcgagctggctacaaaacactagatcctattgtgttgtatggagatggacaatttacgagcaacgcgaaggggcttgttggcttcggacagacattggttcgagagttgagcaaacactgttttgtgatgttttcagaagagttcagaacatcacaggtgtgttctgtgtgtcatacgaacgagccgatgactcctgtagctgttgggcgtcacgcaccgtttaagcacatgcgctgcatgcattgtgtgacaggtgaaggtgtgacaaggagaaatctattgtttcagcgagacgtgaatgcgatattgaacatgtttcgcaatgcactggagactacggtacttggggatgtcgggaaggtcttcagacgaacgaggaatacacgacgagccatagggtagatatatagatatatagatatatagatatatagatatatagatatatagatagaaaaatcatgggatttgccatccaaggcatacccttttaaattcagaacgtgccgttataggaacgcaacatatagacaattgtatgctaagttaacattaatgaaaataaaaaatgcctagatttatgatacatgatatttttcagggccctcacagtttgtgtactttacatgccggctgccgtggtgagctccacgaccccacggcacccccgcgggctcggcagctggtcgtgggctcggtcggcggctggtgatgaatcgttctcatggggccaggcgtgcattttttttttttgcaaactcgataatttaaaaggaacattgcgcccgaatcgccctctgagaaaaaaaaatcactttataacgtataaatgtcacacatacacgcagcgccaagcgcgccccgcagacagggtgcaatctccattggtgccctggatggcgcgaaggcaggtacctacatttcaatcggaaatctgattggagagacggagcaggtcgacaacagcatcatcctcaattcctccggtgttgcgctctcagcccccaacccgggcgtgtttgtgtcctccgtcagacacgtcgatccgctaacctcgaacgcgacgctgtactacgatgaggcgacctccgagatcatgtatggtgtaccccctggagtcccgaaaggggtggacggcacatgccctggcgactacttgtcctggaacggtaccgagtggatcgctggtggggacaaagtcgccattggctgtggagcgggtgcgtccaaccaaggggcaaacgccatagccatcggtgccagagctggtgagaaggaccagcctccgggcagcatcatactcaatgcgtcaggtacagcgctcaacgcatacacatctggtttgtttgtggacgcgatgcggaaagtggacatgaccacaaacgcactctactttaataccgccaccagggagattgtttatggtgcagtgaacacaacaacggtgaacgcaggcagcgttgtagccggaactgcgataagcgataccctgcgttgggacggcctcacgtgggtcgcgggcggcaacaaaattgctctcgcgcactatgcaggcgagttctcgcaggggaacaagtcagttgccataggctttgcatccggccagtcaaaccagggtgtcgagtcaatcgccataggtgtgagtgcaggggggactgcccaaaagaactacgcggttgccataggccgatatgccggacaaacgtcacagcaactgagcgccattgcaatcgggcggagctgtggcatggaatctcagagcgcgggggccgtggcaatggggtacacgtccggccagacaacccagggggccgatgccgttgccatagggacggcttcagggaagaacaaccagggctaccgggccattgcgataggggcttactcgtgcgacagcgcacaaggaagcgagtccatagcgctcggcaacaacgccgcaaagatcacgcagggggactactccatcgccattggcaaatatgcggggtattccacacagggggccgatagcattgcgatcggcgacaatgctgggcgcacagaccagggtgccaacgccatagcgatcggcacaaaggccgggtattcggaccagtcgagcgagagcattatcctgaatgcctcggacgtggaactaaacgctccctactccggcctcttcgtcaagcccatccgcaacggcgggggggtcgcaggtgctcgtgtacgaccccgagacgggtgagattacgtacactgacgggccgcagagtggagatggtatatgggcgcgtggtgtggagactattaacgattccgacaccagcagcctggcgcttctagtacagcaaaacgagcaactagaggccaggctggcgtccgtggaagaccagttgacggccattcggggcgcgatcagagcgaagcccgcgatggacctccggccgtagtaggccgggttgccggatacgacagtctgagatactccttgtccagcgaactgagcttgttgttaaaggggaacgtgaccccgttgagcgtcagcgccttgtcaaacgagtacgtcatcagcgagtaccggtcaaactttgacgcccgcaccttggcctcgtcgtacgtcatgaagaagttctggtcaatctcttctctcgacatgttgttgggcggccccccaaatagagcatacacaaccggcttgttccactcgaggacctccctgacatgcggactctggtgctcgtggtcgagacccaggacgtgagcgaattcgtgcatgacggagaacccgttcgtctggtcgccattgcgaggggctgtcgcagggacaatgtactcgatgccgtcccactcaaaggcccgcggtgcatccaggaacgagaggttcatggtcgccgccaccagcggcgcctccagacacgacatgcccacgaagctaaagctcccggccgcctccacaaagctgattctgatctcggcgtacgcgtggtcctccacaaacataaaggccaggttgacgagggggtcaaacacggtgcgcacgaccttgatcacccagttccgctgccacggctggccacccaggaacttgatcctcaggatggcgccaactggccatgtcagactggtcaccacgacgctgcggttgttcttctcgtccgcggacttgcgggacacactgatacagccaaacgggggttttatcatgttgttttattatatcgattccaaaccctaaaccctaaaacactgtgagtttgatatctggtcttgtatattctccaccaatatcttaatctcacagatgcttatgtttgtgtcgtatgcgtcagtgctcagcttactgagcatctggggtatcatctcgtgagacagttgccgctcggacactgtggagtgtgtctgcagatccgtggacagctgggcgttttcgcccttgagctgcttgattgtgctcaccaggtcgtacttttccgtctggaacgtgcgctgcttctcctcgagctgctgcatggcggcggtgacctcgctgctgcgggcgctcagctcgctgcgcaaggtggcgacctctcgcgtcatacgatcgagatccccctgcttgcgtttgctatcctcgataatgtcggcctgtgccttttgcaccagcctggcttggtggatctcggaagcgtgggcgttgcgttccgcttctaaccggcggacctgcgcctggaggtccgcaaactgaccaaggcgtgccacaaggtcgtcctccgacgccaggcccgtcgtctttgctattcgctgggtggtctggtagactcggtcactgtaggccatgtttgaggtcataatatccaggtacgtgtccacctgctgggggataatgcgattgtcgattcggatatccgctcttgtcaagatccgctgcagactgccaaacagagtagcgatatactgggtctgtaggtcaagaacactcttgtcgcgggccgcctccgtctcgagattcatcagacgctccccgttgctgggaaatggcgctgaggggggcgtcgggtatggggcagtgtggtagggcgcgggcgctgaggtcggctgaggcgtatggtatggggcagggtgcggttgcggtcggtagccgaccgtgggctcaggcggggtggtcgagtatacagtacggacctcgccctgtggcgacgaaacggggttggcgtaggggtcgtaggacccagaggacgtgacatcagtcccctcgcagttaccgccgtcagagatgtgctccatagtgacggggttcagagtgactgacattgagattgtttcttgtaggtgtgaaagtctataaggttttaaacgtcgcagactgcgaaaagacgagaaaacaatctcgttttttcggaactcgtaggggtaaactgacagagacacaatgctgccctttagcgatatcaagatatccacccagaccattgtcgcgtactccgagtccaagttcaatatagtctacatctttgacaatatcaacctggacaatgtcacgcacgtcggcgaatcgaagaggggggatatcccccatacggacatccgtgtggacgggcggccgctgcaggacggaaatatcgtgtacatgacgtacctcaacagctcgaagggcgtgtgtgtgcggcgcaagcgcaccaaggggaaggccgatgataagggggaggtgtctgcggtgcccaccaagaagcactttttccgcaacgcgctgtccatagtcgtctttgcgtccaacaagctcatcaactacaagctcgccatgaacggcaaggtgcagctgacggggtgtctgaacgaggaccaggcggtgcgtgtcgtgagcacgctgtacgagcgtacccagtccatggataaccctgcgctggccatcgagtcgccgcccaatggctttgaggtggccttccgcgtcgtcatgaccaactttgacttcaggatcgacttccgtatagaccaggagcgcattgagaatgttatccgggccagccccgagtacagcaagcggctgatgacgtcgctggggtacaccggggtcaacctcaagtacgagtgtaaaaacttcgagtacccgcccatccgtgtgctcaactttacacacggcacaaacaggttcatatcgtttgaggagtttggggtgcggtacctgacacccgcaaaactggcaaaggtgctggccaagaaggtgtactcgacgttcctggtgttccagagcgggtgcatcatcctctcgtcgctgtcgacgggatcgtcggaagactcgttcctgtactttaaaaagtttcttgatgacaaccgtgcggacattgaagaaaagctcgacgagccaaagacgtttccgctcatgacgctggccaggtaccagtccattgtgtcgaaactctagtctgagctcgtggtggtctggcgggcccacgaggcaacgtcaggccttggagtgtatgaggatggtggttgtggtgctggcgctgcagctggcgctgccgctgcagctggcgctggcgctggggctggggctgcggctggggctggggctgcggctggggctgaggcctgtggggctggggctggagccgctgcggcgggctcgacaagggtaccctccttcgcgtcggtgcttgccgcggagacaaaccaagtccctatcagagggatcttgaccaggatgtggggtgcaaagaagtacagcccgccaatggcgagggctatgatgaaaatgatcatcaaccctttgttctcggcccagaaccgcttgtaccatggggcagtggtatctagagtcgccatggcgacggggttgggctggtcgaccccgacgtggatcgggtggacgtcatccgcgattttagtcagactctcattgcgctcaaaggtcgtctttacaatcaccgacatgctcttgtccacttccggtagacggatgacaaggaacttgttgctggacgagtccacgtccagcgtcgagttgccgttgaccgaattaaccgcatcctcaatctgtgagtcggtgctctccttgggcactacggcatactcgtagtaggtcttggggtcgctgggctcaatggtcagcgtcagagggggtgagtttgcatcactcgacaactggacccatgtaaactccgagtcgagggtgacggtttcttggctcgagtagatcatggtctttttggttagtgggtgtgtgttttaaggtcttttcggagcaagtcgaggttggcctcgaccacggctgccatggcagccggtctctgcgtcacccggtccacaaactctgcgaccgccaggtggtgcctgtcacccgtgtagccgagaaagtcgagggcgcaaagcccgtccactagcgtggcgtcgcgcatcagagccagggagggtgcaaagaccttgtcgcagtgggtgtcggcaacaaagcggaggctggactgcgagagtgggaccgggatcatggcgtcagagtggaacccaaagtccaccagagcggcaaaggcgctggggtcgtcgatttcaatgggcgccgagcccgtcgtgccagcaatgaacattggtagaggggggaaagtagcctgttttgtagagggtaaaaagaaaaataaaaaataaaaaaattaaatgtacacgctcgtatgatagggtaggaacggcatgatttcattcagggcatcgccagtgggggtggtggacggcaggcgcatttcaacgatagtctctgggagaatgtacgtcattgggctgcgccgatagccgagggcgatcacgtggatgtgggtcggggatacggtcccgtcgcgcggtgtaaagacaacgtggccgatgccataggggagtgtatcgctctgcgtgacgtgttcatttagggtgaagccgtgcctggtggtcagagatgcatatagggatttctcaatgtacatgtgtttgtccttgtacaggaggtcgaaatgggactgggcggagtaggtggcgggcttgctcctcaagaagcggactagtgtgtgcacagtgtcgatctgcagggcaatgtactgcgaggagcgacccagtgcgaggccggcggacagcatggggagccggaactgggcgacggtagggagctgatgggagacaaatcccgcccgggagacgcgggcttccgggtagcggagggcgagacgggccatggcggcatcgccggtgacgaggaaggtgagcctggggctcgagcttagcgccgcgatatcgaagccccttgcacctaggtgtgcattctgcatccaggagccgttgtcggtgggcggcggtgggccttcgttgtctctgggtgggagaaactctagtggcagcatgtcggcgttccaaaccacaaggggcagatgtgtctgggagggcgtgggtgttgccacgtaatcgcggaggacaagtgtgttgacgttggtgtctaaattgaccacttcccggtcctctatgtggggaaacacaaccagggcatttgttatgtgcaagccccgggagagaatgtcgatgcgtgcgggcagcgacgggcagtgtataattgagatatccgagccctccctaaagagtggaggggcggtctgtatgtctgcaggattgacgacggggtcggggcttccacccgcacccaaaggtgtcctatccgcacccaaggatggtgaccttaatggagtatcaggtgccgcgtttaacggtggcaagctgtatggggtttctctgggtgtcctatccgcccccaaaggtgaaaacctgttgtcaggggagggtgcgcccaagtatgggggccttggagtatcaggtgccgcgtttaacggtggtaagctgtatggggtttctctgggtgtcctatccacccccaaaggtgaaaacctgttgtcaggggagggtgcgcccaagtatgggggccttggagtatcaggtgccgcgtttaacggtggtaagctgtatggggtttctctgggtgtcctatccaccccaaaggtgaaaacctgttgtcaggggagggtgcgcccaagtatggggggccttgagtatcaggtgccgcgtttaacggtggtaagctgtatggggtttctctgggtgtcctatccacccccaaaaggtgaaaacctgttgtcaggggaggtgcgcccccaagtatggggccttgagagtatcaggtgccgcgtttaacggtggtaagttgtatggggtttctctgggtgtcctatccaccccaaaggtgaaaacctgttgtcaggggaggtgcgcccaagtatgggggccttgagtatcaggtgccgcgtttaacggtggtaagctgtatggggtttctctgggtgtcctatccgcccccaaaggtgaaaaccctctgttgtacagaggatagaacggggcttctccaaatggtgtatgttcatttgtgcccccaaatggcggcagaacaaaatcttcgtgtgcatcagcattcgtttgattcagaaccccgttcaaaaacgcatcttctccttcatctgcgtccgtgggtgttccactcgggtcaaagccgttgaatattgggccggttgcccttggttggggcgggttggcccgctgtgtgtggattctgggtaggataccctccccccaattgtacggggtgtccctagcgggtgcaagggcattcgatgtatttagtgtgtgcaaggacgcctctgactctgtggtggtgtctgacgatgcttcacgactaaaatccgggagcgcgtttgcaaggccattccctctacttgtcatgtcttgcgatgccccactactgatccctgaatcggggggcgcatttgcaaggtcattctcgatagcagtcccgtcttgcgatgccccgatccccggatcgaggtgcgcatttgtaggatttggcgtgtgcagggacgactctgaactcattcttttcattaatgttgtttttttatattttttttttttagttaaggtcgataaacaagtacccaaaaacgactcgtacccaggatgaatattgactttaccgcgtccacgaaccccgtcggtgaggtcgttgccaaccagctgctggccaacagcgccgatgcacatgtctcccaggacggaacgctggagattgccctacagcccaactccaaccgcaaccggggcttcgaccggtctctcgcaaccggcaacgtggtcgagttcgagagcgccgaggtcagcgcacagactacaacggcctcgtcaatggtgtacacgcagaactcgcccttctcgctgaacgtcagcctcaagctgggcgtcaacgtgtccaacgcgaccgcgggtcgctacgagctcatccgcctggtccccaatggccttggcaaggaggtcggcgacctgcccctcgccgcgctcaacgtcaagtcgcacctagtgacctttaccagtcccgcgaacctgttccccgaaatgctggttggggccctcgacatattcaaggccaacatgcacgtcgtgcgcatcacgggcaaccccagtaccagtggtgtcttgactctgacaatctttgataccagcaacaacattgtgtttgccaagaccgtgtccaacgtcgcgctctggaagaacaactacaccgccatctaccccaagattggcattcaccgagagaaatcatccaagtacacggtggtgcaccaggtgtcgctggcgaccctgtcgtcgtcgtcgacttccatttccgatccccagagtatcctgctacacaccaaactcataggcaaggagccgcctcccccacagtccgttcccgataccaccatcacctacaaccccgaggtcaccacgacgaccacgacgaccacgacgaccacgaccaacggcaagggaaaagaacccgccacgccagacaagggtgaaaatgtaaagggcaagaacgccgccggccagaccgtcatcgtgcaggtgtaccacacccccatgccccagacacagggcgatggcgcgcagcctcagatagtctatgtgggtgtgcccgtccccgccgacagctccctggggacatcggtgaacaacacatacatttcgtccaccaccgacaactcgactgtagactacacatcgaccgactacaccaatatcgacggtagtagcaccaacaccaataccaataccaataccaataccaacaccaatacgaataccaacacaaacaccgacaccaataccgatacgaacgcaagcactggcggggacgcggctgatgacatagatagcagcgaggacgaggacgatgacgacgacgatgacgaagatgaggccgaggacaagaagaagaaaaaggaggagaccacaaccgccgccgtgccgcccgccgagtccggtgggggtaacagcacgctgttgtatgtggggattggtgtagtggccctgctggtagtgggtgtgttggtgtacatgtacatgaaaaagagc

SEQ ID NO: 97 - DNA, 20918 bp, unidentified
  misc_feature 1..20918: note = Fanzor polypeptide
  source 1..20918: mol_type = other DNA
ggtgccgttctcgcgcaccacatagcaggcctgggtgtccgtgagcacacagaacgagttgaggttggcaatgatggcgcgcggcatctcgccaaagtccacccggatacccggctccacgatgacgtacttgccgtcaatgtacgccagttttttgcgcgactgcgcaaaccggtacgccaccggcaccgacagattgtccaagatccgccgggggatgcgcgccgagtgcaccagtgacacgggcttggccatgccgcggacattgtcacagagcacattgtcaatgttgatacacttgggctgcgtatccatgtttggttgcttgctgtgtgttgatttttcactatataaatccacttaaaggtggttttgcgtctcacttttcacttttcacgagactttttacccccatcccccacttgttctagtagtatacacataatgcaggcttctacagagaaatccgtcatgatggcgctcacctcacgcgatacccccgaggcgatccgccggctcgatgcactgggggttcgggtccgcccgtccgagctgccgaccctggcccaggtgcggaagcacggcttctacgactttttcgccgccgccctggcccgcggctactacgcatccgcctcccgctactacatgcagctcaccctaaaggctatcgataccgagtgcaccctgcggccgttcatctacaaccccaccatggccgacctcatagtggtgccaaagctcacgcgggacattatcaacataaaatcgccctccgactttgaggcttgtgcgatagaagcgtccatgtctacggaggagtgggccatctttgtccggcactggagcaggtactttgccagccccgactgcgacgcactggtgctgccggccctcgacattatgtgcacctggaacgccttcaacatctttggccccatagcccgctccagtggggtcctcacaatgctcaagcagatcctgcgcacctgcgtggcacagcaggaccccaagtacctctacgcgttctgcttcgaccacacgtacctggcgcagggtatattttccactattctggccgccgcagcgccaatggtggacgacctggctccgctggtgttcctgggcagctacactaatacgcgcgtgaagccacgtgatctctgggtccaccgcctgggcatagtcgacccgcaccggccggtcggctccttctatatgctgctgctccccgaccacagcagtctggtgtgggacggcgtcgtcatggacctgctggcgggtgtctccaagtacagttttgccttctcaaagacccggctgacgatacagactctgagcctggcggacatgcagaggtactttgtgctgccgacggcccccgcggacattgagctcgtcaagaccgtgtacggcacggcgctgcccgagtgtgaattgtttggaaatgaaacttaataaatttttataatttttatttattattgtaaaactcaatctctagtccctaaacgctagacgctcacagtgaccggtgtggctcggagcccacaggcccccatgacgctctcggcgttccgcggcagccggaacagcccgcccgagccccaggaggaaccccacgagttctggacaaggaagctcgtctcatcgtagccgaccgccaccacggcatggttgaggggcgtcgtcaggtcgcagcccgtaaagacaccgctgcggtagaaacgcagggctgtgttggcggctatggcgatgctcacgggccccgtctgcagtgccctcactaggttgtcctcgtccgcgagcgcgtccacggtgtggaaggccgtgatgtacgttctctccgcctggtagcacgcgccgccccggtggcagtacgcctccgggatctcgtacgcgtacttgtcggccgggcacacgccgtagtgcttcacgtaggcaagcacggcaatcgggtacccgccgtcgcagcggaagttgccaaactctcccgagcagtcaatgatctcgccaatggagaggcgcaggtgctcaccgtgcttgatgtgccagtgcgcctgcaccgtctcgagggccgagaacgcgtagcacgagccacaggccccctggttctggatcccggacatgctgccagaccagtcgatggacgccttgacctcgccggacaggtccagggggtgggccagcatgtcgtacccgttggggcggcccatgacgaacgggtgtgcctgtgcggcaaactcggcgtccgtgaggtcggcgtactcgttcaggcccagctcgtaggactcgttggcgctgtagatctcctccaggttctggcagaacacgcgcttgcgcatgctggcctccgcgggactcgcatacaccttgccgtagtcggccacgaagcgctcaaaggccacgtcgcacacgctggtgtagccaaatatgatgctggataggaagcgtagagccattgtgattttttttattttttttctggtgtgtcctataattgtgttctatacataaaagtgagattcgctttttttttttggtttagattgaaagcaccagggtgctaatggccggaacgtgaatcatgccaatgtcaaactgcacaatgggctcgtagccatactcgtccagcaggtcccgcaacgacgcccgggtcacgtgcacctgggcgtccaccacgtgcagggaacgagacaccgtgtccagggccgggtcgtggtgtgtctccagatggtccgacacccggtggtaaaacgtctccaggagctggatggcccgctcaatgaactcgcgcttcatgtcgagctgcaccagcttggtgcggtaccgggccgccgccgccgcatccctcgctgacccgaggtaccagcgccgggcgagacggagggcccgcggtggcgcctcccgggccgccgccaggtaggtgagcgacaggtcgatgaggaactcggccacccgacgcgagcggctcgcgttgacggggctgatgatgttttcgatcgcctcggtgatctccaggcccctgcggcccccgctgccgtccatcttgaggcgcttgccgccgccgtcgaggtactccgagtagtgggggttgtgcacgaacccacccacgatcggcttgccggtcgagtacgagaacatgcatgccttgcagctcgtgcagaacatctggtcgcacccctcgatcttgtagacgtgggacttgcagttggggcaggggacgctgttcgagcgcacggtcgccaccgacgccacggtgtcgtcgtcgcactcgtggccctcgtccagcacgcgctccgtgcaccgcacacaggtggacgcctcgcaggtcacgcagtcgaccaccgtgcagttgggcgcggggtccaggcgcgcgccgcagaccgcgttcgcgcagacgatgctggcgatagtcgggttgtggtggaactcgaggacgtgggctcgtcggtagagctcgtcgacgcggctccggggcataaactctgtgcccaggcgcgtatggatggcgagcacctcgtccatggtgctgtggtgcaccgagtcgcggaggaagaggagctcgccccgggcggccttgatcttggcaaactgcggcttggataccgccgcctggatgtcctggtacgtcacggcctccaggcagaacatgcaggcccagtccttgccgtccgtggcctgcaccttgtagtgggtgaaccagcacgtgtaacaggcgctggtgtggcagctcgggcagcccgcgccgtcgcggtagtggggctggacgatggcgcccatgtgggagcgcttcgtgccggtgcgcagggttgcgtcgacgcagatggggcaggtcgtggcggtggtggcagtggcagacatggttttgttgttgtcgtttctggcgcggaagtccgaaagtgaatggttttctggaaatgttgtgcaatatataaaagcgatttttctttttttattttgttccctctctctctctctctctctctctctctctctctctctctgggttttagggtttagggtttaatgggttttaggcggcgcatcagactacaagcatgactatcccgaaaatcattcacttgtcctacaagagcaggtccagtttacctgaaaagtggcgacgtgtgattcgcgcttggcaccaaacacatcccgactggcacattgtgttctggagcgatctggacaatgagctcctggtccagcaagactttccctggtttttccagacgtacaatgcgttccgctaccccatccaacgcgcagacgccgtgaggccctgctacctctacaagttcgggggcgtgtacatagacatggactatctgccgcgaaagtgcatctctggtctgtttgcgggttccgacaacgaggtatacctgaccacgtcccccaacgtcgggtcgtcgttcaccaactcgttcatggcgtccaagccgcgggccaagttctggatcacgtacctcgaatcgatgatggacgtcaaggtaaaaatatactggacaaagcactttgaggtgatgaacaccacggggccgggctcatcaacgcggcgctcattcacccgtgtagtatatgtacgtcggaccagtgttcgtccgaataccttacgtccctggaaggcaaaagctggaacgggctcgacaccaagctcatcaacctgctattctgccaaccctggatgctgattgtccttgcgcttgtgtttgtgtttgcgcttgcgctgctggtgcactgggtgtaccctcacaactcgacaaagcccttgtagtcgttgtcttcaaacgtgcactgcacgtgcacgttggcattcttgagctcgtacacctcctgcttgtccccccagtcgtagaacgcgtggttgatccactccgtctgagaggtatccgccagcccccactgggccgctcgtgcaaaccaggtcttgtacaggtcgggtgcggccggtgatatgagcttggactgcaatgatcccccgaggcatacggcgccggcgaggtggccctcgggcgtcttctcgtagtttgatgtttgtgtcacctggccgcggttgccgtcgtcttctgctgggccgtttacctctacaaagtctgtcgataacgaacagcctgtgttgttgatcagagcgttaagcgctttcattcgcacacgcgcctgctgaccaggtagcggatctgaaatcgtcaccatatttgcaccacagatgttggtgtaaaagtcctgtgcaccgcgcccacacgtgcaccgcatgtgcataaagtccgggtgccgtgcaacaacactgtgtatcatttgcatgtacgcaatctgtgtcgccgaatcggctgtggggcagcagcccatggcgtcggccttgatgcccatgaccccccagctcttgagccgctggacaagggtgtcaagccagtcgatggcggcgtccgacggcttgatgtaatggtcgtcgcccgcctcatcgccaatcgggtcatagccccgacccaaggtgccaaactcctctgcggcatagacatcgtcccaggtcatccccagtgtccaccaaatcatggcctcctgcccgttggctttgagatcggcgaccagtaccttgaactcgtcgaggctgcccagcgtgtcgccgttgacgccctggaagtcctcacccgtcgaatagcccccgccgccgccgccgccgctgctgctgttcgcgctgctgtttaggttcgcgctgctgtttaggttcgcgacgctatcacccacggtcccactgtcgaaaaggtagtatcccgtctgtaggtcgcgcatgacggtgaagcagttgcgcacgtccgcctcggtgaagctctcctcgaggtggtacgtggtcagagcaggcaaaagcgcccatttcggtgcaggctttgacgacaggccgtgtttgcaattcatcacttgtgcgtatttccgcaagcagttccaaaagtcagaaccaggtgcgaaagtgtacacgcacgtcttgggcgagttgatgagcgagaggactacactacctccgctaaatgtggccttgccggtaatggccggtgtgcggtgcggtgacgtgtttgcaatcatcgtagccccggactcgtcgtacactataaagacgcaatggtgtcaacttaagcgattttctttttttttttgggttatagaactattgttttcaaattgtcaatatggacaaattaaaatcattttgcaacctccaagaccacaaatggattcttcgaaaacggtctataactacattcgacgtcgtcctccactacatcctcactgctgtgttgaacatcggtgttcgcacagcagttgccatgtccggttgtacgtgttcccccacggcaatggcaaaggccatgaatagaattccctgctacgtactcgaatcgatattgcgagagtacacgccacaacaaccatatccgttacggatgcaaacaattgcggttgacggctcgtttatccgccttcggcctagactaagggcggattttaaagtgtcgaggaatagccgtaaatatccccatgcgctaattagcacaatgtacgactgtcatacacatcgcgtcgtcgattcacaagtttttgtatcacacaacgaacgcgacgcatttcttgctagatttgtatctcgcggtgatatgtatgtatttgataggggctatttcagccggacgttggcggacaaaatacacaccaaaggatcgtactttgtctttcgcgttaaacataatcagagatcattcccctcttacacacggcgacactcttacatacacgacggtaagacgtaccatgtcttaaccaatctgttctgtactaagtcctgggcagattgcccaggcgtatggacatcgctggaaggtagaaacttactttcgccatatgaaacagacacttggcaaccgggtctttcagaagcaatcgattagtggtatgcagaaagaattacttgtcaggcagattgtggacctcatctctcgccaatccgattcggtgatgtggagtaggtctgatgttatgactcaacttgcaacattactccgagatcatactgcaccacgtcgatcaaaagcacctcatgtgattgaaatgtatccaattatatctcttacacctatatcgcgtggaatagttcttaccagatcaccaccagcgattgatggcgttgcgactgtattcaattggtctagatgtaaatcgggaatagggtaatccccctgtgtccaagaaacatggctgatccatggaagacatcctactcttaaggtttatgaatcggttttgaatgatgatacgtaaaactcggaattagtatataagggcattcaaactgtcaaatacaattcacaattacactgtgtatgttttatacagatagatttgcaacacaatgcccctaatcagcaagcgatcgctctacatcgatcttgcaacctgtgcgaatcagacccccggacttaatgttagtatgatcgacaagacatccgctgagatgatcgaggtcttagcgggatacaatcacgctgtcgtaggtggatttcagcgtctggtctttgttctacccctctaccaagttgactcaatgaaatctatgcacaagttggtgcacgacgcaagatacaagattaaccatcggcgtactccacctatcgtctggccccatgtgctgatagatgcagcccgggttggcattcgtcgcaaccatgtggacattgtttctagtgtcgatcctgctcgatggattgcaacaaattcgtccaccgaggatgttgtgctgactagagataaggtagtactatgggcaagaggtagacacaccaccaacctcaagtacttgtactcggcagttgactccgacatgattgagacattagacgactatagtaatacacccacacccaattcgatcattgactggtgcgtgtacgaagtaggaacactacggcgagcgtttgccatgtcaagaatgacagtggtaaatgccacccacgccgatcgctgggaccccaatctatttcagtctcggcgcgccgaggatcatgtagatcagatgatgcgctatatcagggccgagtatgaagaaatttcggttaagcgcgagaataccacgggtcgagctgagtcgaaattggacaagcggttggctgttttggatgcaatagatcgcatcgatattagctggttcggacacctactatgtcgcatgacatcagatagcccagtcgctacgcgtgggacgcctatgcgtgcatttgaacaatttgacttgtttcacaacggggagctgtctttgtcacagtgtttgggggaggagaagcatcaactgcttcagaaggtcgcaagaagtgcccctaaacgaaaattagcatctcgcctttggaccaggcagaaacagaccaaagagaattcatccacccaacgtccaaagaatgggagagtatctatacctagaacacacaagttcacctgggaagttggacgcgaagaagcactgctctactggggtgtgaagaatgaaagacccaaccgctttgtcgggttgttagagatggcggacactggagcattcaagaagctgggaaacgatgaaactatagactatgatccgacgtcgaacaccaggaggcctaaaggagatttgctgatatgtgaaacgtgtggagagcgcgttcaagacctgatgaaacacaccaaggcggaacattggttggaatgtccagtgtgcaacaagtcattcgagactctcaaggaccacatatgcgtcaagtgccccaagtgctgcaagacaatgtcaagtctaaaaaaaagcacaagtgccagatgtgtgggaagtgtgggtcattctatgcaacgcgacactattgtggtgagtgtagcgggtgcgatgccaagtttaaatctaagaacgctgaagatgcacataagtgtcccgggaagacgaaggaaaggtctgtggacaacacatccaaacgacgcctgacgaaggcgtctgaacgagactctataggggtgttgaagaaacagaagttggacatcgactctgttgcaaaaaattatacccgtgaagagacggaagcgcagcggggattctaatgttgtgcgcgataaactggctcttacaaaggggagtaagcgtcaaaatctggatggatgtagaaatagaacaaggtataccaccattgggcgacttccacatgcaaaatacaccatccatagatacatccagcgatgtaatcgggagtggtacaacaggttgtcgttgtttattgatggagcgtcagatagaactctcgaggacttcttggtgtgtttctgggattagaagccggtgtagcttcggttgacgtgggtgagagagtgtagaagatgtggtgggcccacttgatgatgacatagctgccggtgacgagctgaactctgacgtagactcggtggatgtgaccaaattggctagtcgtctcaccgccacggtaaaggatctggtatacaatatccgacgaaaggattggcgacatcgtttattgaggtgacaaagctattttgtcaaaattggatagagacattgcagaggcgatatgctgaactccagttgcttgtggacacaccggggacgtttcaggtcatctattcgaccgtgagaagtcatgatgatattgttttggacaagctaacaccagttggtcgaaagctgccacttgcaatccgaattgatccttctgcattactcgggatggcaaaatcgtgttggtccacaaccgagggtcgaggtcggaagataccaacagtcgacgaatcgcagtacagtcaatttgatgtagttcccaacacagaccaattgacgggtatgcatgtgcttatcggcaaggatcttaccctggaggttgtgaagcggatgaacaaggcgaacaaactggtaagaccatcgttgatgatctcgaaaggtgttgtgcgactacttgagcgagttcccgactacaacaagacgatgaagatggggtgatggggtcaaccttgagactattctcggatcggagtataaggctggtggattgtttggttcagcaaaggtgggtaaacagattaatcgaacatatctggcaacactgaaagatctgtatgcacagtatggtgacagtgcaagagcaaagtttgtcaaccgcccgattgtgaccgtggacccgaatatgcatgaggttgtgtttggagtattctatccatccagactgagggtgaaatatgttgacaacgatatgtccgaacacacaaagtacaaggtgtcagtgacgtacaggacatttagtgtgagtgcagctacactgaggaactcgtcgaagctatggcgggtgtacttggcaaaacacccgatcgcgagggaagggtcatttgcaaaagtcgcaaaatctgtatttaaatccgaagctgtaggtgcacgtggactgggtgagcggctgaaggtccagtttatacagcacgtgatgcggatgttgtcaaggtactgcagtgaagggcgagctggctacaaaacactagatcctattgtgttgtatggagatggacaatttacgagcaacgcgaaggggcttgttggcttcggacagacattggttcgagagttgagcaaacactgttttgtgatgttttcagaagagttcagaacatcacaggtgtgttctgtgtgtcatacgaacgagccgatgactcctgtagctgttgggcgtcacgcaccgtttaagcacatgcgctgcatgcattgtgtgacaggtgaaggtgtgacaaggagaaatctattgtttcagcgagacgtgaatgcgatattgaacatgtttcgcaatgcactggagactacggtacttggggatgtcgggaaggtcttcagacgaacgaggaatacacgacgagccatagggtagatatatagatatatagatatatagatatatagatatatagatagaaaaatcatgggatttgccatccaaggcatacccttttaaattcagaacgtgccgttataggaacgcaacatatagacaattgtatgctaagttaacattaatgataaagacggggattgtacccaggttgttcttgtcatcgccggcgacgccatcgccactactcagcacactgagctggtcgtcgccccatttgcctgggaagccatgccagcacatcaccttgctgcccttgggtgtaaacgcggcgctcttgtcaccagcccggaaggcgtgctcgcggacaagtcgatcagtcagtgtggccccgcccctgtagcccgacgagcccccggcggcctgcgtggggctccgcgtgggtgcccgtgagctgcgggccagcaagttctgctttgcgttcttccgtcgatcaaacaccgatacatagggggcaccctgtgcggggggcgcggttcgagaacgcatcccccacaccaccagggttactagtagtattacaagcgtgactgctaggacaattagtttcatattttatttatcatgttccaaaccctaaaccctacactagccacggccacacagtaggccacccgtcaagcacgtccacgatgcgtgtctctacatcaagaaacactcgctcgcggtcaacccagcgcccgccgctgccctcgatggctcgctggagctcacgtcgccgctccctggcgtagttggtgtagttgaacaaaaagtgcatctgcgccatccgcgtggccacgtgctccacacacagcggctgctcacccgccacatacgcctcgcacaggctgctgtcgggccttctggacagccccagtctgccgagtgcgatctccagcgagatggcccgctccgccctctcgtagcccgcggccatcgccaggaaacagtctacactcgcgtgggtactctctgcatcggccgccgggtgcagcagcgtgtccgcgctctgctgcagatacgcaagctgccgacctagcgtcagtcgggccagcacggtggcaacgcactcttggaccttaaaagccctaaccccagacacgggtcgccagaccctcctgtcgagcagcacggtgcgccagacaggcggcacgagctgcaggaccgtgttcatcgagcgcagcgccccgagcatcgagtccaggtcaatgccctgctcgttccgggccacccccagcagcagtcctggatcggccggggccccgaacacggcctcggtgaggtagtcaagctcgcacgcagcatcgattctctcgtacacgttgccacagagagcccacgtgcggctgtagaacaggtagcccagccagtccaggcccttgcagtacgcgcgcagccgcaactcctctatctctgactcgatggagaaatggcgcttgaagagcttgccataacgcacgaatttcttcagggttcgctcgtgcagaggcgcaccgggccacagtgtcaggacccgtttgatgcgctgcacaggtgtgtccaggacacccttctcctcggtagtgtggaacgcgtctgcgatacgcttctggaacaagatgttggtcgtaacggccctcgcgtccctagcagacacgcccttgccctcgtggaaggccaggaacctgccaaggacctcccggcactcgtcggcgctcccgaggtctacgcccatgggcggctcccccgtgtacatacacaacaccaggtcgatcatctgcaggctgtaggtgttgaccaagcgcttgccgtaggggccagggcgagtcgcctgtgtgtagggcacaagggtcgagggccagccggccatgcgatgggggaggtcctccgcggtgacgggtgtgtcggggccctgccgcacacgcatacccaccaccagagcgcacatgcgctcccagtgccgcttgggcatatcggcggcgacgtgcctggggcagatgcccagccccgggatgtccgtctcggggctgagccagtacgcgggcacacgtcggcggtgactggccatgcacaggaagcagatggacgccagcttggcgcagaccaggtcccgccatgtctcggagggaccgatttgtttgcgcttgacgcgaaacgcgggggccacaagtcccagagcggcctcctggaacggcaaacccggaagaacataggtgtagattctcgctgcggcaaggagcggtttgacctgctcaaacgagagcgtctccagaccgggtggccagcgatcgtgggttgccacgtaatcgaggacggtgtcgatggccgctggagagagatcgccggtaccggaagcctggtcctggccgggtgcgtacgagttaatgtctacgagcattgttcaaacctgaatgtttcaaaaggtgtgagtaatgaagatatggcaaaagggaatgttgcttatatacggaaatcaacagagtttattcacttctctagccacggccaggcagcgggccagccccccttctcgttgacaatacgtctttccactccggcgtatacggcagtgcggtccacccaatcgccgtggcacctctgtcgccttgccgcctggaaggcctcctgtcggtccctcgcgtagctagtgtatgaaaaaagatagtgcatctgcgccatgcgcgtggcaacgcattccacatcgagtccaccggcggcaatgtactgctcacagagacgactgtcggcacggcgctgtagcccaactgcgtcaagcgcattatgtagtgccacaacgcgcccaatgtacccagtgtcgtcgatgcccctggtgtcctgcatcaccctgtcctgcagatcgggctccacagtgcccagaatcattctcacgcaaacatagtggttcacgttgacggtggtactctcaaagtccgcgttgccccccaaggtggacgacatatactgctttataaacaacaactgatccgcctccgcaagcctggtggtaacaacacccacgcaagcgcgtagccgggactcatcaagccccagagggacccaccgtttctggtgcagcatgtcgagcaacaaagcgtgccaggtctctggtaccacacgcagcacaagggttgcacaccgcagcacgagaatggtgtgctgtacatcccgggtggcggacttaaaaataaagtccaccaaatcttgcggctcaggggccatgtcgagggccgatcccgtctcgtggcactcggccgcggcatcaatgcgttcaaacaggccttccaccagacaatccccggccttcttgaagtgggcctcggtgagccacgcaaggcccgccgagtaggcgcggaccttcagctcgagcagcgcattgtccagcgaggcatgtctcacgagcagcttgccggacttgacgaagcgcttgaggtacgctgtgccctggatatccacgcccggccacatcgccaaaacggtgctcgccctctgctcgggtgtctcagcctgggtgtctagcacggagtctctcgcccggaagcgttttgtcacatactcgtcccagaggtcggcggtggccagcccccgcttctgcgtgaggggattcgcctccacaaactcgtctagttgcagtcgagacgtcgcgagatcggcgatcgcgcgagaggggtccagatccggtttccccgtgtacaggcagcgcacgagggtgacgtcctcctccgcatagatgttgctcacgtacattccaaagcgcccgcgcatagtctcctgtgaatacgggataaggtgcgtcggccacttgcccagtacggccttcatgcacgcggtgcctaaggctcgcgtatgctcgtacgcgaacggcaaatcccgcacggccatgtacatgcggcgccagtggctcgcgggcatgtcactgagaacatgcttggcacacatgcccagcttgaggtcgtcacacgcctcgctcagccagtacgcgtccacacggagtcgcggcttggctagacacaggaagcagtttgtggccagctgcgcccgtacaatcgagcaccagctctcgtccttcctgagccgcttgcgcttcacgtggaacgccggggccatgaggcccagcacggtttcctggtggggcataaacggcaacaggtaagtgtacgggggagcagccgagagcagcggctggagctgcaggaacgtcagctcctcgagcccctcgggccaccggtcctgggtcgcaacgtggtccaggatgcgctcatggatggccgcgatggccgatgtggcgcctagaaactctgctgccccaagcgacgacatttcggggaagctggccacaagcacgtctcggatgacgggggtggcaaaggctagtggccacggaacgtctgcatcgaacacgggggcgtctttgagaagcgcacaagacgagcgctccacggtgctgatttcaccgtcaacagtggactgaacaagcatgatgaaataatggaggatatggaggatagtggtggcagagtggcccttttgtacaattttgtagtagtgtacagtcccgaagactcattttgcctgtaggccacgagacagcctcgattggtggtcaattcaacccctgctcggcctgggcaatgtggctggatgtgtcgcgtagtataagtccctaaatcggtctatccacagcctgggagtgtgatcgttctctggatcgctacaatacatgagatgcaaggcgacggcatacactggcagatcattgtaatttcttcccggacctattatttcaatgatgcccctgagtgcggcgtcgtgctcctcggttttaaattgagtctgtctcagttttgcaacgaacggccgcagcctgtactgagatttattcagtttgtttatcaccgtgctcatccggatgacacagtattttgtggccaaattgtggtgagcaatggcctgttcgtcgacgcatttaaactctgataaacattgcctttttcgtgtagctggcctatcaagtgcctcattgtcccgtggacgaggtgctgggtgtgtctggggtgtggatggcccaccctcattgtcccgtggacgaggtgctgggtatgtctggggtgtggatggcccaccctcattgtcccgtggacgaggtgctgggtatgtctggggtgtggatggcccaccctcattgtcccgtggacgaggtgctgggtatgtctggggtgtggatggcccaccctcattgtcccgtggacgaggtgctgggtatgtctggggtgtggttatagtgtgcggtggaaattgaccacggatcaatgcacggttgtcaccccgcgtgtactcgggggctccatcggcttgcgctctgtaccccggtggtgtggtccccgttagtgtttttaacaggttttcaagtactattgatcgcttgtactgtttctcgagcttggatacaacattatacattgatctcagatccgccattgagtccaggttgatcactgcaagaatgccgatctgctcatctatacatgtttgtgtgtgctgtagtttttttatagccttctccttaacgagattcgtcatgttgttttgttatgtaacgataaaaaaatgtttagctagtctacacgcggacgcttcctccaggaccctctttcagactccccctcagtgtaactgactggactgttgagtacagagtgtccatcagagttccgatcagcgtcgtctgcctgagttaaacgttcgatcgttatattcagatgttcgatggccgcatacaattcaaattgacgattatacacggatgtggattcaaggcataattccaggccccggcttgaatttcttgaaccaacgtcgactaattcgtcgattaaatgaaatatgtattcattattcctgtgaaattcgtccagcaattttaaaacggcggtccgtttttgctcgaggagctccccgatttcacctcggatcgtgttgtgcatatttcattaatgtgcatatttagttaccgaaaataaatttcatttgtacaattttgtagtggtgtacagtctcgaggactcacctaggagcagtttattttcaatgaatacctagccacggccacacggatggccacccgtcgagctcgctgacgatctgcgactccactgtcgcaaacacagcctcgcggtctacccacacgtcgcgcccactgtccgctatggcctggcggaatgcatgctccctcgccgtcgcgtagttggtgtaattgaacaaaaagtgcatctgagccatgcgcgtggccacggccccaatgtccagcaggctgcccatgacgtaggcctggcagaggctactgtcgccccgtacaggaacgcccaccctggccagcgcgcagtgcagagccaccacccgttcaatctgggtcgtgtcgcgcaggccggcaatctccatgtacaccgccggctggaggtgcggcggcatgttctccagggcaagtgccatggtcaggaaccggtcgacgctgtaggccgtaccctccgggctcgcctgcacgcccagcagcaagttggcgttctggtggacgtacatgagctgctgcctgggagtcaggcgggcgagcacgacaccaacgcaggcctcgacagttttagggtccagtcccgagtgaggctcccagatcgtgccgtcttgcagcataccccgccaggccatggggacgaggccgaggacaacgtgcatggagcgcagcctgcccagcgtcgcctcaaggaccggctgcttggtctcgaccagccccatgagctcctcggcatccacgctcgtgccccacacggccatcatcaggtagtcgtactcgcaggcggcatcaattcgctcatacaccccctcgtccgagacgagggtacgcgggttgagccagtcaatctcactacagtatgtcctgagccgcatctctgcaatctgcgactcaatggacttgtggcgggcctgcagctcaccggatcgcacatatcgcttcagcattgttctcttcaccggagccccgggccagagggtgaggacccgctcggctctttgcaccttggtctctgcactctcggcctttgcgtcccggcagatggtctctgcaacacgcttctggaagagtgcgctggcttccatgaccctctggtccctggacgtgaccgggctgctctcgtgcagggccaagaatcggtccatagcagcccgcgactccacaccaccgagcctagctccaggcggcgggctgcctgtgaatagagcaatcacaatgtccaccatttgtcggctgtagcggttgatggtatagtttccatacttgccctcaagcgtctgctggctgaccggaacaagaaacttgggccagccggccagatccaccagcagggctttgacggtggtgatggcttcgcggccctcgcgcaccaggggcatggtggatacagccgcacacatccgctccgagtgcctcggcggcatgtcccggcccacgtgcttggcgcagatgcccttcaggcccgggatctggtccttgagccagtagggggcgaccagcttctgcggcttgagcatgcacagaaagcaaatgtccgagagctgcgcgcacacaagctcgtgccacgtctctggatgctggaggcgccggcgcttgaccctaaatattgccgctgtccgctgaagaacgagctcctggaagggcatacccgggagcacgtacgtgtacgccggggcagctgcgaggaggggcttggcctgctggaacgagagggcgtccagtcccggtggccagcagtcgtgggtggcgacgtgatccaggatggcctcgatcgactggtcaagcggccaggcggcggcaccagcatccggctcaacgcagtggttggggtggtcggctacgggaagatggatatcaagcatgatgagaagaagaatgaaaaaaatgagacaaggtgcacgacttatatacagattttcagaagcgagggaaacacagaggggcacggggcagccccgattggtggacctttttagaattgaaatatcgaaacatgttttttttgttcttgtatataaagcgcctgaatacacaaaccaaatcacacttttacaacaaccaacaccaacaaccacaagccaaacatgatttactttaccgcactctgggctctggtcttctcggccacagccaccaccaccaccaccaccaccgcggcccacgatgccaccccgtccatggtggaaccgtcccatgctgcacccacggcggtgtactcgccggtttacctccccgacattcacggcgtcatgttccccatcaccgtcactgtgaactcgaccgactctgctgtcctggacgactacatcaacagcgtcaccgagtccatcaaggtcctggcaccccaggcagtcgtcaatctcgtccccactgccagcgcccgtgtactggatccctctgcgggcaatggcaccagcagcaccgcctcgggcactgtggaggtccgtatcccctcacacaagtacaatgcagtcgtcaacaacatcaacaacgtcgtcatctctggtgataccggaggctccatcacaataggcaatgatgccaacatcaaccaggaggagaatgttgtcgtcagcgtacccggcaccacgagccccaaggccagccccagcccgggcgccccgggctcaggagacgaggagtgcagccccgggtgccccgcgagctatcccggcgacgactactgcgacctcgaatgctatgtgcccgagtgcaactacgacgatggcgactgcgagctcgagtacccccctgtccagttcaccaaggagtgtcgcatcacacaccccgatcccgagctcaaccagtacctggacattgtctatggcgttgcagtcatggtctcgtccccgccaccgcgctggaccctcgagtacgtctccgacacccagttcatgatgcggcgggacgacgagtacctggtggcggctctcgagaccgaacccggctccaacggggacaatatccttctggagaccagcaccagcgcagaggccccgaacaacctgtgggtgttgaaggagaatggctttatcgagaacgacatgaactggtacatcatagtcaactactcgagcagctgcatcgtcaagctcatggtcacgggcaagtaccaagtgtacgctgaccagatctgggagtttgtggactgcatctaggggggttttttttttttagttaagcgcagactacacaatgaataaaaacacttgaacaaaaaaactctagtctttaaactttttcgccaggcaagatggagaactggcccgtgatttacatctcgcaatcggcgtttgcgctatgcaacttttacggtgtgggctcgggtatgaaccagactgcattgttttttattaccgccgcctacttgctggggctgtcgtttataatgcgactactgtttggtctaccacaagtggcctcgcttgctatagccatcctgtggttcctcttttcaatgtatcgggtatactcgacatcaaaagaaaagaaaaagtacgcctatgccgtgggtgcccttgtgtcgttcttggtgacgatatactttggccagagaggcggtggtgggtttgggcgtggtgggcgtggtggatactaggtgaattttattaaaaaaaaaactttatttttatagtcgcacgagtgtctcggcactacagtcgcctacgaaatttcgattacataaacatatatacatacatgacccttggcctctccgccattcgggtcttgtctgtgggaggtgtaaggcttacaaatgtttatcaaacactcttgatgtatgcaacttaagcccccaaaacacccaaagaccccaccacccaggcccttggcatctcaccattcgggtcttgtccgtgggggtgtaaggcttacaaatgtttaccaaacactcttgatgtatgcaacttaagcccccaaaacacccaaagacccaccacccaggcccttggcat

SEQ ID NO: 98 - DNA, 14899 bp, unidentified
  misc_feature 1..14899: note = Fanzor polypeptide
  variation 1926: note = n is any nucleotide
  variation 2596..2768: note = n is any nucleotide
  variation 6997: note = n is any nucleotide
  variation 7389: note = n is any nucleotide
  variation 12484: note = n is any nucleotide
  variation 13196: note = n is any nucleotide
  variation 13448: note = n is any nucleotide
  variation 14588: note = n is any nucleotide
  source 1..14899: mol_type = other DNA
ggcggcagcgtggcgcggcgccagtgcgcggccaggcgcacgcgcgcctgcagcttgagctcgtgccagcgccgctgcagcaccaccagcgacgcacagcgaccgctgcagacacacatcgcttgacttcgggaattcggcaatcatcgactgacttcgttgattcggaaatacgaacgatgatctagtatagaactgttacaactaagaaacactagccttttagttctatcatgaataaataaggtgaactgagtaggcgtgaatggctaaattcaaaactatgatgactggcggaaaatatagaagtccggaactccgaattctgacaaaaactaaaactgcgtcataaaaaagacaaaattcagtcaaggtttagtaagcgttgtttaaaaatgagccatttcttttagtctgccttgttatgtcatcacatattagaattcatccttattagcattacttcgaatggtgtaaaacattgtgtgctttttcaatcaacggttcgtcgaagcttgtctctgttggcgctaaccagtggcgtagtccctatatcaaacatttttgggggccccctttttaagtgtattgtttttaaaataggccttaataactcagaactgtcttggcaggccacgaaggagagagcgcgactaaatgtatagctttgcgtccacacgtcgccgcgtcgccgcgtcggggcccttgtaactcggggccccatatctttgatacggctgaaacggcggtagctacgcccctggcgctaacgacgtggaacaacgttcgcaatcattcggaaatacgtataccgtgttttctgatataactgtgtgtgagtaacatacggtgatggttatagtgtcggtgtgtgcgcacggtacctgtcgaggtagtcgcggtgcgctcgcgtccagcgccgcgcgcgctccgtcgagctgatcgccgcggtgtcctccaggcggtggcgctgtaccaactgccacagcgtgtgcagcgcggctgactcctcgtaaagggtgacgctctcctgacaacacatcacactcatcgtaaaacgaaatcaacaaaaataaactcatttttacagttactacaaaaaccggccaaatgcgagtcggactcgcgcacgaagagttccgtacctaaatcaaagaaggcagaaaaatcacgtttgttgtatgggagcccccttatatatttattttattctgttttttagtatttatttcatctgtgaaaatttcaactgtctaactatcacggttcatgagatacagcctggtgacagagggacagcgaagtcttagtaatagagtaccgtaccgtagttattttaatggattattattgatgaactatttaaaccacgcttatgataacataatctggtaacctttgtgaacataccacacttcggccgcaactttgtctgcgcacatttagcgcaaacaatttttctcttttcaccccccctcaaagtttgaattttaaaaatcccttagtcagtcgtcatttgaaaacgatttgtgttgccggttttcagcaaggtgttttaaggtaacgctcactcaaatgctcagtcacttcaacgcgagtaacatcttacacgataagcagtatggttttatagaggtatgcggagcagggtgtaaagtcccgccagcctccatagaaaagggaggacactccgaccagacggttgttatgtttgatggataactatctgatagttgatattcggactgttgtatgtgttcaaatcgcacggaaaactctgatatcgcgatgcaggatttcttcgaatttctgtaaatagctttatgtttttgactgaacgaccttgacaattcaaaagtgcctgttatttgagttcgttgctggcggtatagatgtcgctgcgttactttttgttgaagtattgangttatttgagttcgttgctggcggtatagatgtcgctgcgttactttttgttgaagtattgattttgctactttagttttttgcggaggtgtcgacgccgctacactttcaccaagagacgttgtgcaactgacgccggtgaaactttatttaaacacatctttaatgcgtcttcaaaggcatatcgtacaaaaagcatcttctgacaccttacgaaggcgtttgattgtgtaagccataaagcattactccgagcattaaagattaggcaaaacagcattgaacttagtaaaatcgtttttcaatggtaaaacgcagctagttcaacataaatggcaacaattcacgggagtgaagacgaaaatgggtgtatcttagggctcaatttcaggtcctttcttattatttttttttataactgatctgtggcatgtgcggctgttaacatttaaccacgagcttttcataattttgaaaacaaaaaataaataaagaagctgcactcacgtcagttacgaggcggtgcatatcaacgtcggaatgcagcagcacgaggtcggcgaccttagccgcgtgaggggggggcgccggcgctgcatcccccgcgcgccccgccacactcacctgctccagcgacacgcgctgcaccgacaccctgcgggggacagtnnnnnnnnnnnnnnnnnnnnnnnnnnnnnnnnnnnnnnnnnnnnnnnnnnnnnnnnnnnnnnnnnnnnnnnnnnnnnnnnnnnnnnnnnnnnnnnnnnnnnnnnnnnnnnnnnnnnnnnnnnnnnnnnnnnnnnnnnnnnnnnnnnnnnnnnnnnnnnnnnnnnnnnnnnnnnggggggggggggggggggcaccggcgcctggtcccccgcacgccccgtatctcatgaactcgagtgcttggtaaccccaagacggcacttttgactaggtgagcgaccagatctagatcacccttcatattcatggaccagtagctattgcaggtctgctgatcacatcggcagtacgtaaggttgactgaccgaatgaggaattgttcgaaagagtaaccgcgttgttggaacacaaaggaaagaacacgtgtgggttttagtcagtaagagtctgaaattcccttccgctccgcccagagcgggaggagtctgatgtgttcctatctaaaaaataaaacaaaaaatgaccttcaatcacatcaaacgtattgagggttgactcaccagacggcgtgcaggtcgttgatgccggcggagatgcgcagcacgcgacgcacttcgttgtacagcgccgtggagcagagtgtcccccgcgcgcgcgccgccgccactagcgccgtcaccacgccgctaggagataccgcgccgcggcgctgcgaggtaccacaccacaatataacactcattcagaaggctagtggccaattctcgtattttaagtgttttaaatcaaatcgcaatatcatctgagcgacatcagctgaaagacgtccattgctggacaaagcctatgcgaggcctatatacaacttttaatatacaactcgaagagtgacattcttgtatttgaagcacctaagcagtagtcgcgcagtgttcctcccataagcctcaacggcgtagcactaaaaattgtcgatagttttaggtaccttggcgacattgtcacgagagacctaagagatgacatagatgtagagagggagcgcagagcattgtctgtgtcgtcgcgttgtgacgacaaagtaaccctttttaaggtcaatccttttacacaagtggcctaaaacgacctgcgtgtacaatttaataatgcttttaagatgctgatgggactgccatggcgttgttgcgcaggaatgttcgcggaggctcgcacagatggtttccatgccaccgtgcgaaagaaagcggcctccttgctacagcgcttgcatagtagcgacagcatcctgaaaatgttagctgccagaccggactgaccctttcaggaacactggctggggacagtcatagtttaacataactaaataatttgtggaaactaacatcactaacctacttattcaagcaccattgttactaacacctaatataaaaatactaacaaaataaggacctatatcctgaaataaagttttattgaagttaatttaataggccgtctcgtatccagcatattctcgcggccttgaccaagtcatcggtccattttgtgggaggtcgcgccaacactacatcttaattttagcggcaatcacaaaagggaattggagttctctttgaccgatccaaagcttttgattgcgtacaacatgtaacgctcttgagtaaactacgataatggtctccaaaacagacctgttaacgttattgatcctcccagcgcatctccgccctaccagatcaggaaactgctcagatcatgttctgttaaaaaccaaaaatacagcatgtgttttggtggttcagactcacatcaccgaccacctgccaattatcctgtctctccgaatcaagggttctattaccaaaaacagtccaactacatctctccgttacaatttcctagcaattcaacaagacttgaaaagtactgatttcagtccggtgttgaatgagatgaatcccaacttcgccgcagaattgtttgtaagaatacttcaagaggtcattgctactcataccctatgtatacgcatccaaaataagattcgtattctgaagccatggatgactcagggtttggttagatgtatacgcaaccgtgtcaggatgcattatagattaaaaaaagatcctaaaaatacggtccttcaaaaaacttacaaaaggtatcgcaattaccttaacaccttattaaaaaaaccaaagcgagcacatgataagaacgaatttcataaggccaaaaataaccctaaagccacttggagggcaattaaaactattaccaactctacttctcaaccgcaatctcccaaagagcttcttcaactgactgatgatcctcaaacttcagcaaaccgtgtaaatggcttcttcactgatattggtcataaactagcctctcaagtaactcctcttcctagatttaaccacgatgttagaacccctccactacctccaccttgccaatctctcgtcatactaccagtggatgaaacacaagtcgaaaggctgattagctccctgcgctctgactgtgccactggctacgacaatatatcagctaaagtgctgaaacaatcgagttcgatcctatcatcacctatcactcatattttcaatcgtgctattgataatggagtctttcccaatgttctcaaaaaagcggtcgtgcaccccatctttaaaagtggagacagggccaatgaaacaaactaccgcccaatctccgtactaagctctttatccaagatcttcgaaaagatacttaacaattgcctcgttgcatatctttctaaacataaaatcattgccaacaatcagtacggttttaggtcaggtatctcaacggaggatgctgtagctgaccttaccaatacagtagtaaacaacctagacaaaggcatgaaatgctatggtatcttccttgacttatccaaggcttttgacacggtttctgtccccactttgatttcgaaaatggaaagcgctgggattcgtggtctcgcattggacatatttaaagattatctctcaaatcgtactcaacgggttaaaatagactccacaataagtgatgatagacttatcagcttcggtgtaccgcagggtagcatccttgggccccctctctttttgctctacatcaatgacctgtgtctcgcacacattcctaattgtgacatattcacgtacgccgatgacacagcgttgattgtttacgatactgattgggttagggcaagtgaaagggcggaacagtcgcttcgctttgtgatggaatggctctcagaaaatttacttaccctaaacgtagcaaagacaaaggtccttagattttcactacctaacactatagctcctccaccggaatcagatcaaattaaagctcacatttgctcaggtgaggcacccaactgcagctgcccatatctatccgttgttccagacataaaatatttaggagtccacatagatcataaacttagctggcaacctcatatcgaacctatgtacaagaatcagaaaattaatttatatatttaaggaactaaggcactctgctgatcctgaactagctttaatagtttactagagcctctgccagtcgattattttatattgtatcccggtttggggcggaacttacaaaaccttacttaaagttgaaagagctcaaagggcgatcttgaaagtcatgcactttaagcgcagggacttttctaccaatcaactctactcagaagccaaagtattgactgtgagacagctttttgtgctccgcgctgtgctgcggaatcactctacgctacatcttgatcaggccaagctgaaaagacgcaaaggcacacccgtgtgcgatatagtccaatgccgttccaagtttgccagccgacaatatgcggcaactagatttcgattgtataatagaatacataaactaacgcccatttaccccctgactaaaaaagaagttaagatcaagcttacagattggttgtagaagttaacgtatgacgaaacagagaatcttgttactattgtatcttaataaaactaatactatgttagaattaaagcatgtttgctcattttatatttttgtaactataagtacttgcacgacagttactaccagtagtatgtcattccacctagaggaccattggctcctaaaacacaggcttgtggcctagtttaggaggcatcagttcgccctttaatgtgtctctattgtacagtattttaccttaccttacctacccctaccttacctttgtgtacttatctgtctctgtgtacaaataaacatttttattatttttccgtttatttcattttcttaacatataaatttacatttttattattattattattgattcatatttacacaatgnacaaataaacatttttattatttttccgtttatttcattttcttaacatataaatttacatttttcattcatggtttcaatatgtagatgtcaatgatgtgaaatcctccgtgctaacagttcatttaggtgtgcctctaggatttatactaggaccattcttatttctagtgtattgtggttgcggtgtagtgtttgcagatggtctcttatttttaaagtaagtatatagaaatagacaagaatttgataacgtaaacagcgctctatccatgggtacggattggtttgcgaaaaaattaacttagttttcaattaaaacgaaatgtatgacgtctgtcttaccgaattcatttattttatttatttacactttacgcacacaaatgtanacatccttagtttacaaaaaaaaaggaaaggtcaagagtcactgttgcgaagttatattttcaacaattgattttgctgcgtcagatgttggttctgctaatatgcgtaggaatgcgccttgatcgtttatattacatttttgcatcaaggcctccctcccattccggtacttatcacaatctacaagaatgtgttgtacatcatctaatttatcacacaaatcacaatttggggaatcaacctttttcattaaaaaaaacaaacttctttgaaggataatgaccagagcataatctatctaatggaatttgttcgaaagagtcaccgcggccctggaacgcaaagggctttagaaggaacaacggatgtgttttagtcagtaagagtctgacacgcccttccactccacccagagtggaagaagccatttgattatttcccatccctaaaaaacataacaaaatttttgacgttctaaaagtgctagcattcagcctaatttgcataaatgcaaatgcaaatttgcataaatgcaaatgcaaatttgcaaatgcaaattttgattttgagtcaatgtcaaaaagtgatatttacaacctggggacttaaagtcttaattctaggaaagcgtgctccatcgtcgaacacatcatcccaccaatactaaaaaagtgatgtctggttgggaagtgacataagtgtatgtatacatacctgcatggggttcacgtggaggcgcttggccgccgcgaccagccactgcggcgtgccggccgccggcttcttcttgtccggtgagttcgccatctgtccacgacaatactatgtcatacaccgctgagacaagatggctcgtctaacttgacgaggactataatgtggccaggctttcctgactcgtcggtccatctatactttcaaaatcactttcgacccagtgtctaagtaataagatcatcttttggtagaagtactttcagaaacgtctgcacagcgcgcgccgtagtcacatgtatttattactagcggatgccacgcggtttcacccgcgtagttcccgttcccgtgggagtacggggataaaataaagcctatgttacttgctgataatgtagctatccatcgctgaaagaatttttcaaatcggtccagtagtttttaagtttgttcgttacatacaaaaatataaatatttcctctttataatattagtagtataatattagtagtattttttattttaatacactttattgtactcctcacaacaagcacaggaaaaacgtttataatatatacaaaatacaagtgtactatgctatctcttacagacaacctttgaatggactgaacgatatagcagggtaatattgttatatccatgttaataaggctaccctcacactacacagaagggccgggttaggctcgaactactctcggaagcgtctccaaagcgtgcgattttagtagtagtattacagggttaccttattctcgaagtattctcggaagcgcctttcccaagcacgcgcggtcaccacgggtatgccgagcgaggccgctagcttcacatacgcacatttgcgcttgtcctgtacaagataaattaatttaattcattgcaggtacaccataagatactaggccactttgaactatcatgcataacttcgaaaggagttgtaattttatgaaataaccatcattcatatatccttcttctttcatttgtttctatgggttttgttttgttttttgtaataaataacatcaacaaaacaaaaaaataactgatttcgaaaaataaataatagattgaattaaaaattccaattccaaccgaagttgttcgaagtggcccgacaacaacggcaacccgcaccatttacaaaaatggttattattccattttgtatattgtgcgatttaccgtttgtgtgaagtgaacatagaatcgaaatgacacgtactcacgtatgtatattttttatatgattatttatatattgtcgaagtgtttgcgcttcagggacatcgggagatagcccttcattagcgtcttcatggaccagtagctttttcaggcgttgtcgatgcgatgatcgatttcccttacctgcctgttttcgaaagaaactaactggcccaagtagtattctgcccgtcctaacctacggtgctcagacctggtcactcaccgagtcgcaaaagttccgccttggggtatgtcaaagggcaatggagcgcagtattttaggtttaaaaagaattgatagagtacggaacaccacgctgcgctccaaaacaggtatcattgacgtgggcaaaaaagctgccaggctgaaatgggactgggcgggtcacaccagccgcacagtgaccgctgggcaaaagtctccacgcaatgggtgccagaggatggacgccgtcgccaaggccggcccagaaagcggtggcgagatgatttggatgcacaccgcgaagggtggttaaagaatatctggaaggatatgggaggcctttgcccagcagtgggacacaataggctaaggaaaaaacaaatatattacgctccaagaccttaaacgctaattgagcgaaaaaacagctcaaaacgcgtagtgacttttctaaacttccacatcgcgaatgtagcgtcgtggcacttaagaaaacgaccacaacgcgttgtggcaatgatcaaatgccatgacgcgttctgagccctaacttatgcaagcgcatcgcgaaagaaggtaagggagggaacggagagaacccgacacggataggttaggcccgaatgggatgacgggagctcccgtcatactgttcatgttaggtttctttaaaccctgcagacagaaatagaagccccggctccatcgtcgtcgtagttaggtttgagttggccgtggccttgtctatataacaacatgttgcacacacgcagcagcagaggagcactcacagtgtacacgttggacttggtgggcttctccagcaagtcatcgtgcttgatgtactccaacgcgaacttcttcacggacaccgcgcgcgacctacacacacacacactcatgagctcagcaactgtaaaatcttccaaccctccacaaaaaagagatttactaactagtttatgtaatagctcgaagctgtctacagacacaacaatatctatacatgctgccctttcgtttgatatatcacatatcacacggtatagtttaattatttttttgaacattctattttgttccctaaaagtgaccccattactcaaaatgtatttatcgcgtccgtgtttgggtcacagttcatatgtgtataaaatgccaatgaactttctcccggattcggaggaaattgtctgtgacagacacacgagtgattctataacggttccattttttatggacgttcggaaccctaacaaaatagcaaggtacatctttagtaaccacttacttgatttctgtattcttcacactgccaaagacggagggtgcgtagtccacatcctgcgaacagttgctgggctgccctttcacgaagtgcgcgccgcagaccacgctgtgcgcgccgggcagccaccatgggccgctgggggaggtacagtagtgtcgtagcattgcggataataggcaaaaaaaaacgactgccgtacatatgtacgcataactcgacatgtactaaacagctgtttttttttttggaatttcgggtttggtcccatagtaaaaaagtcgttcataataatgagttatatagtaactccttttgtagtattctgttacaggttgtatagacacgttattcgccagtaaaattattaatatcacgagtctaaaaaaagcgcaaacaatttcggtagtaatcgctaccaagatgctacgtacgtagtacgcgcggggtacgcgcggggtacaggaccgcggcagttgcctcctgggacgttgctactactgagtgatggtaacgcatctatctatactaatcgacacttatattactgcgaaagttcggatgtttgttgctcaatcacgtcagaacggctgaacgaatcttgacgaaatttggcacaaaggtagattacagtctggaataacacaggatactttttataccggggttgtgttgccttgcgataattttcgacattcacgcaagcggagccgcaggcgcaagtttatatatatgtatatcactgaccagcacttcgcccgcgacttcgtccgcgcggatttagtaggtacggcacaaacttcaacgcccgctctacccccattagtgcaaaatgattttcattcattaccgccatttttgctgctgattctgtggtctctggatcagcgcaactatccaccccgttcacctcgtcaggggttgatattgcaaaaattgttagatctgtttcaattatctcaattttagttttttcataccaattcctacataaattgaagtaagtacctacttaagcaataattttcacccctaaaaacttcatcaccccttttcgccccttaagggtttattttcgaaaaaatccaaatacatatttgttattcttatttttttttatccaaatgcggtgtttcaccttcagcggattgttcttacttgagcatatttatacccgtcgtaactttgaaacgaaaggtccaatttgaataatttaaagtgttaccttaattatcaaaccatttaaatggattaggatcttgatatcaaaatcatcacattttctttccaaccgggctttgattgaataattttaacaaaaagcggtcattgtgacttaaccataacagttagacatatagcctcgcggacttttttctaggtgataatgagtactttaactatgtagtacattatttttatgaatcatcaatagttttcgcagcgcatgcaatttatgacaatttttttttcaccttgggttacataattcaagttttagtagggatccctaattctttctcgaattaaatatagcctatgttacttggtgaagatgtagctttctaacggtgaaagaatttttgaaaccggttcggtagtttttgagcaaaatcgtaacantctttctcgaattaaatatagcctatgttacttggtgaagatgtagctttctaacggtgaaagaaattttgaaaccggttcggtagtttttgagcaaaatcgtaacaaacaaacaaacaaatctttcctctttataatattagttaagacagtttagatgataatataccaccgtatttttctgataactgctccgtttgatctcttgctgccaaagatttatttttcacttatcctagtgttcatgaacaggatagaccctaatattgttagaacctagccttgtatacactaacaagtaatttaataataacttaaacaattaaattgtcttgactaagaacgcgtcctatagcacttttctcattgcatgtattaaggtgtataccttcgttcttgtgtatttggtaactgttgagctacattacactattcactatcactgtgattgttgataatatatatctttaatattgaaatatctttctgaaacgtcactgttgatctcgcttctggcgagcccaaatttgaattccaggtcaggcaaaaatgctagcgaagggggaggcgagccgcgcgagggaaaggcaaggccttcgccccaaccgccgctacaggagaagacgccggtcccatctatctctgtatctaaatgggttctgccatttagatgtgaaagcttttgtatttttttttaaaaggtttttttatntaaggtgtataccttcgttcttgtgtatttggtaactgttgagctacattacactattcactatcactgtgattgttgataatatatatctttaatattgaaatatctttctgaaacgtcactgttgatctcgcttctggcgagcccaaatttgaattccaggtcaggcaaaaatgctagcgaagggggaggcgagccgcgcgagggaaaggccactccgagaaagtactcctccaaaaactacccaaatangcgtaccagcgtgatgttatgttatgaactggtgtaaacaatagacagacatgagatttcagcaaaaccagtccatttgctatcatttattgaggagtccaaattgaaatgggaccactccgagaaagtactcctccaaaaactacccaaatcgcttcaagtgtgcttataaaatttgaagagttctcactatttctccaggatcccatcatgcgatcctgacttgatgatcatgggaccacctggaaagtattcaacgtattcatttcaaacaaaaaaaaatccaaatcaaataaaaagaaaaaaaaaaatgaaaaggaaatggtccgacgaattgagaacctcctcctttttttgaagtcggttaaaaaatacaaattcacacttagtacaaaaattacagcccggtgatgctgaaagacgacttattttctgccatgaaatcgagagatcactattttctaaataatattatctggtcagacgagacaaacttcagcaataatggtatgtacaaacgtcacaataatcgcatttggccgagggagaatcccttttgctatccgcgagactaataatcaagtgcgtttttcgttcaactgttggtgtgggattgtaaaaaaccaggtcctcttggtacatttttgcgaagggcatttgaatacggaaaggtattcagaaagacttgagattttgagaaatgagataaataatcttccggttgcagaacgacaaaaccttacttttcagcaagatggggctccggctcataacagccacagaacaagggacactcatctcaatgaacactttcatccctggatcgggacaaatggacaaataagatggccgccaagatccccagatctaacccccttagatttttttatggggttatgtaaaaaatttagtttacaagaaccagtattaaagtgtccacgagctacaagcagaacttggacatattattctaaatacccaccacagcaagatcaaaaaatcgacagggagcaaaattatcaaaacagtgcgactctgtattcaacaggaaaggatatggaggtatgcggtacagagagtaaagtcccgcacaccgccactgaaaaatgggaggatcctccgaaccagacggttgttgtnttgtgtctggtgggcaactgcccgatagttgatattcggactgttgtatatgttcaaatcgcacggagaactttgcttgcgcgatgcaggatttcgatgttagttcgtcgtagatggcgctgcggttctttttgttgtcgtacaaatttcgtttctttgtttttcatgtggcggcattgatgccagtacagggattcattttgagcatttgataaattggataattttgtattaaaaatgtcaaaatgaaaggagtaaagaaaagggtttttggtttaaaactacacaatgtcagcctcctcgagtacctt

SEQ ID NO: 99 - DNA, 14397 bp, unidentified
  misc_feature 1..14397: note = Fanzor polypeptide
  source 1..14397: mol_type = other DNA
tgtatgtctagcacagatttggtcccaatataaaaatgcaaagactgtaaaatatttgattggctgtatccctaatggctttgtatcctttatctcaatggattatggaggcaggatatcagacaatgctttagtagaaaagagtaatttaattgaatgtttaccagacaatgccgttaaaatggctgacaggggctttaaagaaataaaacctcttctagcagtaaaaggcactaagcttctgcgtcctccaagtgtgtatgactcgaacaagccaacaaaagaagaagttatgcaaataaaaattgtggcaagtttaagggtgcacatagaaagagttattagaagggttcgagagtttatatttcttagacatcattctgtagtcagccacaaacatgttggttatctcgatcatatgatgatgattgcgtgtggtttaattaatttacaaaatgaaattataaaatgtgattaaaattgatcgttttatattatatcctagcactaataataatcttgctgttaaaatatgttttccaaaatattaaagctttatttaataaatctgttgtgtattgtgggtcataatttatccaatacaaggtaatctttttattttcttcaaaattttggatcagcaacacagagtactgctttttttttacttgccacatgcatttgggtttgcatttgagcaacatatttattttgaatgatgccatcattaacataactttttaatgtttttgttgaagacgagcatttaatttcaatgataaaattatttgaaactccatctggtgaagcatctactactccattgatgagaatgaaatctgattaatgtatttttatatttaattgcttttctacctcttcaataacatactactctaaacatttacctcttttaataaactctgtttctggcactttatatcccctcaaaatttgttgcactaatgtaccatctgttttgcattttagggtctcatatattcttgattctgaaacatttctccgacattcgtttcgccgttgaacggttcaccgaacagaacgattcactatacaatttttcaccgatagaatgtttcaatgacgaacgtttcgccgacacaacaattcacttttcattatttcaccgatagaacgtttcaatggcgaacgattagccgacagaacgattcacttttgaatatttcatcgatagaacctttcaccggcgaacgattcgccgacacgattgttcatctgccgaaggattttataattttcggctagcttatcattagctgcgtataattcgaaattaaatgaacaatgcatgttagtattatttaggtaatgatagacatacatacttgatattaaagcacgttcgcttatttctaaacgataacaattaaatatgaaaatgtggttagtcctcaggtttttacctgtcgacgtccctcattacgttgttatgtctgcccggaatcaattaccaacgtgttaataaaaaggtttagattttgttgttaaaaaatgagtgattgtgtaatgttaacgtgaaaacgcggtaaaaatatattgattcacgaaggatattcctaccatctaaacagaatacgaaatacgaggttctactggcggtgtgcaaaaaaagattctacccggtgcaatgttgctatcacttcaacagagtcaacgaataattctcatattattatttcgaaaatttttgaacatgttcatttaccggatcccgataagcagatagaattaactgtaaaagctaacatcaaacaaaaagcccataattcaatgaatgcaccctcacaaattgttcaatggtgtattcaagatgtaccaagtacttattagtgctccttacatgccgactaaggatgacatggtaatgatggttcatcgggtaagaaataagaatttaccaagtattcccaaagatatacatgctgttgtgattcccgatgaattaaccaaaattagcgatgatgtgaatttccttatcggtcactacattcataatgaagaatccataatcgtatttggcactaatgagaattgcagactcttaagtgtagcaaattattggctaatggatggaacatttaactgttgccctcccccggttcgacaaatatactacatgcaatagtcggaactccggacggtacgcataaagtacttcctttaatttattgtttactttcacataaaactgtaaaatgttatgaaatatttttagaaatattaaaacgacacactaaatgcccttgattatctattttgaacgcgcagcaatgaaagctataaaaatggttttcccaaactgcttaataaactttgtttttttttcatttgaaccaaagtatatggcgtcacattcaatcggctggtctcgcgaaacaatacaacagcgatccagtatttgcccacaaaatgagacgtattgctgcactggcatttttagagccaatagaaattcccgatgtgcttgatataattaaaaacgaaatagtacctgatgaagctaagagagtgatgcgatggtttgaaaattgttatgtcagtggatcagcgataattacaaaatccattagctccaaaatgacagtaaagcgaagtccgccaatatttcctccaagaatgtggtcagtacacgacagtcaactttaacatataccattatcacaaaatgcgttggagtcgtggaataccttattaggccgtcagaaaaggatgatatggacataaaaaactacttaagtggctgggctcatatttctcatttatttactacaaaataagggtcctatgaacttagaattgttttttttattcatagttgatttgttgtttttgttttggtattaatcatgttggttaggtaattgttaatttccttagcctattgtgtcccactgctgagcaaaggcctcccccatatccttccagacattcttttcttgcgccacctcgaaccagccttcgcggtgtgcatccaagtcatctcgccaccgctttctgggccggcctcggcgacgccgtccatcctcaggcacccattgcgtggagacttttgcccagcagtcattatgcatgaggctggtatgatccgcccagtcccattttagcctggcagcttttttgcctacgtcaatgataccggttttggagcgcagcgtggtgttccgtactctatcaattctttttaaacctaaaatactgcgctccattgccctttgacataccccaaggcggaacttttgcgactcggtgagtgaccaggtctgagcaccgtaggttaggacgggcagaatacacatgtcgatgagtttgcgcttcagggacatcgggagatcgcccttcattagcgtcttcatggaccagtagcttttccaggcgttgtcgatgcgacgatcgatttccctttcttgcctgttttcgaaagaaactaactggcccaagtagatatactcatcgacatagagtatatcctgcccatctacttcgaccctacgtttgctgctgtttgtcattgttttagtttttgaccgattcatcgcgagtcccaccttgaggctagccgtgctcagatcttggagcatggtctgcagttccagagctgttggggcataaaggactatgtcgtcggcaaagtggaggttcgttagtcttctattgccgacttcgatgcccttggtcttccatgatgctgccagcgactgaaatatctcctcgagagtgctggtaaataatttaggagagagcgggtcaccctgtttaacacccctttgtatattgaaagaaggtcctgcaatattaagtttgatgttagcggtactattgtggtatatgattctaaggagatctatatattgtgtttcaagttcctggtttttcaaagatctgaatatttcaggatgtttaaggctatcgaaggccttggaaggccttggttggtatagtctacgaaggccaaatgcagtggtttgttaaactcagagtatttttccaatatctgattaagtgtctgaaggtggtcagttgtagagaaactaggtcgaaatccggcttgttctggtggttgatgttcatccagttttcgttctatacgattatgtatgaccttaataaatgccttgcacatatgagatgtaagactaattggccgatagttctcgatttcacttttgtctacctttttatgcagaagaattatatttgaatggcacatcgtttttggaacctttcctgatcgcaaaatagtgttaaataagtttgtaaggtgaggcagcaaggtggtagacccaattttaagcgctttagtagtgatgccatcctccccgggacttctatcataacgcatggttgtgagcgctttatgtacttcataaccggttattggagggacggaatctgagacacgatatgctgtgttacgaatgggtattgagtgatctgaatatagcgttttatagaacttagttgctatgtccaagattttatccctgctatggtgtttaattccgtcattatcaacaagactattgatccaagctctgccttttgtaactccatgttttaacagtacccttaaagattagtgtttttcttgagcaatttttactaaatgcgtattaagatttctgagatcttttctgatgcttcttttgacctctttgtcaattactctatattctgctgtgccaatttctttagttgtgcgtttgtctatcagtttaatactatgagctgttaatttactcctatttctgcgtgtattcttaatgtttttaccactattgctcatcccggtaactatctttttatattggtcttctgggtctgtttcatcaactttcaccttcaacattctagattaaaatattttaagttattataaacgtttctcttgacagtctctttatttgttttgtaaacaatttggctctatgaaattgaaatcgaatcgaattattgtgcgaattggcctgtggtcggagctgtatttgaatctgttgataacactaaaattcctaattatatgtgtatctgatgttaaaatgtagtcaatttcgtttcgcgtgagaccattgggtgcaacccaagtccatcgtcgttgaggtttctttaagaataggctattcgctatgtgcatgctctgaccaaaggcgaactgcattagacgaacacctcgttcattacggtcctctaggccaaagtggccaagagtatcttcgctgtcctgttcttgcctctgtcctaccttagcgttaaagtcgccaatgacgatgttccaggtgcccctattttcatcacacgcccggttgacaagatcgtagaagtcctctacttcgtcatcggtatgtgcagttgtagatgcatagacttgtacaagagttaggattttgttagatttcagttggaatttgagtaccgcgacacgttcagaatatcctacgaattcgataatgttatccttccacttctttgccaccatgaacccctccgtgttgcccttaggtttcaccgaagtggaagaatacagcatagagacgatgcttctgtgtgttcgccctctcttcgaacttctgagaggcccacaatgtcccatttgatgtattttatagcattttcaagctcaattaatcgttcgtccttcatcagcgttcgaacattgtaggtgagaatgttgagggaatcggagtcctttttacaattagccttggtcatttgacggttattcaatctcgcccggagattcttagctccccggaccccagggttgcgccaacgcccgtccacgccagcacaaccactggagtcgccgggcacttggggcctatctcttattgttgtatccatttggaggggggtttggaccataatctgccacgatggtccagtgcgtgttggcaggtcgccataacctcgtttgtttgtcggcagggtgcaccacgtgcaggtgaggttggcttgagtcccgaaagattatagttgggaccccttacaccccaccaccccaattgttaataataaaaaatattttcatttgcaaatatacatatttcatttaacctttcaaaacgtatgtataaccaaaacatgtatgatacatgtattgacgttgaatcaaatacgtttttgtcacttatttggttagttttgctcaagttttgcataaaactttaagtttcgtcttcacaatgattcagatgtaaacaataaatggaaaaaggtctacatgtcgaatacctatgttttataccccaggggcagatgaacagttgtcggtcagctgtcctttcattggcgaatcgttcgccggtgaaaggttctatcgattaaataatgaaaagtgaatcgttctgtcggtgaaccgttcaacggcgaaccgaatgtcgtagaaatgtttcagaatcgaaagttactacagggtatacagggtactttatgacgccttttagaggtcaagtaaaatttgaagaactaaaaatagaaaaatagggctaacaaatctaaaatctcgaaatggttttggaatcgacatgagttaacttttactttacataattcggttgtatttttttatgtttgtttccacataagcatttgaattaatcaaattgtacaagaataattatcatgaataaacaatagtggtttaacaaagtaaattgttttaaatccgaataacatgccatcatttgtattgaagaagacaaacagttactagtgggtgcgccaaagttcacctaaattttcaactccgatagttggaaatccgaaaatgttcttcctaacaatcacaattcctaactactctgtcttttgttttcctatattttctcaacataaccagcttttacactattattcaaagtcatgatttttttgtttagattttttttattcataatcaattaaagcgtcttctttaattttatttatagcggtgtgtacctgcaaagatatccataggttaggttccgacttcataaaaaaaaaaagttagaactgtgaccaactaggcgcgagccgagcgagcgaagcgagcggtgccgcggcagcggccggcgagcgctacctcgaaattggtcgcgaaaattttctaagtatttttttcatagtctgtgtgttttaaaatctaaaagtgatgtaaactctgcgtctactattgtgaaatacatatcgagaagtgcgtggaatttcatacttaaacctgtgtaaaacaattatcatcaaacagtttagttctcctatattatgaaaattaagaacgagatatgtacaaaaaaaacatttataaaatgtgggtgtaaatgtttcgatatctgctactgtgactttgattggtcagtaaggtcacatacataatttgcaacgagacgagccatctatagaaacattatttcaccctaacaagggtcagggaaattgtcttgaacgaaaagactcggacttctgattccgaggtatagagttcgaatctgaccgcggaggatctctatttgctacatcttgattttatctttttggtttttgtttatacaaattaaagcttttttgcctttctgggagctgagtgtaacaggagataactagatctgatattttacactatttgccgattgattacaaagcaatgagtacccaacgtaccccacctaaatcgacgaacactccgcttcgacaggggcaatcgatatccgagcccgatttatcatctaccccaggaaccgtgaacgtgttggaacaaaatataaccgttagaagcaagcgcccgcgtactgcggactctcctaacactgaaacaaatcaatttacctgcacatttaactaatttaaaaatgaaatcatgaatatgcttgccttatggaaatcagacaacgacgcccgactctcttcctggaatgaagagcacgatgcggttttaaaaggcctggtcagagatatgagtgaggtgaaaattcagtgtgcagaaatacaaaaatcacacgcggaactggaaaaaagcataacattttcggataaatgctatgaagagatgaaaataggattggctgttctagagaagcaaagaaaagaaaatatcgatcgtattgaccaacttgagaaacacatccaagatctgcaactccagtcacgttcatcaacactagagttcagaagcattccacagaaagcgaaggaaaatccagaggatcttctatctgttgtatccgcggtgggtaaagcaattaacgtggaagtccgaaaagattgcttgcgtgacctgtaccgcctcccagggacttcgggaacacccagacctatcgtagccgagttcaactcggttccgaaaaggaatgagttcctggcaaatgtacgtagcttcaataaggagcgccctgtagtcgacaagctgaacacgcacactattgggttggtaggtgagaagatgccaatctacgttgatgaacaccttttgccatcaaataaaaagctgttctatgatacacgggtatttgcaaaagctaataagttctcttgctggaattcgaatgggagaattttcctaagaaaagatcccaatgatccaaatgagaaaccaacgcaaataaggtccgaaaactgtttgcttgctctagttaaaaagcaatgactatacagcacatcatttcttcttcttttgttttttaagttttgctacttttctacttattatttgcatgctctctgttccaatatgtttagggctaagaccccaattttgtatctgaaattatgtgaaaattgttttactactttacgcgatcatatagtatacatacataccacatgtttttaatattagtaataagattaactactgcaacttaaatttaaacactttaaactacgtaatgactagtaatttattctcaaaaaatatggctagacttctccaattgtcatttttttctcaggaggtttttatattttatgcatttctcttgtcatgtgccactgcttttacggcattctcaatttccaatggccaacattaattctatatccgaggaactcgacaatatttctatggcttcatcgtatgaatgctctgctgaaagatgctcgaagtttattacacatcccaacgaaagcttgaagataatacatattagtacaattcaccgctatgttgtctatcactaacattgttttcgatgtcattatgctcacggaatgctggcttcaagtatcgggacctaatccttttatgcagggatatacctgccatgccactgtaaataatggatcacaaaacgacggagttgtagtattcaccaggacgaccctacgatgcactgtgcacgaacccatttttcatggagctaactgccttgtttgctcctcagataataccgttatcatctgttcgtatcgctccccctcatattctaatttggatctcttttataattgcctaaacagtttagcgtgcactatgaaccgtttccacaatgtggttcttattggagatacgtggatattaaaccttataaccatgaccgaaactcagatcactatcttacagctactgcgactcttgggttgctcccagcgcatctccaccctaccagatcaggaaactacttagatcatgttctgttaaaaaccaaaaatacagcatgtgttttggtggttcagactcacatcaccgaccacctgccagttatcctgtctctccgaatcaagggttctattaccaaaaacagtccaactacatctctccgttacaatttcctagcaattcaacaagacttgaaaagtactgatttcagtccggtgttgaatgagatgaatcccaacttcgccgcagaattgtttgtaagaatacttcaagaggtcattgctactcataccctatgtatacgcatccaaaataagattcgtgttctgaagccatggatgactcagggtttggttagatgtatacacaaccgtgacaggatgcattaaagattaaaaaaagatcctgaaaatacggtccttcaaataacttacaaaaggtatcgcaattaccttaacaccttattaaaaaaactaaagcgagcacatgataagaacgaattgaataaggccaaaaataaccctaaagccacttggagggcaattaaaactattaccaactctacttctcaaccgcaatctcccaaagagcttcttcaactgactgatgatcctcaaacttcagcaaaccgtgtaaatggcttcttcactgatattggtcataaactagcctctcaagtaactcctcttcctagatttaaccacaatgttagaacccctccactacctccaccttgccaatctctcgtcatactaccagtggatgaaacacaagtcgaaaggctgattggctccctgcgctctgactgtgccactagctacgacaatatatcagctaaagtgctgaaacaatcgagttcgatcctatcatcacctatcactcatattttcaatcgtgctattgataatggagtctttcccaatgttctcaaaaaagcggtcgtgcaccccatctttaaaagtggagacagggccaatgaaacaaactaccgcccaatctccgtactaagctctttatccaagatcttcgaaaagatacttaacaattgcctcgttgcatatctttctaaacataaaatcattgccaacaatcagtacggttttaggtcaggtatctcaacggaggatgctgtagctgaccttaccaatacagtagtaaacaacctagacaaaggcatgaaatgctatggtatcttccttgacttattcaaggcttttgacacggtttctgtccccactttgatttcgaaaatgaaaagcgctgggattcgtggtctcgcattggacatatttaaagattatctctcaaatcgtactcaacgggttaaaatagactccacaataagtgatgatagacttatcagcttcggtgtaccgcagggtagcatccttgggccccctctctttttgctctaggtacatcaatgacctgtgtctcgcacacattcctaattgtgacatattcacgtccgtcgatgacacagcgttgattgtttacgatactgactgggttagggcaagtgaaagggcggaacagtcgcttcgctttgtgatggaatggctctcagaaaatttacttaccctaaacgtagcaaagacaaaggtccttagattttcactacctaacactatagctcctccaccggaatcaggtcaaattaaagctcacatttgctcaggtgaggcacccaactgcagctgcccatctctatccgttgttccagacataaaatatttaggagtccacatagatcataaacttagctggcaacctcatatcgaagctctatgtacaagaatcagaaaattaatttatatatttaaggaactaaggcactctgctgatcctaacctagctttaatagtttaccagagcctctgccagtcgattattttatattgtatcccggttcggggcggaacttacaaaacctccttacttaaagttgaaagagctcaaagggcgatcttgaaagtcatgcactttaagcgaagggacttttctaccaatcaactctactcagaagccaaagtattgactgtgagacagctttttgtgctccgcgctgtgctgcggaatcactctacgctatatcttgatcaggccaagctgaaaagacgcaaaggcacacccgtgtgcgatatagtccaatgccgttccaagtttgccagccgacaatatgtggcaactagctctcgattgtataatagaatacataaactaacgcccatttaccccctgactaaaaaagaagctaagatcaagcttacaaattggttgcagaagttaacgtatgacgaaacagagaatcttgtttccattgtatcttaataaaactaatactatgttagaattaaggcatgtttgctcagtttatatttttgtaactataagtacttgcacgacagttactaccagtagtatgtcattccacctagaggaccattggctcctaaaacacaggcttgtggcctagtttaggaggcatcagttcgccctttaatgtgtctctattgtacagtatttccctaacctttgtgtacttatgtctgtctctgtgtacaaataaacattttatttttattattatttttattattattattagtgcccccaagacgacactctgacctgaatttcattcatttaagacaaaaatcagtgaaacgacctttaatcattgagtatgagtgaaaatattatggtaattatgtttagggataaaagcgttatgataaaaaacagtaggagtttaaatatatttacattaatgatattatttattataattttcggaaatatgagtgttatgaacgtcgccggtagcactacaaatagttttaggaaggtgatcattcggattacaaatcattaggaagaacaatttcgggtaaagaactttaggtgagccaatatggacccgttactagtaaatattgaaataaattgccaaaaattaattcgtgtgtacaccgagcacttaatgaatgatgttttgatttatgagacaataattgatggtaaaaatcacctaaattaacaataagacaaacaaaacaattcctttttgaaaaatataacaaattttgtcaactacccgcaattattgtagttgccaagtagatagtagataaccaagtaaatattcttattatagagaccacaagtccatttgatcgaaaatgtgtttttttttccagtaacatcgcttggagtagacttcacagactcgaatctcaatagcgagtacatggatgcagcggaacagatggtcaatactatagtggagaggttcacgaaattctagtggcacagtatttacacattcgcatggagaaagcttaagaagaagcaggattcttatctcaagatcctgcacaatatgtcgaacacggtaaggagatagcgccttgaggttaatccacatattattgtatcagggccatgcgtgggacgtggacgtcaggaactcaaaaaatatcggtgcttaaattttatatgaactcgttcacacacgacagtgtacgggccaaaccctggacgtctaggatcacggcccggacatttctcgggcacagctctgatctgtgtggattaacgttactcttgcttcaaaagaagggaaaagaccctcttccgatcgaatctccaaatgatcttcacgatttgtctttattttatctgtcattccgtcttttatagtgtccaatgatcgctatattaacaaaccacatagaacttaactacaaaatatttattcaacagaatctaacctcaggttaaggatgcttttcattgcgatgcgatggttaagttatcaaattaaaaaaaaatggtttcaatccttcaaaaaagaaaaaacgagtttattggaaatatgtgcggtgaaaggagtataatagaaggtagagattataacacgtaagggaatgacatcaaagagatttttaccaaagtaaaagtcatattactttattaacacacagtgaataactattttatgtcaaacacaatttgaataaaattgcaccttctgaaataaaatttcccctcgatgtttcattacgtttaggaccctatattattctcctcatcgctgccactgtagtgaagttttccatccgtggtagttttaaagtcgccccaatatcggagaaactgaccgagagtcgtctgagatggtatggtcacgtgatgccaagagacgagaaattgtagtcaaaaaagcgttacaacttcctgaatacaaataaacttttatttatttatttattataaggcttctcaacaatgagtatgaccgcagccatattgttaagcagccgcaagctgacagcctctagttaactctagtggaacgtgtactggacgcatcatccactctatgcgtcatctctcgtgctacgtttggctttcgtggcacttgcaacgtatgtggcagaactgggcatcgtgcggctgattgccgtgaaagaaacaaacaacataatcgccctatagtcgcggataaacgtgtcaaccagaagccacaagtcacgtgctacgtctgcgaggagccaggccacgtcgtctccaccagcccagtgtggattgacaacacaaagaaggaacaagtcgctactggaagcaaagaagtcaacaaaaattttcctacaaccagaattaaaacaggactgttaaaaatacacttctggacacatctattggcccaccttgtatttcagtttatttatttatttagggacaacaaacagcagtgtaataatatgtaaacataggttggaact

SEQ ID NO: 100 - DNA, 22193 bp, Tetraselmis sp.
  source 1..22193: mol_type = other DNA
gctcggaacgcgtcgcgatgggcgcggcgaaggagctgctgggcgacgtgctggtttccctttgtgtcggcggccacgtccgtatgctctcaaaacgtctcgcgcaggtaccgttggtcgccccgcgcccagatccagatcagcaggcgagtaacatggtccttctcgatatgccgttctgtccgcccgacaacgtgatctacgacatgtgctaccaagccatcgagaacggacgcctggaggtgcttcaggtaatcgacgagtacctcttatccccccaagggcgtgttcttgcggacctgcgtgtgacgagggttgaggaaaggctggaatcgctgatgctagaagccggtagatacgggagactggacatcatgaagtggctgcattgcaagggggtcggaacccgagaggacgccgtcacgaccgcagcgaccctcggtcacgttaacgttctcaagtggcttcgatctatcgggtgcgagttccccccaaacctggccgaacagtaatttaacctattttgcgccgtggaattcactttgcaccgtagggtttgtgtataccctagttcccgggtttactatcagtacttaagactcactggtgatgtagcttgggtttgtagaccttgggtgcagtgcagcattcattagcatgaaggccagccgcgacgcatatccaatgttggttttggagcattttgtccaaaatgggacaagatgaggcaatgaaatcaatatttattatgattattacatccagcggctagctagccacaagacgttgctaatagtttattcgttgagcatccccaatgaactcaagcaagtccttcttcgtggctgcgttaaacttgacgactccgccgggtttgcgttgcgctggggtggttgacataacgtggacgcagttgtttcgtggctggctgatttgccacccagtttgcgcatatgtcttcacgacttggacgctttcaccgtaccacttctttctgaccatggtgccgttctcgttgaacacctctcgacttcccgacgcgtcgtggatggccttcgcgtacgatagggggacggcttcaacaagcttcaaaggaagcgtcaggcacttctcccagcttgtgtcaactggcttcttccctccttttgtctgcgcgtacaaccataggggcatgaggggtttgccctttgcatcggcatggaagggctcgtatacggccacggtcaacgtgtcttcggtagtctcgcgcgacttcacaagcccgatgacgaatctcgactcccaatcaccaagagtttcgggacacttgtcttcctcatgcacctgacgatggccaagaccgcgagctatgttagtcccgagcgagacaccacgccatttttgtcccagttgggacaaaataacaagcaaggtagatgaaccaaattgttttgtcccgtaaaggacaaaaatgacaaacaatgggactcacatcggagacgtcgatgacaacgaggttcgagccctttgcatcgctgggcgatgtgttgtcatgaagcctctccgccagagccgcgagggactcccgcgttcccctggacgcgttgatatggttgcaccaggaggggtttgctctggaccactcggtgttcgtggagtctgtccggcgcggcaatctgcccgccatcaagtggtgttacgagaaggggattctccccccggagtctgtgttcgcggagatgacgtatgtcgccgccagcacgggtgatgtggagatcatggagtgcctcaaggacaaagggttcccgttgcacccggacgtcgatctggtggctgtgtcgtccgactggtacggaagcagcgtggccatgtgcgaatggctccgccagaatggtgtctttctgacccgcgcccgcaaccagctcatcgaggagtgctggggcgcgagcgagaccaggcgcgcgaagcacaagttgaggttgatccggtggatcaatgccaccgagatgccggaggaacgcgaggttgtagatctggtttccgaatgaatgtgttttcgtgtaagaaaaaacatctttacccttgtcaatgtcaaacagattccaggcactagccaccggaattatgcaggacgatgcagcaaacatcacccttcttaggtttgcagaggcatgttacgagtacgatgaccttaagccgaaaacgtgtgatgatgatgaccagatctttttcaaactgcacgaacatgtgcagcaatactcccccgaaacttggaaacgattgcaacaacgatcgcccacacggagctctgagcttattgtgggaatttgttcgcaatgcgactggtgtagttgagttatttcaagtgcggtgggtcaaggctcgtgggtgaaggtatgacctacgatcagtttgaagaagctgcgagatcgggtgatcaccaagaggattccgctttcatgagtgtctgaggttcattggaaggttcgggctgcgaacctaaaccctacattgtaaactaaactacattccagagattgtgggacgccataggtccgctaagttcgtccctcaaaacgcgccgtctggcacgttacacgctccggcactccgccttgtgaaagagggtccagtcctccctctggcactcgcggtcggagtagtagacgtccttgcaccgggcgcacttggagcgcgggtccgccttcccacaccgttggcacgaggcgacgagcacctgggtgaaccgccggaccgcgtcggcgtccgggatacccagcccccggagcttgtggcggatggaggagcgggtcccggagtgaacgatgacctaaagctcgccgccgcgcgactggtgggagtacatggggcgcgcgaacacgctctggtgcgtgagcatctcccccacgaggaacgcgaggtacttgtcgtcgtccgtgatgttccgcagggcccaggtgacgttgttctgcatgggcgtgcagtgtgacaggacggtgcgaacggttgaacggtcgcggaattggaagaggatggcgtccaggaacgaggtggcgcggtcggggtgccggtggaccaccgtggcgtccgggacgttgcaccccatctggttctgcagggcggcgaaaagctggtcttgcgcggcgtccaggggctccagagcgagcgtcccgtccgggaggagggagagtttgacgcccgtgaacgcgtcggcgacggggttgtggcacggactcacgacgtgttgaaacatgtcgaggtgcggctccatgtacagcacctcgtccacacggccccgcgccaggaccgacaggaagacctgttcccagcacactatcgccccgccttggtcgcgatcatacgagaagatggcgtgcagggtgtgccagagggcgtgtcgctcgacgtccgcgaggacgcggccgcgtacggtctccagtatgtgcgcgtccgggggcgggcgcgcggggaacaaccgggcgaccatggcggcgagtacggcggagcggaacgaggggtccgcctccgctcggcgcaggagggcgccccccgcttcggactccagctcgtccaggaagcgatccagcgcgtcaggtggggccgccatggtttggtatggccgtggggcgtggtgtggaagcgcgtgtggggcgtgcgtgagtggttagggttagcggggtggtgtaagtatatgggcgcgggcgtgtgcggcgggccgcggagtttgttggttgggcgctcacgcagcacaagttggttaggtgtgtagggaaaccctaggtgtgtaggaaaaccctacaaccggggtaccaaatacctgcgcaaaaaccctacaccctaaacccttcggacaacaattatggacaacctcgcgttcatccatggaattccccgcgagggagttgctttggcggttccgttcgaggacggaacgttatccattagcgtcgggttcaccatccagcgtgatgttgacatcatcgtttggaagtgtgcaagagtgggggaagacggaacgctattcggaaagaagtatgggtaccggaagataggcggtgccgcggccatcggaccaatcttcccgaactagtccacatccttctggggcatcagagaagcgcgtagatccgtcagaatggtttcaagcttttcgttacgcacggagtcgaagcaatggaccccgaaccgcaggctctcgatgtgttcgtagtattcgtaatcgtttggtaatccgtggtttcgtaactctgtcgctgtctttttgtcggcggcgacgcctacacctctggcgtgacactccctcagaatttgttgaagctcacagcattgccgcagcgtaatgcattccgagaaaatgagggacagagcatccagtactaatgccaacgtgttccgggaatttcaaacccatttgaacgaattaattaactataatttggattataatcctgtcggttcgtgatgatataccagtggacctgattcgggcccactcgctcgcagacgagccgctgcccctcctgtaatgccggcatgtacacgctcgggaagtaaggaagatacccgggcgtggcagggtatgggttgggtgtcacccggatatcttccggcattgtttgacgaacaaaaagaaaaaaaacaacgcatcctgcgttcgcgtttaatttacagtctttcccaaaatttatgcaacacctagagcatcgcactttgggtaaccgtatgaaccaaggaggttcgtctagcaaaacaacaactaagtatgccagctagaatcttgtgcatggtggtacttgtttgatcttctctccgtctcgattccacacctcgggcgccgagtcacattccctcgcacggtctcgttccattctaccgccggcattgatggactcgtcgaagggcttggcgggaaagatcctcggtcgctcggctgcatcgccgcctatatagaactttggagcaacaaagctatagacgaacgttgtgccttgtgtatgcggtcggttgaagaagaagctcttgcgtctggagtgacgccaggtggtcgggcagtcgaggtcgtcaagtcttccatagcttgagtcttgttgacggagaacctcgaaatgtgacaaacagcgacaggtcccttccttttatacccgttttcctcaaggggaggacgcgtaacgatactgggacaggcgcgcacttttcagacgcgtcttcaaattatacggtccagctgtatcgacgagacgatgtggtgacacctatttttgtacgtttacgaggtcgaaacacgcgactattcacgaaacgtcgcgaccgttttttggaagaagattccagaaaatacggctaagttggaagggtgtggtacttgcaacatgctgatacgtgtggtgttgcattattttttgagaaatgctgtaatttgttcatgacgaaagtgggtataatcttcgacagctgtgtgcctttccatgagagtggctcgaatcgtggcggatgtggcagatgcaaaattacggccatcgcccgtgagccacgacacatacgtaaaagatgctgttacagctatggccagattcacagacgctttgcaaaccgcaatcatcgtgcacacatgacatttgccatacttattttgaaaggcttgcgcgcaatcacgtgcgtcacgaggagggtcttccaatactaaccgagctagccttgcgacgcacttgagctctccctttttgagcgtggtgggattgcattggagtgcccactcaacaaagcgcttgcccctctcagtcttattccaatacacggtcgcagacttcacgtccaggttctgcttgatcccagctacaacaaggaacgtatccccacttggcggggaaacacttaacagggcaccaatgtttccgccccaaaaaactgccgggttttccgtaagatgttgtttttccttttcccattcatggcgatggaagggcagaggtctcttcacattggatgctgcccggaagtcaaagtgtatgcaaagaaccttggcgccctcgacggaatcgcatgcggcattggcaatactggtccccgtccactgccgtttcccgagattagacgcctttttttcgtgtcccgtcgctgttcgtaacagtctcgccacatattcagaagtcgtcttgacagtgcgagaagtttcccggacctgatccgttaagcgcttcaggtccgcctctcgcaggaggtggtgctcctgcatccaacaaatgtcgaaggacatggcctcgttagactacatttcagaaattcagggacaccatatgtacgctaagtccgtccctttaaacgcaacgtagtttatggtcctcgagcttgcaaggtgacccagctctcaaaaaatagacggccggcgagctaaacgcgttaacctgcatgcacaggcttttacctgtagtttttactttagtccagcggggcgaggagggggtgtgtatttttccaagaacaaacacaatttcaaccatggctctctctccagtttgaacatcgtaaaaatgtggcaaagtgctcgcaattactgaagggggcgttgtaaggaaactggtatccctcgacagaccgcgcaagtcgcatagtatcttcgagcggtaggacaccgtccactcctgtgtagtgtatccaagcaaaatcggtcttcttagcaacaaatgcgacccactcgcgctcgcgtatgttggcttgttcattgttcaatccccacacgtcgatgactttcaagtctccaacatatatgccgtggtgccaaccatcgccacccccaccgcgaacagcgatatggtctccgggcttgatttggacgatcagactgtgagagtcttggaatgtacttgccacagactcgtcgaaagtgagtgaaacatgcggcaaatatttttttgcgcgcatatcatcgagatgcttctcgaatacagtgatgagattggcgccctcgccttcggtatgggcttgaggttggtggtctgacattgcttgttccacgggaaggagagaaaaacgtcgtgaacaaacgcaagacatatggtgtcacgccggccatggaatgggggtcactggagtctcgttttgcatggcccaatactgagccttctgatgtgctgccgttcagccgggaatgcttcgtaccttgccagatttttcctcttttcaggagtcttgcgtcaattgtaaggcggtggcaaggccatgtttcagagtcaattattttttattgtgtgaagccaaaatggccgaccccaacgcaccgcctcgagatacgtcggcaaacgtcggacaccaaggagggggtcctgtaccacagccagacttcggatacccagtgttctttgctgtgttcccgcgggagttttaccgctcacccagagcccctgaaatcttggcagaacttctgcagttgcagcttcgacacgtgcaaccccgcaggtgagctatgacacaccaattgtgaaaataccagtgagcgaacgcaccgtgacaccggctacgccatccagtaaggtcgatattgaggtcgaacaacgtcaagtcctaggtgcgcacacagctcgtcctgtgcgcgatacacgttgacgagcaggagtggatctcccacctcccagcactccatggccagactgatcatatacgcgattggcgtcatgctgagaactgcgcaaaacggcgggtcagctgccttcaggtgaagagagtataaccaaaaaaacaatcgtgtattggggtcatctgtgaggtcgcgaagtgccatcagggccataaccgaagcatgagttttcggatcggaaggcaggtcctcccaatcgtcgtggttgtacatcgcagtgattgcatccccaatgaagacggatgtagatgtacaagggagaaactgttcatgtaagaatgcatagtccttctcaaaatcctccacaggtcggtcctttgtattgaacagggtccagcgaagtccatggttaactggtccgatttccgtaggcaaccaaaggtctccatcttgaatcagtgccatgccttcgggaagctggatggaagcggggcaagtgctgcaataaaagggggggatactatgaccttgtgggtgtgaatttgtgggtgtgaagaatgacacgccacgaatattttccttcgttaaacctggtccgcatgaaaggacatggagtgtattttcgccgtctcgacttggcaggttttttacgtgtccatctggaccctttgccttaattctgtcacttttccatctcaaaggggcgtccacgcggtggagaacgctgttatcgctcatacccgacgacgacataaaaacaagattatgacgacgaggtagggttttcacaaaatggcgcccctggctaccgaacagctaaagcatgtacgatgtcggagggtacttctgtgcattgactagaacaatcataagtgtcccagaaaaaatggaaaacagggtacaacatctatatcctgcgtgactagcatcacgtatcctagttctgagcgggtggtctgcaggaaaaaacgactgaaactctagttcagtgcggcaacgacgcatcattgctagcaaaatttcacaacttttctccagtgtaaagctagagtttgcgtcttgaagtctcgtcgcccaattcgtcacatggcttgccgtaattgtgaaggaagcgtacgatggagttttacctagttttccctggctagtcatttcctgcatcagatctaggatgagaataccatctaccggttcatatgaaataacctcgttaatgaaagcagtgaaattcgattgagtggacgcgaaaacgttcaagactctgaggacatcccactgtaagtcctggctatgcatcaccagttttgcaacaaacccaacccatttagggcaatccggaagcgagatgttataaccgcaaagatcgttgatgacttgcagcgcgacgtcattgtccaaaagtgatgccaaactggtagagaattcttgaagtatatcgatagccatgttgtcctttgtgatacagctgtgttaggttagaatggaacaccccctaaaaaatataagcccacttcagatgaatggcgtatggacaagagctacgagaatgtgcattgcgggcatattttaccttctaccgataagaagcaagacatattgggctcactaagtaaaaataatacaatatgcgtggatgaaacaacatttcaggtaaacatgagcccaagaaccggttacgtcaagaggggctcgagactgtatagacagcacattatccatcgcgtaaacaaaaaggtttgtttgtgtgcaatatctccagtgtcaggagtgttctcaaagctttacgacacaaacatcaacggcgaactgttctctaaatttctagacgagcttccttttgaaacaggaacaactataattttggacaacgcctcgatacacaaaacacagactgttgcatctgttgcaacacgaaaaggctttaatctgaaatttatcccaccttattcacctgattataaccctattgagaatgtgttcggtatagtaaagaattcattcagaaagtggaatgtgactaaagggcgaacgttacaagaattcgaagagggaatattacattcgtttgcccaaaatgtagatacggcgacggttcgcaagtgttactcccatgcaaggaagttcatatccaatacgttagtatgcatggaaatggcatcaagtgtccgagcgcatgttaaggacacggagtccctttctatgcgtggagtttcccagcgcccggatcgcaacgcgtgagacctccggtacagatgaaaggactcgcccgtggaagggatccttttttgttctcctcgccgagaaaaggcttaagcgttcatcagaactcaccacagcataccctctctcgctctcgctccaacctccctggaaagggcctaagcgttcgccagaacacgccgcagcataccctctctcgctctcgctccaacctccctggaaagggcttaagcgttcgccagaacacacaaaacaaaacccatctttactgacaataacatgactaccgagccgtcaaagaaaaaacggaagaaggatgatgaggagaataaagtcggaggaagaggagggcgtttgtcgaaagaagctctggacaaagtactacaaggatttgacaacgtgcccgacttctggaacgacaagctcgtcttcgctttacgacacaacaagatcaccgaaacgcagcttcaatgctcggccgcaaccagagagcaagtcgtgaagaggtacctgtccagcttgaccagcaacgctgtcgttatggagaggatccgatcctattcagtcctgtgcaccaaactccaccggcgcgcatccgctctactgaatatggcagtgtgtgagaacatcaacaacgatgacaacctcctcaagatttgcgacatcctttcatcccctctgaagatcaagccaatcgttctgtgtctgcgcgaccctctccccgacctgttcgagaaatgcttgagaaagcacaagtgcatcgactccctgggaccttcgctcaacgaactttctttggtgtctcactggtcaaacgtcaagacctacatcgccaacaagatccacgcaaacataaaaactcagatcaagacccactttctgaacaggttaaagacctacgtgaggtcccatgtgaagggacctcctgatgctgccgtcaagtacttgttcggcgagtctccttgcgagaacgtcgaagacaagactcttatcgaaagcatcgtggacagactcggtaagggaggcctcctcaaggacggactaccggagatcccggcggagggcttgccttcctcgctgatcaagtttcatttcgacctctgcaaagcttcggaaaaggggttccgaccattaccatttcccagtattggtgccaggcaccatgctagaatcgacccaggagtattctcaactctgatgagggaccttcccgatgctgagagagatcttcatcgtgagctcaagttgacacgagagctgtggaaccgcaaggcaaatcgcgtcattgggtacaagaagagacagagggagaagaaggtcaagaggaggggggagaacaagaggacgaagaagttcaggcgttacaaccgactcaaggtcagaaagttgaaggacactcagtgggtatcttcaattgaaacggacggtgtggcggtctccatcgtcgtcaagactttacacagacctgcccgagaggagaaggatgtcgatcaacattacgaagaggagctcagaaagatacgagaggtgtacaacaactgttcgccaagcatcaccgcattttatcctggccacgtattccttctgacaggagctaccatccccaaatctgacctcaacatggaggcccacaagggagaaatggtttcttctgcgaagcattcggccttctcacgagcgcagtgggcgaagatatgtcgtcaaggagaacaacgaacgtgggaagaagaacggaggtccacggtggaggtgaaagaggctcttgacaagcttactgaaagcggaggcgggagaagctccgacatcgatacatgggcaaaattcgtgaaggcggcggctgatgggatcgatactctcgacaaggagtttcttctgaacgatgagagatgcaagcgtcgcttcacctgcttcaggaggaaacagtctgccctgatgaaggtagcctcagggttcgccatccggaaggaagagaagactccgatcctcatcggtatgggacacgcaaacgtcagtgctacgatgaaaggatgtcctatttcagtttctaccaaggcaatccagaagtccatcaagcgagctttcagacaacacgacaagaaggggtacatcatgaaggtgtgggagcacaggacgacaaagacgtgctacaagtgcttcaacgagatggagatcatgtacaaggagaaggacggtaaacaagctccggaaagagagtcccgccgatgcaatcgctgcaaacatgggccggacgaacatggccctgagaggcccaaggaacgtaaccgtgacttcaacgccgccaagaacatcctacttgccttcatcgctatccttcaggacaagccccgtcctcaacatctgtgcgtggtcaagcgcaccgatgactccgtgatcaaggccagaaggaaaagaaagaaggcatcatagttgactcaacacgcttacaaattacgccgatttggtgctgtcatggagactagcaaaactagctgttccatttctagctaacacaggtgtacgtctgaacaaatcacggatcgtgccgactgccgcgctgtgtccaagaacaccaggaagtgacaacaacttgatgcagaatgtctggaggttgtgatgtcggagttggtcaaggcctagcgttccaaccacacccaggatgacaataggaactgtgtcggagtcaccgggaagggtatatagggcaaaaaatctgacacaggttgtcattaaaccatgaacatcttgccccaacaggtcgtgtgacatcattgtttgccccacggcgcggaccaattgccgtcgcgccggagttcgagaaaccctttcaaaaatgcgcaaaatggtgcaataccactgcgggtcaggatatttgccttttgcgtatagagggtgcccgcttgctgcaagtaagcggttgcacaaagtggggcgtataagccctcctggaaagataccgaggcagcgtgttgggatccagtccatttgattcgtaataaaagattcgtaataaaaacacccatttgggcgcgtcgcttcagcgacgacggggagatcccgtcgtgattgtcacagaaggagttcaacctgctcaaggacgactactttcgtgcagttttcaaggttaagagccccgattcctggactctgggaaacgagttgaagacagacggcacgtcgctgaggataaacgtcttgcgaaaactcgtcacttcagtggccgaaatcaaaaacacgtgggtaaaacggtaataccatcacacttactgtactgcggcgacctcgccaacgacccaccttgtttttttgtgcagggaattagtgcgtgctggtggggaaccacacgcggatgcgaacatcgggcctgtcctcccaggggatggggcccgaaaactcgtccaggtacacggcgtagtgggagttgtccgggcacgacggggcgccgaggacgtcatggccgacgaggccactgttgttcttgcaccagttaacgcacgtgggcagaagattcaccgttgccctgaaactgtgcttgtgcgggtaatcgcaccggcactcgaggcgcttcatgatatcgagagtgctcccgatggcccggttcacggcgtctgactgcgcggtgcacgcgatgagacagttctccttgccgccgttggagcaggacccgaacccgacacggtcctttccgtgcagaccgaccagaccattcaaaccgaactcgggtaccacatccgcgtcagtcacgacgcacacgtaacgggcgtctgcctcggacgacatgcgccgcaagaactcgagcttggcaatgtcgaagttgtaccacatgtccttaaccccggagatccagatctcgcggacctccacctccgcgcccatttcgcgccatttgtgtgcggcggactcggcgcggtccttaatgtcggcgaaggcggcgctgcggttgaagatcgggatcagcacccggatgcggggggcgtcgtcggtgatcattgggacgggggatgtttcgcagatcattgtgatgagggaagtttggtcctgtagggctgtgactgtgtcctgatccggttcggttcggtgcgttgttctcggagtttttcgggtctgggtaactgaaattgtcgtgcgcgattaattttttcgggaacccgaaaaactgaatcgttccgacccgatgttattcacaacgccaacgccaaaatgtcgacccgtgaggtgttgcattattttctgagaactgcaacgacgacggtgtttggacatacccctggatggagaaagatgcttttcaccgtgtgttcgaagagccatctgcgcgcgcgaaacgcgagatgttcagttttagttttctggtagtgagtcctacaggtagatcggggattaccaaccagtctccctcgatgggcgttgtctcccacctgttatatctgcagtagaaaacgaagccgtcgcacacatggttttccgtctggaaatacgtgtattcttgtttttcgaaacactcctcggccttgaccgcaatggcacacttcttctcgggggtgtcgccccggtaaacaacatgttttatgtagtcgcccagctggggatctctacctccgacaaagtcccaaacgggacttctcgtaacattagtaccaggttccatgtgaaacacatcgcctttgccgtctgttatgccgtggtggtggacactgccacaccagtagaaaacgtgttctccagcagcaatgctggacaaagtagatatgtgcactgtgtagacttcaggatcaaaggacggggaaggagcttcagtggacatcgtctgcgcagacatacttgtttcgaagtatgcaaaacaatttattccattttgccgcgtgcgaagtgtaaacttttttctgtgctatcaccgaaatatccagcccagcgccagttccagaggcggagggaccttctcgtacgactggtcgcgcggcggaatttgtggaaatacagcgggcgggcggtccccaaacggcgaacaaaggattatatagtgatttttgctcatctgttcgccttcatgcctgtgcatgggtttcatagcaagagtttaggacgatgttggataagaattggacgttgaaacagactacaagcatcgaaaacgggttggtagtacctcccgactttgcagagacaggcaatcatctcgcaattgttctcgaagaggtcgtaaggtaggtcatccttatattgtaggagaatgtcggcaaggtgaagcgtggtctcgatagggaaacaccctcccttcggatactcaacgaaatagatgttcttgtcaggagccatgaaggtgctaactgggaccaactcaaggcctgaatccttggaattgtgcaataccctcccggaggaccagtcgtggttctggaagttcttgccaacaaaaacgccgtgatgccaaaacgcatattcttcttcaccttgaaaaaccgtagagggaactaccacgtgagttcctggggcaagagcccatgcttcagagatgtcaacgctgtccgcgcgtggtgacttcaggaactccagagtgaattcttgagccgctttgatgaaggtctgggttacggcagtacggggctccatggatcgtgcttatccaagtgaaaataaatcgccccgcgacgtccacagttttacggtttccgcttcgaagtttcttgatttgttcagccatggcctgaatggcaatttgacctccgcgtttcacccaggcatccagttgattcttgggaagcgtcttcaaagacatgcagttgagattcggtgggcgtccgttcattctcgcgaatccgcttaagttgattctcgttttccgcagaacacatctgagtgcggccgcgcgctctcggttttttctgcccgggagtgaactgacagtcgccattatggataacgctttccgttttatggatgtccgcctcgtcacagtcccacagagctttgaactggtcggcccttgcgtgaacttggggggtccgcaacgcccggagaccaccttgctgtcaagtggagagacgctgagactgaagaccttgcgtggcaccacggaatttatctcggccttaaccgagtcgccgacatgaacacggaatgtggtttgagaaacgtttctatttctgaatttttgagcagaaacggccagagctttgacgccggcaacgtggcggctattggaattttgcgatacaatgttgacacagcggagcggagaaaattggtggtccttagagctctgcgccttttgagtcctgtgtatgacattcttgcatcaaaatgcgagtgcttcgcgacatggtctccccagcccagccttgcgccaactgcgccgccgcgtgcgaagtgtaaacttttttctgtcctatcacagaaatgtctagcccggcaccagtttcagaggcggaggaaccttctcttttggacaagctgcgacaagacttatccaagagcacaagcaatacaacgttacggtgcctaaacagtatttcgataagctgctcgaggagaagcatgaactgtaccttcgcagaaaattgtgcgagttccgcacatatcaactgaacatttcacggtcatgcaagcgtgaatactttagtcaccgtgcaccatactgtgtcagacgcgcaggacacttgtcgatgcatcgaagaaggagccgatagcagatcgatagccgatagcagatcgtgcattgatcgggtttggtcagacctcgccttcggtcaacctgctggccttccaattcgatatttgaaaacacccttttcaccaacacacaccggaattggacagtaatttgacaggtttacagtctttcccaaaatttatgcaacacctagagcatcgcactttgggtaaccgtatgaaccaaggaggttcgtctagcaaaataacaactaagtatgccagctagaatcttgtgcatggtggtagttgtttgatcttctctccgtctcgattccacacctcgggcgccgagtcacattccctcgcacggtctcgttccattctaccgtcggcattgatggactcgtcgaagggcttggcgggaaagatcctcggtcgctcggctgcatcgccgcctatatagaactttggagcaacaaagctatagacgaacgttgtgccttgtgtatgcggtcggttgaagaagaagctcttgcgtctggagtgacaccaggtggtcgggcagtcgaggtcgtcaagtcttccatagcttgagtcttgttgacggagaacctcgaaatgtgacaaacagcgacaggtcccttccttttatacccgttttcctcaaggggaggacgcgtaacgatactgggacaggcgcgcacttttcagacgcgtcttcaaattatacggtccagctgtatcgacgagacgatgtggtgacacctatttttgtacgtttacgaggtcgaaacacgcgactattcacgaaacgtcgcgaccgttttttggaagaagattccagaaaatacggctgagttggaagggtgtggtgcttgcaacatgctgatacgtgtggtgttgcattattttttgagaaatactataaaattgtctcagtgaaaactatgggaacaattgagtcgttcatgccttcacccgcagagcaggcacaggaacaccatttttggggcgttttgaaccggtatgcctccggctttgaggacattttggttgatgaactgggttgcatcggaggcggagatacaccagaggagattattgacgatgtgaagttcaagctatgggacgaaatcaacaggctacacagtatgggcgagcccgtgcccgtgtacaccaaagaggaggcagaaaactttgcagagaggttgtgcgaggaactgcgaggcgatgatgaatccagagtcgaaagttggagacttgtgcgcatcacggtggacatgaataccccaccacctggcctgccccaagaggagcttgatgccatagaggcccttatgtgggaatcgtgggcaaaatgtttagcggaggcggaaaaaacccagccgaaatgttctgtcacgtagtcggtaccgcgcgactatgttctgtggaaatgccaatgtaccttaggctacaagacaaagaaagcctaagaacttgctccttagcccttcatatgacaaaataaaacacggatcgggcggcgaatccaagtggatctcccacatccgcgacgtgcgggcacaggccaacaaacaagcaagtaaggcccacaagagcaagggcatgacgtggaaggaagccatgcaggccgcgaaaaagacctacaaaaagtgatcccgcggagtgcagagtgcaattgcgaccacctcattatgtacggcgcggaaacggaacggacagggtttacgcgggattgggcttaaggtggcgggtctgtgtgaatttgaggagactggccgacgacactgtacgccagaaaaggtttacatgcacctcaaaggttgttgtcgtcctcggtctcagagaggcgttgaagcaacgctagcattgcttcacacagaacgtttttgtcgttggttgaaagacttttgacatgttctttgaacccttgtgcattcagcccaatcagcgtgatcataagggttatgtccacaactgccctgtgtctacaagcacaagcaaactttgccaaacaacctatgacaatcaaagtacccgacacacgaaaccattgaatcccgtttttgtgttggttaactatgctttcgcatactgcgcgaaacaggagttcgtcggggtttgtgagctccacattctcgtcgggtacatttgacttgtcatactgggatcgggcgtcctcatcacatagcacttcgcgtgcacgcgaaagagccctaaacctttcggcatattgttgcatcatttgagggttggttttctctgggcacttgtctgggtgccatttcagagcttccttattgaaggccttctttatgtcttcaatagttgcagtggaagcaacccccaaaatggtgtagaggttctgttgcaccgtgtttgatgtcagagaaacacacaatgtcgctccatgaacatacacttcatactgagatggtgttgaccacaggtgatgattttccatttaaattacaaaaaaatacaaaaagtgtaccaacgacacgcacgggacatagatgtttctccgctctgcaagcgtgctgacacacacacacacacacacacacacacacacacacacacacacacacacacacacacacacacacacacacacagagaaaagttagtacacgctccttcaggagcgcgatcgagggtgaagagatcgctgtcctgtggtgcgcgcggtgatacgggcgcgaccacgtcacggctaccacatgaagggcggcaagtcaacaatacacgcctgcctacaggtggtacccttggcagaccaacacatgaattggtgaacataccagtgagcgtacctgtacatcgcaagcttctcctccgcgtcctctcgcaacttcttctcttttagatgcaaattcttctggtttagatacatctgcttcaactgctctgcggtgaggctgtccaggtcttcgggagcatcggggcggtcgtccatgggcgctagatgtttgtttttgccgagaaaagaaccacgcccagtgactgcgtgcctggagggaggccgagaaaagaaccacacccagtgactgcgcgcctggagggaggccgagaaaagaaccacacccagtgactgcgcgcctggagggagagatgggtgttgtaagggggtccggcgttgcgactatttctgtagatagttttgcgttgtgccacgcccagaaacacctccgccggaagcagcccgcgcgccgagagacggcgcgccgagatacggagcggtgcagcagtgtcccccgatatccctatcaaaaggaatactgacagttgttacacagttacacatcaggaaacttcatggttgacggaccatctaggtctcccaatttcttcaaaatataaactattttacggtacacaggagccgccattccacgaagcaatttgcggtttgaactgtcgaatatatcgtgaaaaccttctggatcgcaggcggggatcccccaccaaggtactttgtgcttgcaagcattagctagctcgcagaaactattgtcatcatatctcaaggcttcgatctcctttctggcgatctggatgaactcgagttggagctgtcgaaaaggatacctatcttgcccggttcctagaaaatagcagaactgggcgtacccgtcatccgcgcgaaactcctgacaatacgatgcaatgcagtctagaacattgagcatccccgccatggccgacgccagcttcccgttcaccacgaaatggtcggcgtctccagcaagttcatttctagcttcgaccaaacacatcccattgactgagtgctggttcgctatggtggcgagatacccttgttgggtcaaccctatcgagcccgagcatgcgcctctagtcacctgtgtatcggcaagtgcacaagattcaaacactttacacaagtatgaatccgggacaaacatttgtttctgaagtatacaaagatgtcacacctgctgacgcattttcaatgtcttctccatctgtgcaattctctgcttgagtgccctgaactcttcattggtgacagactcttcggccatgtcgaagagtcgcccccggctttgtaagatgcgaaattgccgttttgagaggtaaatggagaccctctgcctgagcggtggtcgtggtagaagcagagccggtatctgagccggtatcatttaagtctccgaaaccctaaaaccctaaaaccacccaccccaataaaacgccggccagctgccgcgatggcagcgacgcgcagcactaggaaaggcgagcatatctgtcacgcgactacctacctttagcgactacttcgtggcgattagcgactagcgaggtgcaccagacaggacccatacatacatacacgctgcgacgctgctacgacttaaggatccgcccgtgtgtcgtaccagctggcgagtgctgctgagtctgtctctcaggggggtggtgtattatgcatgctgaacggtatgggaaaccacccacacctgcgttctgggtgtgtaagcagcacacctggagacggtgacgaggcgcagcaccagaagaagtggtattgacagatccgacgggtcgctgcagcgccgccgcgagtgggtgctgggtttctccgggggttactattatggtaggtgaacggtaagataggtatcaaaaagagtgacccccggaagcgcctccgactatcagctgccgcacaggcgatcacggtgctcccgcaccagtgggtgcctgcggatctcttggcgagtagtccaccccgtccgtgggcaagtgggcggccacgcgacgactacctcgtacagatacccggtagcgactacgggagccatccataacccagcgcacacgtagcgactaaccgcagcacaacgagcgactaacccgtacgaatggtcgtgcgccgtgaatttgcgaggcgcagcaccatattgccacgactggaatcctgtagttctgttacgacgtggcgatgcgttgtggccctgagtttgggatgaacgagtccgataatgaggaaaaacctacagttttacaaatttgtgtctagtcacagggatgctgtgttgtctgcctagctcacataccatttcgacaatcaaatcgtaaactggacatatcacattgtgcttgagtccattttctgggttccgcgcatcgtagatgtccaggcgtctcggttcgcgatcgcgccatgttacttttccaatccaggggaattcatgcttgaccaaattcgcaaagttgaagaagttcgtgatttccgtttctgtctcaacattgaaggttattctttccagttttaccttgtaatcttgcacccagtcatcttgagaatttgtgaaaccatacgaattgaattgaagcattcccgggcgcccgtcacttggagtttcatgcaagtcatagcagaggtttgcaaatgagtcaagagctgacaggagggaaaccactcccatgcacatcatgctatttacttctgctggattagcattatcaatgtctccaacttctcttggaaataaatcaaaagcttttcgaagcaaagcccccgtttgaatgagaagatttgaaatcacgtggagtcgcccctctgtagagaatccaagggtagtcttcattccctgtatatcacaacgagcaaaccaagggtttttgtccatactgatatggtttatgttgtgaacaaaaaatcgtaatagataacgcagatatcgcagctttactttgtactccagcttcttcaggcgattctcaatggcgtcaacgcgtt

SEQ ID NO: 101 - DNA, 22190 bp, Tetraselmis sp.
  source 1..22190: mol_type = other DNA
caccaaagggtatgtgccgtactcgtaccgatacgcggcgacacgcggagtcccggcggcacggatagctcgattaaccgtggtcatcccgaccttctcaccctgttcgcggaccttcttgagaagagcccctactatgaggaaaggattctgttgctgatgctccgctattttcggtcttagtctcgccacggcgctttgtcacgcgcggagcgcgctacagacgacttcccgtatgcgggtccgcggcggtgtccagtgaaacaccttcatacctcacgggacggttcatactataggcacaatccttgcgggctgaggtttgtgcgacagtgtcttattgacccaggtgggtgggggtaacaaaaaatctcgacaagtgtccgcccttcccgtcttgcagtatgtggcaaagtgctcgcagttgaaggtctcctcgttgtactggatcccctcactctgtttcgcacgggcgcgctctatgcagtctgtttcatcgcccgggtatttcaccacacggagggccctcgggtttgccgcggcaaattggtagaggtcgacctcaacggtgttctcccccggaaccatgtggatgaccttctcctcgccgtttatttcgccaagatatatgccgtggtgccagaagcattcctccccgttgccgcccctgaaggggacgatcacatgggtgccgggggtgtgattcttcacaagaccaaaggtgcccacacggtgacaaagttcggtctccgtttctgccatctccccccagtttccagaccccatgatttgaatttttgggaaaaactgtagagaatcgttttgacctaacgaccccataaattgtaacacttcagtcatcgactccatcgttgttgcatgcagacccctctcgttcacaagcttcacacactcccgtgtacagactacattatcaaccaatgcccataactccggattcatgtcttgcttggggtcatcaacaataagtgtgacagtagtgttcaaaaagcgggtgttgtgtagtactgcccgctccattttgtttatagattttgcattgaataccacctttgtgtttcgcggaattttggatgggtcaatctcatcaatatctacttttgctccaactccaaaaccgacaacagcagtagtattcatgttgtaaactatttcccagaaaaaaatgacacagttgaaccgcgtctattcatggtccatcctgtattcaacgcaacccctttccacagtctccacgatctcatgatccgttaaatttacagagacatactcggggctgcgggtctgtgggaactcgtctcaggggcacccgtgatcgcgcgcccacgccaggacgtccaggtggccttcctcgtcggcggcctcgcgcgtcgatctgttccagggacagccgttctcgcgtgcccatatgagaatctccaggtggccgcctcgtgcggccgcctcgcacgtttcttcgtcccaggggcagttctcctcttgcatccaccggaggacttcctaatgcccgcccttggcggcggacgcgaacgtccatctgtcccagggacagccgtgctcgtgcgcccaccggaggacgtcgagatggcctccgtgcgcggcagacgcgcacgtcgagctgttccagggacagtcgtgttcgtgtagccagcggaggacgtccaggtggccgccgcgtgcagcggcctcgcacgtgtgctcgtcccagggggaaccgttctcgcgtgcccatatgaggacgtccaggtgcccgccgagcgccgcggcaaagcaagtgttgacgtgccagtcgcacccgttatcgcgcgcccatttgagaacatccaggtgggcgccgagcgctgcgtggtagcacgtccattcgtcccaggggcagccgttttcgcgaagccaccgcaggagtttgagatggccgccctgggcggcgacccagcacgtccactcgttccaggggcatcctttcgcgcgcgcccaccgggcgtactcgaggcgcccctcgcgcgcggcggtgttcatgatcacgcaggacccgaataggaagtgacggaatcggggcttccagctggcggcgtcgcaggccttgcgccactgcgcggacacgaaggccgccgcccagaggtccgcgggccggaggttgtctgcgaacatgcccgccaagtcgtcgggcacgttgttccagtctctgtcgctctcggtggcggcgggatcggggatcatggcgacgtcgccgggcatccgtttcctgtgcagactgtctcgctctgcttaagttataggttagccgtgttttcttctgtaggggtcaacaaacgtgtttgacctctcgtgcgaacgttgtccttgtgggccataccgacgcgtttggggggaacggtatttttcgtgtgaagcgtacgcaagcgatctcggatcggggtgttttttcgggcccgcgaaaaagtgaagagtgtaaaactgtcccctgctcaagacaaccagcgctcctattaccaatgccaacagcaccaacaccaaccgctcttaccacgcacacgcaccatggatccccagaacaacaacaatggcatttcgtctcttcaagagttcagagattgcatgtttgctctgcagtatggtatccacaccgccgttcagtctattcgcaggaaagatgaactcgacttcgacgaagttcgaagcgccacctggcacctgttcgggattattgtcgagtatgcggacaagtatgacgggcatttcaagcagtatgtgctgaaatgcaaggagaaggccatgcgtatttttggcgccatggttctcatggctagattcctcgatggcagcgattgagctctgcgcctagtgtaaggacacccggtttcgatacctgacatttctcaacggtaacttgtttttaccacggtccgtccgtggcgacgggtcgcatatcgaaaaactgaatttcttatgcgttttagcatttaaagtcctagaccgtatccggacagtcatcatggcaaccgacagccgcagcgacaacgtgaccattcccgccgatgtgtgggagaataaccaggatctcaatgaggctttgatcggtttgcttgagagattttcgtggggggatcccagttcagacgacctacaaactttggttgagttagcaaagctcatcgggttaccgttaagcgtcgaccatttcttgtggactcgaaaataccgcccaagtccccgacatcttgttgaattggccaccacgataggtcaggagcataagataaccgaagctcatctgcttaagtgttccaacaacgtcgatgagttaatcgaagtggcgaagaagctgaacaaaaccagataactgaatataaatacgccgcgcctccggacccggacaggacagttgtctttttccttccataggatccttcctgctacctgccctcctgcccacctgcactgcgccccgctcccccgcccgctcccccgccccccgcgcccgacctttcccgccgtcggagacacacaatggttatctcgcagaaggaggctgtttcccgagaggtaaggaccctagcgtgtcgcgtttccgtgcgggacgtgcacgccagggaggtggaggctctccgcttggtgacggacgacctggccgcggccgagaaagcgaaggggagtctccgggctaacattctcggtgcggaactcaacgtagacgacgcgggggggttgacgcctgtccaaacccaaacccaaacccaaacaactccagaagcgccaataacgccagaacgggtacaacaaaacccgacgccaaaatgaacccagtcccaaacccaagcccaaacgccgactccgacgctccccgacgacgtgcttgggtcgatattggagttggtagccctaacagcgacccgacaggagatcccgaatgtccgcctggtgaacaagcacatggccgaggcggtgacccgcctttccccgcgctggcccgtccagccgcgggtcctggttcgaccgagcgccgtccacggtcttggcgtgttttccacgcgcgcgttcggcatcaacgacgttataggccgccacagagggactgctctcgtggggcaaagcttcccgtccgagctggtcacgaagcctctgacgtttcagttgaagggccagatcgacgtcggtggcgagaaggtgtggcgcgtgatggtcccgcccgcggataacccccccgcgctgctccagccgttccactacgtgaaccacgcgtgttgtgaacactccaactgtatcttcatggaggtaacctcgacgcacgctcttcacacgagggtgagcgtgaccggcgaagctctggcgtcggcgccggaggctacgagactggaggttctacgttcggtcggcaagatctccgtgtacgttttctgtgcttctcccatagccgagggcgaggagctcctgacaaactacgcctggtacaggttcgggtggatggggccggggcagaacattcactgtaggcaccccaagtgcgcgcgcaagaggaaacgggatcgcggcgacaagacggttccttacacggtttaaaaagcttgttttatgtaacaacaacaatgttctgcgtcgcgaactgatccttctccagcaaagcggcctcgcctttagctatgagatcagggagtctcggtgcgcgcacggtgtccgtgcccccggtcacatagagagccgcgctctgtatgagatgtacatagcactcgcgggcgcggtcggcgctcgcaaagtggtagacgatgtcgctgatcaggaggaacgcctcctcgccgtggggcgtcaccctggcggccagatccgtgcgcagacagtactgttttttggtgttggtggagtggggggtgttgatcttggtgcacgacagaagcgcggcgttggccttgaggatcacgcgtttgagtgggggagggctgtccatgttctttgggatttgggtgtgtgcggggtgctggcccttgggtgtggtgcgctggtctctcgctcacgaacgggaggtttaggggttgagggagggtgagtcaaaatgaaatgaggtggtccagggtggtctcgtctgatgacaaccaaatatacgccatgtgatcaacaaaacatgtggggggaatgtttggccacgctggcacccgcgtacagggaaaacgtttttcgacacgctggcacccgcgtacagggaaaccgtttttcgccacgctggcacccgcgtacagggaaaccgtttttcgacacgctggcgcgcgcgtacgagggaaaatgtttttcgacacgctggcgcgcggcacgggtaggcgggcgggcgccgataccgataaaaacctgggcacacattgcatatccaccacactgaccacttcttcggccaggtggccgcccaaccccacctgcaactaccttcacttcacttcacttcacttcacttcacttcacttcacttcacttcacttcgtttcgcttctccgacgatggagcgtccggtatccgtggtggtaggcttcccggcggttttgcctgtggagctgtggacggaggtgttcgggttcttgcccgaggccctggaccgcgcggcggcggcggcggcgtgtcggctcttccgcgcggcgctcggcgatcctgaccgcccgcaagaccgccatcaggaactccgccaagaccccccaccagaaccccaacaaagtcccggcgccgacgacggagatgcgctgtcaatcacgctcgattccctgccgacccccgccccggcgcgcaccctggcggtgaccgcggcggtttcggggtctcgggcgcgtctcaggtggtgcgtggaggagatggcactggtgcgacaggcgcttcgcgtgagcggcggtttgcgcgccctcttccgcgccctgggagcgcgcggcgacccggagtttctgagctttgcggtggactccatgttggtgggcgactctcgcgtcccggtggacatgcacgccgtatgcgatggagcggcgcgcggaggctacactggcgtgctccggtgggtggcgcttcgggagtttggtgcgacggagaccgggaccgatggtggggacgggggcgacgatgcgtccccgccctcgatcctgcgcgaacacctgaaccccgcctcgcctcgcggcttcatggccgcgcaggccgccgcagccagcggcaatcttgtcgttctgcagtggcttcgggatccgccgttgcaggagcgcatgtcggcgcgcgcaagggcggtcctgaagtggtcctggtgcagcgtcgaggcgaggatcttcgaggaagctgcaggtaacgggcacgttcacatcctggactggataaaccgccggcgcccaaccttcgaccacgtcgacgcgcgggaattgcgtcactacagggagctcgggcggtgggcggagaactccgcgtgcccgtacccgatggattgggcgcttatgatggccttgtgcggtggacacatggacgcggtgcggtggttcgcaatacgcgacgtcgaggtggacatgccgcgcgcgtacgagatggcggctcgtcatgggcgcgtggaggtactagactggctggcgacgctgtcgcctcccgaactgcatatggaaaaagtgttctacgtccacgccgccgtggaggggcacgttgagtcgctgaagtggatggacaggatgcacgctccgtggagcgcggatgacttcatgcactggggggaggacgtcctcttcaagcgccatcgtgactcgccggagctgatgcggtggctcggggagcggggcgtgaagtgggacctggaggccgtgtgcacccgcgcagtttctcccgcgaccgcgcgctggatcttggaccttgtgacctcgcccgaggtgcagtccaatctcgccaacgtggtacagcccgggcaggtggagacggttgtgcgcaagatcagacgaggaaagattgtgttttccatggatgtcgccatcatgtcgttacggtcggacgagggctttgccgcgtacaaggagctccgcgccttgttaccgatggttcttccggcggctgtcatcaacccccggcgcgcgctacgcgtgtattcggggtcccgcgtgtgcgtggagatactggagatgatcgcgtcgacggcgaacctgccggttactgacccggagtggtccattgcgatcagcaactgcatattccaccgcgagatcgaaggcgccctgtgcctcctccgccacgtgggggccgactcgatctcttcgtcggcggcaacggcggcggcggcttcctgcaactttgaggttctccggtgggtgtgcgcgcgctcccaagaggcggggaacgacgaagtgcggcggtacatacgcgatcgttgtccgtactttgcggccgagatcggggacctggccatggtgcggtggacgcgcaaggagtgtgggacccgcgtgcacaggaggagctatcggagacatgtttgctgcttggcgtaccagggggacctcatccgtcgggaacatgtgcatatcccacaggatctcttggagacgggggggcgctgggacgtgtgcgacaaatgcaagcggtggtgccaggatgtcgaggactcgtttgttgatacctgaaaaaatagagtgtaacaaattttgaatcgatctacacctacctgtagatataagtgtcccagaaaaaaacggaaaacagtgtacagcatttctcaaaaaataatgcaacaccacacgtatccgcatgtcggagggtacttctgtgcattgactagaacaattataagtgtcccagaaaaaaatggaaaacagtttacaaattacgccgatttcgtgctgtcatggagactagcaaaactagctgttccatttctagctaacacatgtttattgagccgtcatcacacaaagaatttagacgttggcggagggctttcagtgatatcaacacacgttaaattgtctaagatgtttgcacacggagcggatgcggtggatcttgacattccagctcaacagaagactgcaaacgatccacagtcgtgtctgaacaattcatacaaccgcttgggattcgttggattcgctgcctcggacacagcggttctcacggtagcttctctgcattcttcattgtcattcttataattgattactctcaatgcatcatcgtttcctttgcaaaactctgtcaatcctatcgcttcaatggctggtccaccgcccaaaagtggcaagccgagaaacttgggagaattcatgtgtataactctatattttcctttaatgaaacctacatatatgccatgatgccatattatgttttttgaccccaagcttctctttctcggtacagcaatatgttgtccgcgtgagaaactatttcgtagcatgtctgctccaacctcatcgctgttcttgggttggagctgcacaatcatccgctcgttttgactgtccatccctttaaactctgaaaaagaaaatttatggaacacccctgccgaatgcccaacaccattctaaccccaccccaccccacctccattctaacctaacacagctgtatccaatgggtgttaaactacattccagaaattgtgggacaccataggtccgctaagttcgtccctcaaaacgcaaggtagtttatggtcccctcgcggggacctgctagcaaggtcaccctaggggttacccttgcagcgcgactgtgccgccatcgacgcgcacgacacagccgtgggggttagattttccctatcagaccaagggatgatgctgcggtccctgtcgcatggctctaagcgcagcttcgtatccttgcttggtgtagggcgctctattcccgcgaggaaaatctcaaggatgctgatggcggcgtctttgtccctcgacttgtaaggagatgcgcgacatgcgttggatgaacaacgccgcacctcccggacatcgaccatccgctggattcggcccccttcggtagtcttcttccacctcagcattctgataggacatgtgttaggttagaatggaacaccccctaaaaaatataagcccacttcagatgaatggcgtatggacaagagctacgagaatgtgcattgcgggcatattttaccttctaccgataagaaacaagacatattgggctcactaagtaaaaataatacaatatgcgtggatgaaacaacatttcaggtaaacatgagcccaagaaccggttacgtcaagaggggctcgagactgtatagacagcacattatccatcgcgtaaacaaaaagatttgtttgtgtgcaatatctccagtgtcaggagtgttctcaaagctttacgacacaaacatcaacggcgaactgttctctaaatttctagacgagcttccttttgaaacaggaacaactataattttggacaacgcctcgatacacaaaacacagactgttgcctctgttgcaacacgaaaaggctttaatctgaaatttatcccaccttattcacctgattataaccctattgagaatgtgttcggtatagtaaagaattcattcagaaagtggaatgttactaaagggcgaacgttacaagaattcgaagagggaatattacattcgtttgcccaaaatgtagacacggcgacggttcgcaagtgttactcccattcaaggaagttcatatccaatacgttagaatgcctggaaatggcataaagtgtccgagcgcatgttaaggacacggagtccctttctatgcgtggagtttcccagcgcccggatcgcaacgcgtgagacctccggtacagatgcaaggactcgcccgtggagagatccttttttgttctcctcgccgagaaaaggcttaagcgtgcatcagaactcaccacagcataccttctctcgctctcgcttcaacctccctgggaagggcctaagcgttcgccagaacacgccacagcataccctctctcgcttcaacctccttggaaagggcctaagcgttcgccagaacacagaaaacaaaacccacctttactgacaataacatgactaccgagccgtcaaagaaaaaacggaagaaggatgatgaggagaataaagtcggaggaagaggagggcgtttgtcgaaagaagctctggacgaattactacaaggatttgacaacgtgcccgacttctggaacgacaagctcgtcttcgctttacgacacaacaagatcaccgaaacgcagcttcaatgctcggccgcaaccagagagcaagtcgtgaagaggtacctgtccagcttgaccagcaacgctgtcgttatggagaggatccgatcctattcagtcctgtgcacaaaactccaccggcgcgcatccgctctactgaatatgacagtgtgtgagaacatcaacaacgaggacaacctcctcaagatttgcgacatcctttcatcccctctgaagatcaagccaatcgttgtgtgtctgcgcgaccctctctccgacctgttcgagaaatgcttgagaaagcacaagtacatcgactccctgggaccttcgctcaacgaactctctttggtgtctcactggtcaaacgtcaagacctacgtcgccaacaagatccacgcaaacataaaaactcagatcaagagccactttctgaaaaggttaaagacctacgtgaggtcccatgtgaagggacctcctgatgctgccgtcaagtacttgttcggcgagtctccttgcgagaacgtcgaagacaggactcttatcgaaagcatcgtggacagactcggtaagggaggcctcctcaaggacggactaccggagatcccggcggagggcttgccttcctcgctgatcaagtttcatttcgacctctgcaaagcttcggaaaaggggttccgaccattaccatttcccagtattggtgccaggcaccatgctagaatcgacccaggagtattctcaactctgatgagggaccttcccgatgctgagagagatcttcatcgtgagctcaagttgacacgagagctgtggaaccgcaaggcaaatcgcgtcattgggtacaagaagagacagagggagaagaaggtcaacaggaggggggagaacaagaggacgaagaagttcaggcgttacaaccgactcaaggtcagaaagttgaaggacactcagtgggtatcttcaattgaaacgggcggtgtggcggtctccatcgtcgtcaagactttacacagacctgcccgagagaagaaggatgtcgatcaacattacgaagaggagctcagaaagatacgagaggtgtacaacaactgttcgccaagcatcaccgcattcgatcctggccacgtattccttctgacaggagctaccatccccaaatctgacctcaacatggaggcccacaagggagaaatggtttcttctgcgaagcattcggccttctcacgagcgccgtgggcgaagatatgtcgtcaaggagaacaacgaacgtgggaagaagaacggaggtccacggcggaggtgaaagaggctcttgacaagcttactgaaagcggaggcgggagaagctccgacatcgatatatgggcaaaattcgtgaaggcggcggctgataggatcgatactctcgacaaggagtttcttctgaacgatgagagatgcaagcgtcgcttcacctgcttcaagagaaaacagtctgccctgatgaaggtagcagggttcgccatccggaaggaagagaagactccgatcctcatcggtgtgggacacgcaaatgtcagtgctacgatgaaaggatgtcctatttcagttcctaccaaggcaatccagaagtccatcaagcgagctttctcccaacacgacaagaaggggtacatcatgaaggtgtgggagcacaggacgacaaagacgtgctacaagtgcttcaacgagatggagatcatgtacaaggagaaggacggtaaacaagttccggacagagagtcccgccgatgcaatcactgcaaacatgggccggacgaacatggccctgagaggcccaaggaacgtaactgtgacttcaacgccgccaagaacatcctacttgccttcatcgctatccttcaggacaagccccgtcctcaacatctgtgcgtggtcaagcgcacagatgactccgtgatcaaggccagaaggaaaagaaagaaggcatcatagttgactcaacacgcttacaaattacgccgatttggtgctgtcatggagactagcaaaactagctgttccatttctagctaacacaggtgtaaactacaatttctggatggtggtttacatcggcacattgacacatgaagtgttgcattattttctgagaactgctgtaaatttttatttctccgagagaattgcgactatggtcttgagcattccgggtagcgcctcggcaaagcctgccgatctctctccctccagaatgcttcgtgcaaccacgaagtcgcgcgtctgctgcatgtactgctcacaggactcgatgatgtccgcacgaccggcggcgaggacgtgttggatgacagcggtggcgatcttggggtccggggccatcgggtcgacggcgcacgtgttcagatcacgagcgcgcgcaaaaaccgcgttaagcagctcgaccttccggttgacggggatgtcgcactcgatgagtccggtggcgacggcgaagggtttttcttgcgcgaacttctccagaaccccggcggtgtgcatggcgagaacgacgtccgcggtgaaccgcgtgttgcggggctggtcgaagctctcggactccgggcgacgcctcgcggggatccacccttgcttgagcgcctcctcgaggacgggggcccctcgatgctcgcgcgcgaggcgcatgatctcctcggttgcgttcttgcccttgcgcaacaggaccgccgctatctcggcctgagtggcggaaacgatcgacatggttgttgttgttgttgttgtgggcggcgtgtgccggcggcggatggctgtcgaggtggcggttatatgtggtgactggctgttgcggtggcggttatttgtggtgactggctgcgctctcaatatgatgtcttgccaacgtcgcgccagggttttgcgcgttatatatttctagaaacacgtgccgtaatattcgtaccggacgcgtatccaaacagatattctatctcatgcacggttgtccaaaaacattttcgtgaacgcgtgcggccgtaatattcgtaccagccgcgtatccaaacagatattccatcccactcacggttgtccaaaaacagtttcgtgaacgcgtgcggccgtaatattcgtaccagccgcgtatccaaacagatattccatcccactcacggttgtccaaaaacagtttcgtgaacgacaggcgttaggaagacgcgcgggcacgtacacagcaccacgcgcgcgcgccgcgcggcgcgcgcgtgcgtggatacaaaagacggcgcggtgtgctgccaaagttcatagtccaaccagctcaccggctctaccgtccatccgcccgcttcttggtatacaccctccgccaagatggccgctggaccgcgtcttctcctgcgcttcggcccggactcccaggcccccgcctccaaggtcataaacttgcctgcgagggacatgtactttgacagatccagctttgagtacccgggccacggcatcgtaggaggcatagagaaccaccacctgcgtttcttccccaccgaagacgggatctcggtcgcgaacgaggcgatggagttcggcgcgcacctgttccgccgcgggaccttctacacctggctggcgcccgatgaatcgtcggcgctgttcgacggcgacgtcctgtgggtgggaactacgcgttccagccgcatccgtgggtgtcgcggcagcaccggcccgtcctcgttggtgagcttggaggtgcgtgacacggggcgaaccaccgggttccatgatcttccgcaggaggcgctggatagggtatgttacttcgtggatgactccttcaccgaactggccgcgaggtgttcatgccggtccctccgcgacgcaatccgggcctccgcgagcaccaggaagcgcaagcgcgtggctgagaccgtgttccgcgggtccgtggcctcgcggtgtcggggcgatctgagggttgtcgtgaaggccctgaggacctcctcctgggactactttgagtgggctgtggcgactcacccgtccgtgcggcttgacaacgccatgagccttctctgcgaagcagggcgagcggacacagaaactctaaggcgcgcgcgccatggggtgtcgctggaccgagaaggcgtgcacgatggcggcggcggatggcgatctggatcgtctcaaatggcttcgcgaaaacggttgcccctgggacatcaacctgatcccctgcgcggcccgcgagaaccacctcgcactcgcccagtgggcccacggcatggggtgccccatgccggacgacattgcgagcgaggccgccttgtacgggcacctggagttcgtgaagtgggccctctatctaactgatccggagtcccggtggtatgagtttcggagctcctgtagagtggcggctattggcggccacgaaccggtcttggattggctgctgtgctcggaacgcgtcgcgatgggcgcggcgaaggagctgctgggcgacgtgctggtttccctttgtgtcggcggccacgtccgtatgctctcaaaacgtctcgcgcaggtaccgttggtcgccccgcgcccagatccagatcagcaggcgagtaacatggtccttctcgatatgccgttctgtccgcccgacaacgtgatctacgacatgtgctaccaagccatcgagaacggacgcctggaggtgcttcaggtaatcgacgagtacctcttatccccccaagggcgtgttcttgcggacctgcgtgtgacgagggttgaggaaaggctggaatcgctgatgctagaagccggtagatacgggagactggacatcatgaagtggctgcattgcaagggggtcggaacccgagaggacgccgtcacgaccgcagcgaccctcggtcacgttaacgttctcaagtggcttcgatctatcgggtgcgagttccccccaaacctggccgaacagtaatttaacctattttgcgccgtggaattcactttgcaccgtagggtttgtgtataccctagttcccgggtttactatcagtacttaagactcactggtgatgtagcttgggtttgtagaccttgggtgcagtgcagcattcattagcatgaaggccagccgcgacgcatatccaatgttggttttggagcattttgtccaaaatgggacaagatgaggcaatgaaatcaatatttattatgattattacatccagcggctagctagccacaagacgttgctaatagtttattcgttgagcatccccaatgaactcaagcaagtccttcttcgtggctgcgttaaacttgacgactccgccgggtttgcgttgcgctggggtggttgacataacgtggacgcagttgtttcgtggctggctgatttgccacccagtttgcgcatatgtcttcacgacttggacgctttcaccgtaccacttctttctgaccatggtgccgttctcgttgaacacctctcgacttcccgacgcgtcgtggatggccttcgcgtacgatagggggacggcttcaacaagcttcaaaggaagcgtcaggcacttctcccagcttgtgtcaactggcttcttccctccttttgtctgcgcgtacaaccataggggcatgaggggtttgccctttgcatcggcatggaagggctcgtatacggccacggtcaacgtgtcttcggtagtctcgcgcgacttcacaagcccgatgacgaatctcgactcccaatcaccaagagtttcgggacacttgtcttcctcatgcacctgacgatggccaagaccgcgagctatgttagtcccgagcgagacaccacgccatttttgtcccagttgggacaaaataacaagcaaggtagatgaaccaaattgttttgtcccgtaaaggacaaaaatgacaaacaatgggactcacatcggagacgtcgatgacaacgaggttcgagccctttgcatcgctgggcgatgtgttgtcatgaagcctctccgccagagccgcgagggactcccgcgttcccctggacgcgttgatatggttgcaccaggaggggtttgctctggaccactcggtgttcgtggagtctgtccggcgcggcaatctgcccgccatcaagtggtgttacgagaaggggattctccccccggagtctgtgttcgcggagatgacgtatgtcgccgccagcacgggtgatgtggagatcatggagtgcctcaaggacaaagggttcccgttgcacccggacgtcgatctggtggctgtgtcgtccgactggtacggaagcagcgtggccatgtgcgaatggctccgccagaatggtgtctttctgacccgcgcccgcaaccagctcatcgaggagtgctggggcgcgagcgagaccaggcgcgcgaagcacaagttgaggttgatccggtggatcaatgccaccgagatgccggaggaacgcgaggttgtagatctggtttccgaatgaatgtgttttcgtgtaagaaaaaacatctttacccttgtcaatgtcaaacagattccaggcactagccaccggaattatgcaggacgatgcagcaaacatcacccttcttaggtttgcagaggcatgttacgagtacgatgaccttaagccgaaaacgtgtgatgatgatgaccagatctttttcaaactgcacgaacatgtgcagcaatactcccccgaaacttggaaacgattgcaacaacgatcgcccacacggagctctgagcttattgtgggaatttgttcgcaatgcgactggtgtagttgagttatttcaagtgcggtgggtcaaggctcgtgggtgaaggtatgacctacgatcagtttgaagaagctgcgagatcgggtgatcaccaagaggattccgctttcatgagtgtctgaggttcattggaaggttcgggctgcgaacctaaaccctacattgtaaactaaactacattccagagattgtgggacgccataggtccgctaagttcgtccctcaaaacgcgccgtctggcacgttacacgctccggcactccgccttgtgaaagagggtccagtcctccctctggcactcgcggtcggagtagtagacgtccttgcaccgggcgcacttggagcgcgggtccgccttcccacaccgttggcacgaggcgacgagcacctgggtgaaccgccggaccgcgtcggcgtccgggatacccagcccccggagcttgtggcggatggaggagcgggtcccggagtgaacgatgacctaaagctcgccgccgcgcgactggtgggagtacatggggcgcgcgaacacgctctggtgcgtgagcatctcccccacgaggaacgcgaggtacttgtcgtcgtccgtgatgttccgcagggcccaggtgacgttgttctgcatgggcgtgcagtgtgacaggacggtgcgaacggttgaacggtcgcggaattggaagaggatggcgtccaggaacgaggtggcgcggtcggggtgccggtggaccaccgtggcgtccgggacgttgcaccccatctggttctgcagggcggcgaaaagctggtcttgcgcggcgtccaggggctccagagcgagcgtcccgtccgggaggagggagagtttgacgcccgtgaacgcgtcggcgacggggttgtggcacggactcacgacgtgttgaaacatgtcgaggtgcggctccatgtacagcacctcgtccacacggccccgcgccaggaccgacaggaagacctgttcccagcacactatcgccccgccttggtcgcgatcatacgagaagatggcgtgcagggtgtgccagagggcgtgtcgctcgacgtccgcgaggacgcggccgcgtacggtctccagtatgtgcgcgtccgggggcgggcgcgcggggaacaaccgggcgaccatggcggcgagtacggcggagcggaacgaggggtccgcctccgctcggcgcaggagggcgccccccgcttcggactccagctcgtccaggaagcgatccagcgcgtcaggtggggccgccatggtttggtatggccgtggggcgtggtgtggaagcgcgtgtggggcgtgcgtgagtggttagggttagcggggtggtgtaagtatatgggcgcgggcgtgtgcggcgggccgcggagtttgttggttgggcgctcacgcagcacaagttggttaggtgtgtagggaaaccctaggtgtgtaggaaaaccctacaaccggggtaccaaatacctgcgcaaaaaccctacaccctaaacccttcggacaacaattatggacaacctcgcgttcatccatggaattccccgcgagggagttgctttggcggttccgttcgaggacggaacgttatccattagcgtcgggttcaccatccagcgtgatgttgacatcatcgtttggaagtgtgcaagagtgggggaagacggaacgctattcggaaagaagtatgggtaccggaagataggcggtgccgcggccatcggaccaatcttcccgaactagtccacatccttctggggcatcagagaagcgcgtagatccgtcagaatggtttcaagcttttcgttacgcacggagtcgaagcaatggaccccgaaccgcaggctctcgatgtgttcgtagtattcgtaatcgtttggtaatccgtggtttcgtaactctgtcgctgtctttttgtcggcggcgacgcctacacctctggcgtgacactccctcagaatttgttgaagctcacagcattgccgcagcgtaatgcattccgagaaaatgagggacagagcatccagtactaatgccaacgtgttccgggaatttcaaacccatttgaacgaattaattaactataatttggattataatcctgtcggttcgtgatgatataccagtggacctgattcgggcccactcgctcgcagacgagccgctgcccctcctgtaatgccggcatgtacacgctcgggaagtaaggaagatacccgggcgtggcagggtatgggttgggtgtcacccggatatcttccggcattgtttgacgaacaaaaagaaaaaaaacaacgcatcctgcgttcgcgtttaatttacagtctttcccaaaatttatgcaacacctagagcatcgcactttgggtaaccgtatgaaccaaggaggttcgtctagcaaaacaacaactaagtatgccagctagaatcttgtgcatggtggtacttgtttgatcttctctccgtctcgattccacacctcgggcgccgagtcacattccctcgcacggtctcgttccattctaccgccggcattgatggactcgtcgaagggcttggcgggaaagatcctcggtcgctcggctgcatcgccgcctatatagaactttggagcaacaaagctatagacgaacgttgtgccttgtgtatgcggtcggttgaagaagaagctcttgcgtctggagtgacgccaggtggtcgggcagtcgaggtcgtcaagtcttccatagcttgagtcttgttgacggagaacctcgaaatgtgacaaacagcgacaggtcccttccttttatacccgttttcctcaaggggaggacgcgtaacgatactgggacaggcgcgcacttttcagacgcgtcttcaaattatacggtccagctgtatcgacgagacgatgtggtgacacctatttttgtacgtttacgaggtcgaaacacgcgactattcacgaaacgtcgcgaccgttttttggaagaagattccagaaaatacggctaagttggaagggtgtggtacttgcaacatgctgatacgtgtggtgttgcattattttttgagaaatgctgtaatttgttcatgacgaaagtgggtataatcttcgacagctgtgtgcctttccatgagagtggctcgaatcgtggcggatgtggcagatgcaaaattacggccatcgcccgtgagccacgacacatacgtaaaagatgctgttacagctatggccagattcacagacgctttgcaaaccgcaatcatcgtgcacacatgacatttgccatacttattttgaaaggcttgcgcgcaatcacgtgcgtcacgaggagggtcttccaatactaaccgagctagccttgcgacgcacttgagctctccctttttgagcgtggtgggattgcattggagtgcccactcaacaaagcgcttgcccctctcagtcttattccaatacacggtcgcagacttcacgtccaggttctgcttgatcccagctacaacaaggaacgtatccccacttggcggggaaacacttaacagggcaccaatgtttccgccccaaaaaactgccgggttttccgtaagatgttgtttttccttttcccattcatggcgatggaagggcagaggtctcttcacattggatgctgcccggaagtcaaagtgtatgcaaagaaccttggcgccctcgacggaatcgcatgcggcattggcaatactggtccccgtccactgccgtttcccgagattagacgcctttttttcgtgtcccgtcgctgttcgtaacagtctcgccacatattcagaagtcgtcttgacagtgcgagaagtttcccggacctgatccgttaagcgcttcaggtccgcctctcgcaggaggtggtgctcctgcatccaacaaatgtcgaaggacatggcctcgttagactacatttcagaaattcagggacaccatatgtacgctaagtccgtccctttaaacgcaacgtagtttatggtcctcgagcttgcaaggtgacccagctctcaaaaaatagacggccggcgagctaaacgcgttaacctgcatgcacaggcttttacctgtagtttttactttagtccagcggggcgaggagggggtgtgtatttttccaagaacaaacacaatttcaaccatggctctctctccagtttgaacatcgtaaaaatgtggcaaagtgctcgcaattactgaagggggcgttgtaaggaaactggtatccctcgacagaccgcgcaagtcgcatagtatcttcgagcggtaggacaccgtccactcctgtgtagtgtatccaagcaaaatcggtcttcttagcaacaaatgcgacccactcgcgctcgcgtatgttggcttgttcattgttcaatccccacacgtcgatgactttcaagtctccaacatatatgccgtggtgccaaccatcgccacccccaccgcgaacagcgatatggtctccgggcttgatttggacgatcagactgtgagagtcttggaatgtacttgccacagactcgtcgaaagtgagtgaaacatgcggcaaatatttttttgcgcgcatatcatcgagatgcttctcgaatacagtgatgagattggcgccctcgccttcggtatgggcttgaggttggtggtctgacattgcttgttccacgggaaggagagaaaaacgtcgtgaacaaacgcaagacatatggtgtcacgccggccatggaatgggggtcactggagtctcgttttgcatggcccaatactgagccttctgatgtgctgccgttcagccgggaatgcttcgtaccttgccagatttttcctcttttcaggagtcttgcgtcaattgtaaggcggtggcaaggccatgtttcagagtcaattattttttattgtgtgaagccaaaatggccgaccccaacgcaccgcctcgagatacgtcggcaaacgtcggacaccaaggagggggtcctgtaccacagccagacttcggatacccagtgttctttgctgtgttcccgcgggagttttaccgctcacccagagcccctgaaatcttggcagaacttctgcagttgcagcttcgacacgtgcaaccccgcaggtgagctatgacacaccaattgtgaaaataccagtgagcgaacgcaccgtgacaccggctacgccatccagtaaggtcgatattgaggtcgaacaacgtcaagtcct

SEQ ID NO: 102 - DNA, 21782 bp, unidentified
  misc_feature 1..21782: note = Fanzor polypeptide
  source 1..21782: mol_type = other DNA
ctagcggtgaagatgcagacactacagtcaagcagtacaatatgctctataaggaggacttgagaaaactgcagagtgcgtacaactcggtactttccagccaggctaccttggaagccaaacagcgcgatatggcaaacgcactcaaagcttttagttgggttgccagcgtgatgggtgtgtttttgggttcttggaacgtagcatcggtcggctttgctttggagtctaaggagtggagggaaaagactggcaggctacaatgggtcgaaattagtgctatggttggcaatgctggggtcctgctcgtcggtattgttggtgttgtgatgttactcagacagtgctgcctaaatcgtaaaacccacggtgcatacaagtcttctgtgtaaaaacgtagctgcgctgtacgaattcattcgcaactgctgtcagatcatcatcaatcagatcagatggattgtttacgaacaatgctcctggatctctagtggctggcgtgcccgcccgggtgcgcgctcagggcggcccgcaaccggtctaggggcgaccccctggcggccgcgcgggctcgcagcactgtctcaaactgcgccagctgcagctgcgtgttcagcgccatgaacttttccacgatgcctttcaggggaggtggcaggatggcttggtgccttacgcgccctccgagtcgcaccctgccgtcctggccctgtgtcaaccagaactggggcttgacatggaacatttccgagctgacaaagtgtagcttgaccttgttggtcactgtccagcgagaggggtctttttgacacaggtgctggtgcgtggtcacggacatgcgggagccggcgaaaaaggcgcgtaccggagacggcgttccggagatgtcaatatcgaacacgaaggcgcgctgccccttggagtcaaactccaacccttttcggcgcccttccggtctcaggctgggtccgtgcactgccagcaaggtgtcggcgccgaacacggtctccagggcggcggccagactcgcacaccccacgtccacgtcggggaccaccacctcgcgcatcctttcgtactcggtgtaaatttccgtggaacagtgaacgacaaccaccaggtttaaagggctgggccatgtgtcggtcataatgacataccaaaggcacagcgaaggagagatgcccgggatgcctggcgtgcactgctggcaagaatttgcccaccgcgttgagtatggtaatgacaacgtgggcttcacagtgtctgagttggacatcccgtgtgatgcgtgcggcagcactgaaggcatggtgctgtggaccgagtatgtttcgtctgactcgaccggggcgggcttgtgcgagcaatgcatcaccgcgctgtttgcacatgcccgggcctgcctcgcaaattaaccttgcccctggtcatgcgggtcatgtgtgttaaaccattgcccaaatcatacgtgttggctgatcgcgacgaagaccttgttgactttgtcaagcgacgcggtgcagccttggcagaggggtcagacattgcggactggatgacggcgaactccaagggtttgcttggctcgatacaggggttgtttgcctacaaaaagattactgttggtgacaaggtcatgatccccactaccaagaagactttagaagatcgtcaaatttggctggcttcggttgtgcaggcagcgaattttgcgtatgccaaccctgcttaaagggcgcgcgaccatataagcaaccatggccaagctgtacgttgtccgccacgagacctacatgatcggcgccttcttcctggaccggacggatgcggaagaacacacgcacgtgctagcagagcagtgggtgcgggagggaattctcaatcgtgaccgtgacagcgggctgtgtgttatggagctggagctgggtcggacgtacggcgacttggaagacacattggacttatgaagtgggttcccgagacgctgcgcaggttttgcacgctttgccatgctttggggcgctttgggcgcttcgaaagaagtggtcaagaccgtgtgtgtcgctgtccgggcaccctttgtttctcatgccgctaaccgagtacctgctgttcatgccacctcgctggtatgactgtgaggggcgggagcagtggtgcccggagccgttgctggttccgcacgcggccatcaccgaagagcaccggcgcctgtacgcacgtgtgctggtggaccattccgaggacgatgagatagcactacgtgaggccctgcactccatcccaggaggcctcaaggcgctgacgcccccgctcggctcttgcatcgtttccgtgtgggccccgtacggggttttttggtgtaactactgacttgtcacgaactgtgtaaagtacactttgattagaattgattagcaaggatagagatcgtgcaattgacaccgggaaccatcgtaagcttcacattcatcgtcagaggtgtggctgtagaaattctccaagtggtacgtggcttgcacctcacaggcaccgctctcgccacgtttccgtttgcccttgacagcgttgacagtcttgatacagaagctcaggtcgccgtgcggcccaggtacgtgaagcagggcgtacttgcgtccatcagcaccagaaaagagatcggcaagtggcctagcctcgagggcggctttcaaggccggtgggaccaccaactttccggggccaatcccaagaccgaggcgctggtcgatggtgaggtttgcatcggcaagcatgcgcactgagagctcgcggggcacgtacaccggtgacagcattgaacggatgattgaatgaaagatcaagtcgagcgcatctaatacacctgccaagtcgcctacgcgttctgccaggtcacggcacgcgttgtgccaagtaggcaaagcgtgcaaagcatgacccttcaaaacccggatcgccgtcgtctgggcatcctttcatttcttcagtccttctctttctacgatgacgcacacactcgtccagcagatcatggccgaggattcggcggtacactccatgctggtcccggatggattgctggactccgtttcaaacctgctcgaggagtttggcggctgccccccttccgactggccccgagcgttggaaaaagcgctattgtcgatcctgaacgccgaagagaaagaagacctgccggcaggcgttattgtcttggacggtgccggtttctgtttgatcccctcgggttgcgtgatttcccgaattttccagatctgtcacgaatgatgtaatcaaagaacaaacaacccgaaattgatttaaatgacgtacgaaccacgcaagaccacgtacgacatgacacggtggaaggcggctgcgtgttatcccgctgacgcgatttggcggtgtgcgagagctagccacgtcaaaactgcttgcgttgtgcgctgcgagaccgagctgcaggacggcacgcggatgaattggtgtagtcgcaagggaggcccttttggaccattcgaaaaatgctttgtcgattctctcaaagtggtggacgacccggacatgctcaagctgtttgaccagccacatcgggtcaaacgggtcacagctatggcggtgtacgacgattatcggttcacaacgtttccaagtgaagtgtccttgatcgcggaggttcgtcgagccatggcagacttcggcccgcgtggcagtgtgcaccgcatcgtgctccacgtttggacccacgggcggaacacgaataccttatgcgtgtggaccgattacagcactggagccgagatggtgggggtcatgactcggggttatttggggactctcgtggatacggctcaacaagccatggatgtgttggtttggatcctaccggacgtgtggatagaagacggtgtatacgaactcaatttacgtggaagccatgggcaagagatcgtggtgtgggactctgaagaggcaactgcagctgcaaggaagtgggcagatttctggcaagaatcacgcaaaacgttcattgaggtgacttgggcacccgcacgacacatggattggtgtctgtcacaagatgaaaagccaacttgattacgtgagcgcgttgacggctttatcacttactctattctaccgtttatggcgccagtacttgcaagaaaatgttggcacgggacatggcacctaaacgcaaggagtcctacgcgtcggccggtgcatccttccgtagtcaggcgcgcgtcagtgatggcggcacggacttgcgataccgagaggccttgactgttggacttaaagcaaggaagacggaacgcaaggaagatggaattggcggcagacatcctgcgtcggcgttgtgcggtccgcagagccgcgataaaagaagaagctgatgcactcaagagagcggaagagtgcccgatgatggatgccgacgaacacgcaaagcttcgacaattcatcgagttgaaacccgaagaacttgcggcaaccataacggcttccgcttcagttcggttctcgtatagttacgaccaagcgcacatcagcattccctggatgcctggaaccgttggacaaccgactaggctggcagtcgaactgatgcagtccgcgtcatggggcgaatgggcatcgttgaatggaagtaatgtcgactttcacgtcaagctcaaccgtgatagcattgagttgacgacgcgacatccaaaatacgatccagtccctacaagacagtgccctgatgaaatacgagacgccatccttgcactagttgacgactcaaaacgtgctgtgggatacgagggcacggggtttgtactccacaccgcgcgacctggcttttatacctggcttttgtacctggcttttgtacctggcctttgtaccttgtcacgccaagtccacgttggcacgccagcactacgcaccgcgacgcgtggctcggggcgtcgaggaaaggacctcagacttgaataccttcagccagttcagatgttgcttccgctgttcatccagaatttgcgattggaactctttgttgttgttggcgtgcatgtctgcaatgtctgtggcgctgattctatcgcccttgcgagttttgtaccggggagatttcagctcgcgtagcagctcagaagcacgctgctggaattctgcgttgtgttccggaacgcagtatgctgcaatgtactctatatggcccaggttttcagcgagccttttggacacaaacttgctcaatggcgtgtagaccgttcctgtttccgtggtctcaatgacgtggcgctttgccaactgcagattttgcagtctgggtgggccgtggataccgtgcatgttccggaagatggagcatgcaccatcttcgggtggacatgccacgacaaggagtgccatccgctcgttgtcgtggtagcagtccatcatcacttcgacttctgcttggcttcctgaagggagaagtttcgtcttcacaggcttggtggcggtggccgactcttcgacggtggcaggtgctgccttggccacagcattcttgacgtcgccgcctccggaaaccagataacagatagacgtgatcccaacatcaccgcatctcttctcttggtgtctctttacgttggatgcgaaggtactcgtgtatgcacagttggcacattggtggatagtcgagcggaactcaaaggccttgtgactcatgaacttgaatggtggaggtgcctttaaacccgggaatgtgccttgacacacgcaagggtgcatcgggcctcggacgtgtttgaatagtcatggctagaagtgcttacgtgacacgcgcaaggggactcagggctccgtgcgtgttagtactccaaagcgctcccgtgcgcgtctacggacctgtaattattcgcaccctagtgttgttcttttagtgttgttcctgaaaaggaaaataattatgaaaatccttgtactgggaacaagttgcgcacaaccccagggacccagatcgcgttcccacaaccacagccataagccgtaattattttccttttcaggaacaacactaaaagaacaacacttgggtgcggataattatggctagaagtgtttacgtgacacacacatgggtgctctgggccctgtacgtgttagtactccaaagcgctctcgtgcgcgtctacggacctgtaattattcgcaccctagtgttgttcttttagtgttgttcctgaaaaggaaaataattatgaaaatccttgtactgggaacaagttgcgcacaaccccagggacccagatcgcgttcccacaaccacagccataagccgtaattattttccttttcaggaacaacactaaaagaacaacacttgggtgcggataattatggctagaagtgtttacgtgacacacacatgggtgctctgggccctgtacgtgttagtactccaaagcgctctcgtgcgcgtctacggacctgtaattattcgcaccctagtgttgttcttttagtgttgttcctgaaaaggaaaataattatgaaaatccttgtactgggaacaagttgcgcacaaccccagggacccagatcgcgttcccacaaccacagccataagccgtaattattttccttttcaggaacaacactaaaagaacaacacttgggtgcggataattatggctagaagtgtttacgtgacacacacatgggtgctctgggccctgtacgtgttagtactccaaagcgctctcgtgcgcgtctacggacctgtaattattcgcaccctagtgttgttcttttagtgttgttcctgaaaaggaaaataattatgaaaatccttgtactgggaacaagttgcgcacaaccccagggacccagatcgcgttcccacaaccacagccataagccgtaattattttccgtttccggaacaacactaaaagaacaacacttgggtgcggataattatggctggaagtgtttacgtgacacacacatgggtgctctgggccctgtacgtgttagtactccaaagcgctctcgtgcgcgtctacggacctgtaattattcgcaccctagtgttgttcttttagtgttgttcctgaaaaggaaaataattatgaaaatccttttgctgggaacaagttgcgcacaaccccagggacccggatcacggtcccacaaccacaaccacaagccgtaattattttccgtttccggaacaacactaaaagaacaacactagggtgcgaataattatggctagaagtgtttacgtgacacgcgcaagggtgatccaggccttcgtccatctcgaggcttgatgtgcgcagacgtcgcgtagtccatggggtttaaaaggttcgcacgtgcgacctgtgttgttcgatgccggtgacatttgacgacttggtcgcgaccgagtacccgtgggccccctccggcctgccctttgccggctggctgccacgggtcgccgacacccacgctctgccggccggcaagctcgttcgcgtggaccgtgcagcgcgtcataccggcccgtacaggatatggcctgggtgcgcccgtgtggagctggagtggggggagcacacgtgtgtcaatttgctggagctgcggttcgccaacccccgggggctgccgctgcatgacatcgtgaatcgcgtcgtcctggagatcggcggcagccgcgtcgatacagtgtaccctggagaccagcttgactggctgctggagcaccacgagcgcggcccagtcacgacgacgtgcgggaccacgcgtgttccgctgcctctcggtggcacccacgcagaggacctcctgccgttggtacggcaccacgaggccaaactgggggtcgacctcggagacgggcacagcctcgagcacgccgacctggaggtatgggcgatgtgctacgccgagccgtctggcatgcccgtgccagcgctgaccggggatcacgggccgccggcgcccattgagaacccgtggcgggcaggcgtgcaccaagcgccggtgacgggagccacgacccgcatctccgagatgggggacaaatggccacgggcagggcggccggtggtgcgcttctgggcgcccgcgtccatgaccatcgaatgcatggccgtgtggccggcggatgacgtcgcgctcctcacggtgttggccggggtttcacaggaggttctggccacgtgggcacccgagccggctgggttcgaggacccccgtgtgcgggcggcggcgggatgcctgagaatgctaccgcccgagctggtgtcgcggatcgtaaggccgctgttcgtgcgccccgaggcccgcgccgtcatctcgttttccacgctcgtcaaccccaacacggcaaacctgctggtggagctgcactcgagaaaaggagttacagcggacacgaacttcggctacgcgactgtcggcctcaacgccatggtgtttggcggggggttgttcggcctgatgtactgcggctgaggcggggaaccacgggctccatgtgcgtgcgtgcgcgtgtgtgttacaggttcaggtgtcatatttgctccaaaaacggccctgctctgcccagatgcagacgacaacactcccggcagggacggcaaacgtcttcaaaccgcccggaagcgaatgcatggccgctcggagctctccggagacttcttcggaatattcggtttccagcgattcccacagcttgcggtgctcgtcggtcacactcgcccacggcaccatcaacggctccggattgaaggccgcgtgcatttcggcggcccagtctcccgtggacacgtagagcaagtactcgcgaacgggctcggcttcggcgatcgcccgtcgttggcgcttggcttcccgagcggcggccctctcgagcgcttgctcggcggcggcagcctggcacacttccgtgagagacaaagacatcgagagacaaaagagtgcccgaaccataagccgtaattattacggtgcgaataattacggcctacgtggctcagcacgcgcagcacgggcctacttgaacagtcggttctcccgttcttacattttgcaatgtcagagttcgcgctgcttgtagagcacagcacggaaaccgtgttttacctgataccacaggcgcagcttacggacccggagaggtcgttgttgggcaggctgcacggcaccgatttggacaatgacgggcaaacggaggataagcaagcatacgagcgtatgatgtggcgattcgtggactgtggtggcgacgtcatctacttgccccgcggtggaaccgtcacgctcgtatgtcagctctttgtaacaacttgacagctctttggaacaacttgacagctctttggaacaacacttagtgatgcgtgtggctcgtctcgctgccggcaagctttgctgtctctgaggtgtctgtcacgtcagtctcgtccgtggtctcacgagtcgattcctgggtctccttggggacctcgtgtgcgccatctttgttctgttcttgccgcagcttgtacttgccagtgtccttgtcaaactcgtacttgccattgtcgtctcccagctcgtgcgtgatggtgcggccgtagtgcaacttgtagagccagcccagcgtggccccgtcagccaggatcgtgaggaacaacccggacagcgctgcgtcgatgggcatggcaccgtaccaagagccatacttcagctgcaagtttttcaatatcacgtacaacacgatgtacaggaacgcccccaccaggaatgtcctcgcgttgcgtttgccgtgcccaggttcctttgacgcaggcaggaacgagtgacacgcataccacagcatgtcttggctgtccgcgtgacaaaacggatccgaatttgacgcgtggtaattacactaagacaacacgtggatgcatgccatgcggcagtgtcaatcggctgggactgtttgccgtcccaaaaaactattggtgtctatggtaattaacgcgttaaatctcgaactttaatatgtctaccctcaccacgacaatacacgccgtgcaatgctcatctcaggcaagaaggcggctgcacagctcggggtctgtctcgacaccctcagacgactcgcagacgacgggcagctcgcaagcatcaggctcccctccggacacaggcgctacgacatctcagacgtacttgccacaagcacacaccccggtgacaatgacagcctcaagcgaaaattctgctactgcagagtctccaggaaacaccaacagcacgacttgcagcgccaggtcgagtacatgcgcgaacgcttcccagaacacgagatcgtcacggacatcgcttcagggatcaacttcaagcgaaagggcctgcagaccattcttcgacacgcgatgctcggaaatgtccaagaggttgtggttgcctacagagaccgccttgcaagaatcgcgagtgacctcgtggaatggatcctcacaaacaacggagccaaactcgtggtgctgcatcaggcagtggacagccccgaaggagaccttgcagaggacctcatgtcaatcgtcaacgtcttttgctgtagggcaaacgggcgcagaaagtactcggaccaaagcaaagaagcctccaaaagaaggaaagaaaccccaagcgacacactcacggaaagttcgcatcttcccttgccgtgaagacggagagaagctgacgcaatggatgggttgccatcgggtcgtatacaacagggctctggcgtttgcaaagaagactggtcaacggaattacgcggagatgggcaaacggttcgtggcgtccagaaacatcgaggagccgtggttgaagcaatgccctcaggtcatccggagttgcgccgtacgtgacctcaaggccgccttcgacagcaactttgccaagcggaagatcaacccagaacacacatttgacgtcaagttcaaggccaagaaagacgacgtgaccgctgtgcgcatcgagcgagtgaacggtgcgttcaaggtgttggacgacggcaagcacgtctccttcttccccaagtcgttgaagcccatgggggtggaccccagagctttgcaaggcatcgtgcttaaccacgacatcacgctaacgaaggaccgtctaggcagatttacgctccatgttccctaccgtcgcgaaaaccaagcgccgaaggaacacgagacatggtgtgccatcgaccccggcgtccgcacgtttgccaccgtattcagtccagcagacgcctgcaagattggcgatggagccgcgacgagactggccaagttgtgcgcacacctcgacaagctgatatcggacacgaccaaagcctcgggcctccaaaggagacggaggatgaagaaggcacaagtgcgtgtgcggaatcgcatcgtacacttggtggacgaactccattggcaggcggcttcgtttctgtgcaagcactacacggacatcctactgccagtgttcgaaagccagaagatggcttgccggctgtcgaggaagatcggttcgaagacggcgcgctccatgctgacgctgagtcactataagttccggatgcgcttgatccacaaagcaagggagcatgggtgccgcgtgcacctttgcacggaagagtacacgtccaagacctgcacccgttgcggcgcgttgaagcacaatctgggaggtgccaaagtgtacaggtgctcttcgtgtatgctacgaatcgaccgcgacattgcaggtgggcgcaacatcttcctaaaaaacgcggtagctcttgattgagctgcctttgcctcgttagagcctcgtccaatgtgacgtgcagaagactccccctcatgagctgtggccatcgagtcctgtggcaacgcaggaagctgtgaaagcagtaatgactgacgggcgagcccagactttatgttgaagtctgtgagttcttgagttttaatctagcggtaacttgcgacatgacaccacgtcgagctgcttgctcaacgttttgcagcggtttggggcggtttacagtgtgcacatggcctttgccccaactcccaacacttatgacggcatgcgacaccaatgggcgatcgtgaaatttgtggatgcctctgccgcccacgatgccagagcatgcctgaacggccaggtgctggacagcttgtgctgcatcccgctcaaggtggccccttatgtaaggaaaacctagcacaacaggcggtacagagcccatcgaagtggccacaaaagcagctcagacatctttttcgcacttattcaatgaaagacgtggctctgatccaaacttttggtggtgaggcgtactgcatcgagtgcagctcccgcatggtgccggtggcggaattgtcagtggaggaaatcgaggcgctgaagaggctccacggaattgacggagcagatggggccgaggacgaccttgacacgtacaaggcgttggaagctcggctcgggaaacctgtcaggctcctggctgacgttgcccgtgacgtgcgcattgttctgatttgccaaatgtactacgtgtaacattcaatgtactatgtgtaacattcacggaccacggaccagtcccttgattttgttggttaagttgctgggcagcctcagcttggtggccagctggcgacgctgaacagcccagagctgctcgcacatgtggaaagccaggcgaccgagcaatttcgccttggagcgttcagcccgccagtcgtctacaagcccgtagtcgtcgttgctgttgctactgttgttgctgtttcggttgcggaagtagttgcggtttgtgttttggggttcaacaatggcgtcgagcacgtcgtcgattgcaccctgggactgcctgtcgacacccgagtacgcgcccctcaagtcttgcaggctcttgcgaatttcgtgtggagactgagggcgcatcatctcgttgattgcgaacaccgcctgcgcgtatgccttgaaaggtcccttgggcttgttcagttcctggcctgcgtaactggcaaacccaccccagaatagtccgccggtgacgtaccccaagagtgtctcgtaccaatgtagatcgccgttcaggtatgccttttccaccgtgagccccagtgccttgagggccgacacgcgcttgcacaagtcttgcaaccataggatgcggtgcacctgcgtgtagttcttggggactttcaacgcggccctggtcactggcttgcctgtcgcgggattgacaaagtactgcgcggcattgaggtggcgtagttgccacgcgttggccttggacggctcacgtttgtgcaggttgccacccggagccacgcgaagccgttggaactcggcctgtgtcaggttcctggaatgagtgaccctcgtgcccttcttggctccggcaacggtccacgtgtaccttactttgccacttgggacgtggttgggggctgtcagcctgggtttcttccgcttggggggcattggcttacgcaaagaatttaagtttgaccgtggtttacaaacacaatgttgtctacaaacacaatgttgtcgtcatgacttcgtgaaagcactcgggcagggccgtgatgatgtagcggcgttcgttgtacggccccggtggtgcacgcgaaatgaacgaagatatgtctatcagcttgtcaagcatgtcaggaacgaggtgatctcgtatcggcacaaaaagatcgtggttggttccccgtgcgtgcaccagcaagtgacccgggctgtgaatgacagcgaacaggcgttccagctcgtccccagcaactttggccgcttccgcatcctccagccgtgctgcccgaaacctggcttcgactgcatccaggttctgcctgtactcttcacacagagcactgtccagttcagtgacgatcgcctcgacgagagctggatgggtcacctctgccgcggctcctggtgttcctggcattgcgagcgcctcgacgaccagagtcgtgcccgttcctgccaatgttgtcgtgaacattgtgtgcaggttgtcagtggcccggccaaggaagttgaactcccccagggcttggcgcatgctgacggtttgcggcggcggcgaggctcgggtttccatcctgcaccggaacgcgcgggcatgtgtctgaacgcgcgaaccagtccagttcggtcacaagtcccgtgcgcaagctcacctgaggtgcgtggaagaccaatggccaactccttttacaacgcggtaaacaaaacgggttgccaattttcgggcacgaaccttgaccctgcagggccccgagtttgaacgggttgctgttctcagcgcgtacttttacttttgtcgtactgccaggtgcgatatcgcggtgaatgtgagcctgccagagacttggcgctgagcttgtacctcctgtggctgcagtttgaagccaagcatagccccaggtgactgcagtgtcccgcgacatgggctgcccgcgagagcggatctcacttgtgtggcatgcacgagctgcatgctggtttgtcgcggcctgggcgctgatctgggcccctttggtgcatctggagcagggtgcatctggagcaggggccttgtctgtgagttttcggacaccgcgagacatacaatcttcacatcggacctctacaagcccgatttggtgcaaccggaggtgtcctggtgagtcatgcaccacaacaattttcactcggtgcagggaacgcctgtgggtctgttcgtgtggtaactgcagggtgagactcgcgcggcaggccgtgccaggtgcccggtgctggtaccctgtttcgactttttggccgttgccgcatcagctttactcacatgggcacatacatgatcctcatcgcaggccatggccccacgttccaaagcagacgttacccccgtgactccaggcaaatcctgttgccagggactcaacgaggatggtagtccatgcccccaaccggccaagtacggcgatcggtgccactcccatcgtcagacacggctgtgtgagtcctacactgcagagggtcgcccttgtcaaaacaagacgagggttggccaacgttgctggcgtcacgtgctgaagttccatcctgctcctgccaaccctgtcgcctcgcctcccgtcatccccgtcaagcccagcccacctcctgccaaacctgccatgcccagcccgcctcccgtcaaccccgtcacgcccagcccgcctccaggcaaacctgccacgcccagcccacctccaggcaaacctgccacgcccagcccacctccaggcaaacctgccacgcccagcccacctcccgtcaaacctgccatgcccagctcacctcccgtcaacccggtcgaccccgccaagcccagcccacctcccgtcaaacctgccatgcccaggctacatccagtcacacctgtcacacccagccagcctccacccaaccccatcctgcccagcccggcgcctatggacagcagcacccggcgattgttcaagtgcgaagcaaccctcgaaggcggtggcccatgcacacatccggccaagtgcacagggttctttggcgatggccgtccatgcacatatgatgccaagtatgggaacaggtgtgggcaccatggcgagccgaagacgccgctgccagtgctccctggatcccccaggcggcgctcctcaccacggcctcgtcgggccccagtgtgcgatgtcacaaagatcgagacgaggaagggagtcagcgactatgcccagctcgacgccattaggcactttgagctcgtcagcgtggaggtggcaggggtcagcgactctacaggtgacaggtacccaaacggctgcggcaagggcttgagagggtggttaaaggcttgggcaaaaacgacagggcgctcttttgacacgactgagtgttgcgccgaagggtgcatgcagctggccgagattggtgcacatgtgtggaaattcgacgaagcaactggcaagtatgagaagaagaggtgctacattgtgcccgtttgtgacacgcataacagcaaaaattatgaatacccccgtcggtactttttcacccgccctaacaccgcgtttatgagcatgcatcctcatgagtgctatggtgactattctattgattactaattaacctgtgcgccccataagtagcacgagcagtagcttggactctgcggcaccagtggcggcaccggtgaagtacacaatgttgtacagcatgtgtgtcgctggcctgcatacttcaacgtatgcgtggaataccactaaagccttctagcgaagtaagcgattttgcgggaccggttcgcgaagtaagcgattttacgggctgtcctcaccgcaagtcgaaccgcaacaatcgcatgatgctgaggcgtgcaagcgcatgtgctatacaagtgccgccgctgctgccgctgctgcctctgccgccgccgcatgtgccgccgcgtctgttcattcacacttgctcacgcccgttgccgccgctggcctgtgtgtgcagatggcggcgttggaggtcagtggtggcagtgtgctcgtttgcaggctgccgcccctgttcatggcacagcggctggtcggtatcaatgacgcagcagccgcttacgccgccacacagtttgccttgttttctcacgcggagctggagccacaccttgaccacaccgtcgtctgtgacccccccgccacctctgtggacgacgtgtgggctcaagtgcggcacgacggcgacctggtgcctttcttgatggtgtgcggcagcagcgacaatatgtatgtgcgtgcagacactcaccacaccctcttgttcgtgacccgggagccgtgactcttgttacacacaccacagcgtcaaatttcaatggccttgaagtaacggcggaggtctttgcaggcgtcccggccatgagatttccagtcagcgtgttggcacttggaagaacagtacaacgcaagataacagccagtgcaggtgtgcaacgtcggttcaccttcggaagggcagcctgtgaagttgcaccgaggttcaacgccgacgtaaagctgccgcgcccggcattccttgtactcagcccgggtgttgaaggcgctggccacaatctggcggacggaccctgtctgcttcgacagcaccaccatgatggcaaagtttgtgccgggccggttgccgttgctgctgttgccgtcgccgttgtcgctgccgctgccgttgtcgcctcgtatgcctccaaagcagaagcgcactttgtgttgcgagggatctgaagcgagatattctgccacttcatcgcacacaacatccacggtcaagagggcttcctgcgcgggtgtgaaagtgcacaattcgactgtgccatgcagcagctcgcgattgacaacatggacaactgatgtctgtgtggaagtcattgcgaaaagtggctcaggcaaacgatgactccccataatatatggtcgtgtacctcttgtactggtacctcttgtactggtacctcttgaactaggtcgaaacaacagggggactcggcgcatcggttgccaccgcaaatctttcgtgccacggtaagcatggatgcatcttgctgaagcggaggcctggctgcattctcgcgcggagcacgcacaccacgcggagaacacacattcagacacacacacgcctggccccgttgtttgctgcaggctattcaaccatggccgccgccaccgccgccgcctttgtcaccctccccgctgaggtgctgttctgtgtcgcacagaagctgccagtcctcgagaggcgtcacctccctgccgtctgccagcgtcttagggccctgtctcggtccgagtgcttctggtctcacggcgatgactcgtcagtgcggctggtgtacagttcgaccgaccgcttgaaggtgctggcgaagttcctcagctccttggagggccccatcacatggcgcagtctggagctgcaaataagatgccgcgtgagtgggttttgggcacctgcgccgctgctgggggcagcctgagccgctgctggggacagcctgcgccgccgctgtgccccttagtctgccgtcgacagcgtcttgccgcccctgcctgcaggtacctgacctggatggctacctcttgagcctgggcgtgtcgctgccctcgctgaccagcttgcaggttgatgatttttgccctggcaatttggcccccggtgtcgccgtctcaccctggctctcgtctttcgtcaagctgactcgcctttctatcacagggcttcctgttctcttccaaggccgcttcccctttgctgcgactgcacgcctgaccgagttgacattacgtcgcaccggcgtgtgccgcacctgtctgttgcaacagctctctgcggtgtgcacgctgactctggactctgtctattgtgaagggcccattgtcccagtgtctatttccagtctcacctctctgcgctccttgacgctggtgaccacgtctgatgagtcggtcattgtgcctttgaggtccaacttgccgtcgtctcttacagctctgttgctgcagaactcctacacacttgccgagtatgggccagccgatgtcgctttcgacaccttgcccctgttgcgtcaccttgagcttaccatgcatgctcatttctcacccgacattgattggtatcagtgcttgcgtcacctgacgtgtcttcggctcgtcgctcacgatggccagccacagccagtcatagccgtgttgtctcgcctcaccgctctgcgctccctgttggtgaggtatccccacagtgtttctttggacctgactttgccgcccaacctggccggcttggccctgtggggtcgccgtgattcccttgttgatgttgagactgagccccaggggatgtgcagcattccagccatccgccgctctgcacctcacctttcccacgtattttttatgtacgtgtatctgcgagtgagtcatgacgacctcaagcacctcatgtcgttagatatcgagattgaaggtcccgtgaaatacttcacgtacatgtaattcagtcgacgctgctggccaggtgtcaatgtggtgccatgtcagcggcggctcatgttgaaagtccaacccaagtccgacgtgaccccatttgttcattcgtttttttatacatggagcccatgagtgcagcacagctccagactctcgtggaccaggccgtccaccaggccgtccaaagcgccatagctccaactatcccaccctcgcctcgtttgccgtcctgccacaggtctgctcacgcggcctaccagcggggtgattgttacaccatcacatcgacgccgccatgcaggaacgtttccatgacgacccctgctgagcggccgagcatctggcgagtgatcacggacattcttcatttcagttactcatgcaaaatcacatgaagtccagggagcgacgagtgtccacacgcacatacatttggccagcaggctcctcaaacggggcgagcaggaacggcacaaggtcaccgccgtgccccaccagctgccacacatcgtccaccgaagagagggagggagaaatgtcgacaatgacgcgcacttcgtgtggcacaagctccgagtacgtgaacacggccatctgcacggcgtcgtatgctgcgtctgcgtctcctacacctagcaacctccccgccatgaacagcggcggcaggcggcagagcaggatctgtttgccgctgactgtgagcggcgccgccatctgcaaacataataacaacaaagtcttgcgctaagcgtgccgtcaagtctcttgttgcgcgagccgtcgccgggcaggcagctgcagcagcaagaggcccacgcactaccctgaaaccgctcacctaagaattagggtcgttcatatcgacatttgtaagcccaagtttgcgctttcgcgatactgtgatttacttttgtaccttatgcgctttactactgtgtactttaatctgaaaggaggtcagcctgttagctattgctcgttgttatctcgcgggacacctgcggagcgcacgcacagaggcctactggtgagttcgcgccctgaaaatctccacgctgctgaagcgagccgaggcacgcggcaacaagtcccgtcgtgttctcgctgtagtatactcggtttgtatccaggagcacgcaggtggacgcggcggttcagagtcggcctgttgtgaggccgtggctggccgcatgctgtttggatgggcccgagcgaccagataacgggattgtctgattgccccgcgttgcttgtcctggcccctcttctggcggcagcgcgtgccatgtactggtacttgcatttcctgtgtgcagagtttacctcaaaactccatctgccgacctcatccagactctggaatgtctggaatatctctgccaaatcaagcctcacgtgagtgccaagtcttgcaatcacgtgggcgtgcagaccagtgagttacagtgtgctacacgctggctggtggaagcttatgctgcccatgtgcctgtcaccgtaccggtcctgacggctgcagatgccaaacgaggacagaaccaaccgatgctgtgcacacgtactgaatgtcctgcagcttgtcgcgtgtgttattggttggcttgcccaggcgatgcactccagccctcaggaatggttaatgttgggctctgttagtttccgtattgcatgtatcattgaactgacaaagagcctattgcaatgatatatgtgtccaatgcaagagtgttagacgtacatacaggtaactactcaaccaattcaatcggcacactgtgcaggtctggggcgtgacttgcaagcagtggtaggtcagacttggtcttgagtttagactcgtcggatcttgctgtgtgccttcacgctttcagccttgccttgccggtatagagaggtctcagtcaatcagttacaatcaccctgctggtaggtctagttggggtgcttgacgtgcttgctttaatgtccgcataaaaaccgtgaggcagtcatgaaggctcagcggtggccacgtcaagcactttagcaatgacagcagcattgtctcgacgtgcaaacacagcggctcaaaccgtgctaatggcagaagcaagcatgctgtggccgctcagacgcacttgggtcacatgtgtcttgccagcgcgctgccaatgagtatcttcgtgatcacgcacacgattcctaggatgagtagcaggctctgcttgctaccactggacactgtcattggtagtggcggcggcggcttccagtccgtgctaagcgtgttgcgactaccaacaccaaagtgcccacgtatcctttttgaccccaagttgacatctgaaaccgtcttggttgtccgtttgggttgcccaccgaggctgaggtgagtgcggagtcccgtgatagctggttggctcaaggcttcacttggcttgcgggtgcgattggtggcacagtggggtcttagggcggcctgccttgctgaaagtgccttgcagataaagtgcatcaaaacgtatctggctaggtctcgcggccagaaacgccccgagccctaaagcaggaatcgcggtgccaatgccggttgtaggacgctcatattttgggttttggggtctgcaagggacttgctgcgcgcgaagtcaagtaggggcatttgccttcgggcttagcagacctctgaatggatctgtttcggtgggttccctccaagtgccgcacttgttcccgccgctcggccgctccgctgctcct

SEQ ID NO: 103 - DNA, 7990 bp, unidentified
  misc_feature 1..7990: note = Fanzor polypeptide
  source 1..7990: mol_type = other DNA
gagttgaacgtgtcgggtcgcgtggacagggagtacgcgaagcacggcgttccggacgattgcagcgacacggacatcacgtgcatcctgggcccttgcattcaattcatcgcagacgcccacgccgcgggaggcatcgtcttggtgcactgcctggaaggggtcagcaggtcggtgtgcgtggtcctggcatacctgtgtgtgtctcgtggcatggcgttccacgatgcccacgcccgtgtgcgtgacgtgcgcccacacgtcgatgtgtttccacagtacgaatccgacacgaggcgctgggtggcttcgaagtgcaatggcgagtagagatctgtgttgctcgttattgttacatcagtccaatggtaatgttttcacaacagttgtcacggcaactagctgttgccctacgtccccaagacggcgcaaatgctcctccaacatgcgcttgaggacgctcaaatcttccatcatgccgctgcggcgcacgtgtgcgtattcatccaggtcttcgtgatatctcagataccgccccaagtccttaacagtgcgagcaaacatctccagcttttctgcttgatacaggagctcgtggcccgccattgccagcgtgtgcactgactccttcggcagagtcattctcaaagaatgaacaacaccgcgcgacctggcttttatacctggcttgtgtaccttgccacgctgagtccacgttggcacgccagcactacgcaccgcgacgcgtggctcgaggcgtcgaggaaaggacctcgtttttgaataccttcagccagttcagatgttgcttccgctgttcttccagaatttgcgattggaactctttgttgttgttggcgtgcatctctgcaatgtctgcggcgctgattctatcgcccttgcgagttttgtaccggggagatttcagctcacgtagcagctcataagcacgctgctggaaatttgcgttgtcttgtggcccgcagtatgttgcaatgtactctatatggcccaggttttgagcgagccgtttggacacaaacttgctcaatggcgtgtagaccgttcctgtttccgaggtctcaatgatgtgccgcttagccagttgcagattttgcagtctgggtgggccgccggatccgtgcatgttccggaagatggagcatgcaccgtcttcgggtggacatgccacgacaaggagtgccatccgctcgttgtcgtggtagcagtccatcatcacttcgacttctgcttggcttcctgaagggagaactttcgtcttcacaggcttggtggtggtggccgactcgtcgacagtggcaggtgctgccttggccacagcattctcgacgtcgccgcctcctgaaaccagctcagagcgcgacgtgatcccaacatcaccgcatctcttctcttggtgtctcttcacgtgagactcgtggaagctcgtgtatgcacagttggcacattggtggacggtcgcgcgaaccacatagggtttgagactcatgatcttgaatggtggaggtgcctttaaacctgcagctgaccggctgtatatacggaagacgtattggacgggtgcgaagactggaacgttctctgtatagacagggcgtttgagcgcatcccagacatgctgcactcgggtaaagaggtgctgcttgccgtggacaacacgcatacgtacaaggaagagctcatggcaaaggcctggcaccccagccggatggtcgattggtgcctggacaccgaagaagcggcagtgtttcgaaataaaagtctcgaagtcgtgtaatgagacccgaatcatactaccgcgatgccatcaactctggaaaactggataagatgtcagagaagaaacgggatgagttcctgacggcgatgatgaaggacagcatgatttccgccgacgaacggttccggcagcgatccccggtattgcacgccttcaggccgttgctgacccgcgtcgccgatgagaccggattctcggatgcgctgttcagggccagcaagtaacttaaccgaccgatcgattccctccgaatcaaagagatccggtgcacccccagtcgggaatgtgccttgacacgcgcaagggtgctctgggcttcggatgtgtgcaaataattatggctagaagtgcttacgtgacacacacaagggtgcatcgggcttcgtgcgggttagtactccaaagggctcccgtgcgtgtctatggacctgtaattatttgcaccctagtgttcacccttttggtggtgacctgcggacgaaaataattatgaaaatccttttgctgggaacaagttgcgctcaaaccgagagacccggatcgcgttcccacagcaacaaccataagccgtaattattttcgtccgcaggtcaccaccaaaagggtgaacacttgggtgcgaataattatggctagaagcacgtacgtgacacgcgcaagggttgtgttgggctttgggtgctgtagctgtaaaacacgtacccgtatcttctggaattcttcataactatccgcgccttagtgttcacccttttgatggtcacctgcggacgaaaataattatgaaaattcttttactgggaacaagttgcgctcaaaccgagagacccggatcgcgttcccacagcaacaaccataagccgtaattattttcgtccgcaggtcaccaccaaaagggtgaacacttgggtgcgaataattatggctagaagcacgtacgtgacacgcgcaaggctgtatcgggccctgtacgtgtgagtacacgaaagcgctcccgtgcgcgctgctagcttcgtaactttgacgtagttaccgcaccggcttgatgggcgcagacgtcgcttagttcatggggtttaaaaggttctcacgtacgacctggtgtttgtcgatgccggtgaccttcgacagctcggtcgcggccaagtacccgtggggccccgctggcctgcccttctccggctggctgccacgggtcgccgacacccacactctgccggccggcaatctcgctcgcgtggacagtgcagcgcgtcataccggcccgttcaggatatggcgagggagcgcccatgtggaactggactggggggagcacacgtgtgtcaatttgctggagctgcggttcgccaacccccatgggctaccgctgcaccacattgttcatcgcgtcgccctggagatcggcatcagctgcgtcgatacagtgtaccccggagaacagctcgactggctgctggagcaccacgcgcgcggcccggtcacaacctcgtgcgggaccacgcgggtcccgctgccgctcggtggcacccacgctgaggacctcctgccgttggtacggcaccacgtggccaagctgaaggtcgatgtggcagacgggcacagcctcgagcacgcgcacttggaggtatgggcgatgtgctacaccgagccgtttggcatgcccgtgccagcgctgaccggggatcacgggccgccggcgcccatcgagaacccgtggcgggcaggtatcgctggtgcagccacgacgggcgcgtcgacccgcatctccaccgtgcacaagaacgcgtggaagaaccccgcgccacccggcaagcgactccacgtggtgcgcttctgggcgcccgcgtcaatgaccatcgaatgcatggcagtgtggccggcagacgacgtcgcgctcctcacggtgttagcctcccccggggtcccgcaggaggttctggccacgtgggagcccgagccggctggattcgaggacccgcgcgtgcgggcagcagcgggatgtctgagaatgctaccgcccgagctggtgtcgcggatcgtaaggccgctgttcatgcgcccggagccccgtgccgtcatctcgttctccacgcccgtcaaccccaacacggcaaacctgctggtggagctgcagttgagagaaggcgtaccagcggacacgaacttcggctacgcgaccattggcctcaatgccatggtgtttggtgggggattgttcggcctgatgtacggtggctgaggcggggaaccacgggctccatgtgtgtgagcgtgtgtgtgtgtctgtgcgtgcgtgtgtgtgtgttacaggttcaggtgtcatatttgctccaaaaatggccctgctcggctgggactgtttgccggaatattccaaaaaactatggtcgcatgccctcgtgacagcttgagctgctttcaacgccatgtcgccacaccgtacccaccactggggcttgagcataggttccagcacgtctcctgacctggaacacacagctcccctccggacacaggcgctacgacatctcagacgtacttgccacaagcacacaccccggtgacaatgccagcctcaagcgaaaattctgctactgcagagtctccaggaaacaccaacagcacgacttgcagcggcaggtcgagtacatgcgcgaacgcttcccagaacacgagatcgtcacggacatcgcttcagggatcaacttcaagcgaaagggcctgcagaccattcttcgacacgcgatgctcggaaatgtccaagaggttgtggttgcctacagagaccgccttgcaagaatcgcgagtgacctcgtggaatggatcctcacaaacaacggagccaaactcgtggtgctgcatcaggcaatggacagccccgaaggagaccttgcagaggacctcatgtcaatcgtcaacgtcttttgctgtagggcaaacgggcgcagaaagtactcggaccaaagcaaagaagcctccaaaagaaggaaagaaaccccaggcgacacactcgcggaaagttcgcatcttcccttgccgtgaagacggagagaagctgacgcaatggatgggttgccatcgggtcgtatacaacagggctctggcgtttgcaaagaagactggtcaacggaattacgcggagatgggcaaacggttcgtggcgtccagaaacatcgaggagccgtggttgaagcaatgccctcaggtcatccggagttgcgccatacgtgacctcaaggccgccttcgacagcaactttgccaagcggaagatcaacccagaacacacatttgacgtcaagttcaaggccaagaaggacgacgtgaccgctgtgcgcatcgagcgagtgaacggtgcgttcaaggtgttggacgacggcaagcacgtctccttcttccccaagtcgttgaagcccatgggggtggagcccagagctttgcaaggcatcgaactgaaacatgacatcacgctaacgaaggaccgcctaggcagattcacactccatgttccctaccgtcgcgaaaaccaagcggcacaggaaccggacacgtggtgtgctattgaccctggcgtccgcacctttgccaccgtattcagtccagcagacgcctgcaagattggcgatggagccgcgacgagactggccaagctgtgcgcacacctcgacaagctgacttcggacacgaccaaagccttgggcctccaaaggagacggaggatgaagaaggcacaagtgcgcgtgcggaatcgcatcatacacttggtggacgaactccattggcaggcggcttcgtttctgtgcaagcactacacggacatcctactgccagtgttcgaaagccagaagatggcttgccggctgtcgaggaagatcggttcgaagacggcgcgctccatgctgacgctgagtcactataagttccgcatgcgcttgatccacaaagcaagggagcatgggtgtcgcgtgcacctttgcacggaagagtacacgtccaagacctgcacccgttgcggcgcgttgaagcacaatctgggaggtgccaaagtgtacaggtgccctgtgtgtatgcttcgtatcgaccgcgacattgcaggtgggcgcaacatcttcctgaaaaacgcggtagctcttgattgagctgcctttgcctcgttagagcctcgtccaatgtgacgtgcagaagactccccctcatgagctgtggccatcgattcctgtggcaacgcaggaagctgtgaaagcagtaatgactgacgggcgagcccagactttatgttgaagtctgtgagttcttgagttttaatctagcggcccagatgcagacgacaacactcccggcagggacggcaaacgtcttcaaaccgcccggaagcgaatgtatggccgctcggagctctccggatacttcttcggagaattcggtttccagcgattcccacagcttgcggtgctcgtcggtcacactcgcccacggcaccatcaacggctccggattgaaggccgcgtgcatttcggcggcccaatctcccgtggacacgtagagcaagtactcgcgaacgtgctcggcttcggcgatcgcccgtcgttggcgcttggcttcccgagcggcggccctctcgagcgctcgctcggcggcggcagcctggcatacttccgtgagagacaaagacatcgagagaaaaaaaagtgcccgaaccataagccgtaattattttcgggaggtgcgaataattacggcctacgtggcttagcacgcgcagcacgggcctacttgaacagtcggttctcccgttcttacactttgcaatgtctgagttcgcgttgcttgtagagcacagcacggaaaccgtgttttacctgataccacaggcgcagcttacggaccccgacaggtcgttgttgggcaggctgcacggcaccgatttggacaatgacgggcaaacggaggacaaacaagcctacgagcgtatgatgtggcgattcgtggactgtggtggcgacgtcatctacttgccccgcggtggaaccgtcacgctcgtatgtcagctctttgtaacaacttgacagctctttggaacaacttgacagctctttggaacaacttgacacatggacacaattcagtgatgcgtgtggctcgtctcgctaccggcaaggcttgctgtctctgaggtgtcagtcacgtcagtctcgtccgtggtctcacgagtcaaatcccgggtctccttggggacctcgtgtgcgcgatcgttgttctggtcttgccgcagcttgtacttgccagtgtccttgtcaaactcgtacttgccattgtcgtctcccagctcgtgcgtgatggtgcggccgtagtgcaacttgtagagccagcccagcgtggccccatcagccaggatcgtgaggaacaacccggacagcgctgcgtcgatgggcatggcaccgtaccaagagccatacttcagctgcaagtttttcaagatcacgtacaatacgatgtacaggaacgcccccaccaggaatgtcctcgcgttgcgtttgccgtgcccaggttcctttgaagcaggcaggaacgagtgacacgcataccacagcatgtcttggctgttcacgtgacaaaaggaatccgtatttgacgcgtggtaattacatacagacaacacgtggatgcataccatgcggcagtgtcaatcggctggctaagtgatcccgttcaaacatggactccactgtggcactggccccgtacacctcgaggtccaacggtgtggttgtgcacagcatgggtgccgctccaaggtcgctgcgcagcttgatgagctccaaggcttgcgcattgatgcatttcagggcgggcaagggctgagccagcaacagatgagtctgcgttcgtatggtgccgagcttgcggatgactgtcagctcttccagcctgctcagggtgcccggccggtcgagcaccaccactccactgacccattcgcggtcttggtaatagcaagatcccagtaccagtctcttgaggcggggcgggtccacgtccaacagggccttgatgcggactggggcagccggggcagcctgaacggaccaagacaccgctcagaccaccactcatagcacaaccaggacagcccgtgttccaatgagcacaacgcaccttccgtctgttttggcaggtgccccagtac

SEQ ID NO: 104 - DNA, 20951 bp, unidentified
  misc_feature 1..20951: note = Fanzor polypeptide
  source 1..20951: mol_type = other DNA
tttttaggaggtttaggtcacaaataatattcaaatacacttcggctgtgggatcaaagatatgtagcagcttgttttacgcgtggtgctaggtctaggcgatcgtgcaggtggtcggaaaagagggggcgttggaggggggggcagggggggggttggggggaaaatatttgaaaactacgtcatggatagtcagaaagataatgacgtgatatcaactgcgtataggtgtttattactcaggccgattttgattgtgagtggggcgtttggacaaactaggcgtatatatatgaagtatatatattctgttttagtatcagcatcttcatcttttagtatcagcataagctttccggcgctttcaatgtatattcctgtgttttgtcccactgcaagaagatatgttccctgtattcggcacatacatacatacatcctgtatttttaactttaaaacagagataagacttgcgcccggcgttaagatccggccccgaacaaaaataaggtacctttttaattaaccatgacccaagataggttgcattagtctgccaaacgcaccttctacgcctttagcctctctccaagtactcactaacctactctaccaaagtacgcacctactatggtttccgtcaagttcccccccccccccatccccaaccaaaaagcaagacaaaagcgaagaacccagatgagcataaaagattagcacgcatatatacactatatacatacatacattgataatgacaataccgcacttgcggcgtggccccgatcctcccatacaagtaccctctatttcagaccgattcctgtttgaatctcttggatggccttccctcacaggcacctcgtaccctactctctttgcaattcttactcacagggataggcgggttgcgcagccccgataaattaaaaggatcagaagggcggtcatctgactgcaccagcgcggacatgtcgcgacaaaacctatcaacaacttcttcggccttagcaaggaagtctgggtttttccgatccacgttgtcggtgcccaacttaacgctagcagtgcactttgccaaccagttcgcaaaggctctaccacgaataacagagaccaagttatcgggtgaatcccctccgtcacttccctcaccgtccccaaaatccatctgcctgtcgtccgtgaacccgccacctaacggtccacacccttcagcatctaattcacgcagtccccaaagttctacactccaggcgcccgacgtggcccgccaacgcgggtgaatagacatgccactaaactccgccggacgccgtaagcagtaaagaagcacggccatcaggtgtctacacggcaaacccgtcctgagtatctgcaaacacgagcagagttgaaaattgttcggcccaacgacaacgatgtgacctacctgtgggtccctcattttgtacaaaactttaaccaccgtgttgatctctacgctctcgaccagcctagcaaaaacaagcaatgaagttgtgccatacattgtggtatccgtgacgtcatcctcgacaaggctcgttaccacgctttctggcagctcacaacaaacatctatggcctcgccgtcctcttggcgggtcgccagcgcattcaggtagtcgagggcaccagctccttccgtcaagatttcagttgaataggctgggctcgcgaaaatctcgttgatcacctcctgtacaaggtgacgtaaacaacggtcgtcggaaggaacatggacgttgtgcgtgaagggggtggtggagtctttcaacagcaaggccttaactcaaaccaacccccctccccgttccaccgctatcggtccaggcatcacgggtcaactcacctctttggcatacttgctggcgttgactcgttctagttctttttttattggctccccggtcttcatggcatcagcctccacgggttctttcccgcagaatgtccgccttgtgctatacctgtagacgaaagaacgtggaatagcgtcggttacaacctcgatacacgcatcggtttcatgtatccacgagttggatgcttggaggaaaatttgccgacgcagtgcttccggggggcggtcggctttcgaaggacccatggggcctgcacaccgctatatttcgagcgttcaacagcacgagcgaagtactgcggccaaatatcgccacaatacagcaacacttaccaccgagactgcagggccaatttttccgccaccctttccgcctccttcttcactgccattagactcgagcgtttgttgaccatgcgtccgttcttgatcacgctgaagcctccctccacacgctgagaagctgtcatgttcaacgtgagtgtcgttggatgatagcagcgtgcccaatgcttgcggttcctgtgttcgtagtggcacatccgagagtataagagtggcgcgcatgacgacggcacaaggggagaagagggcggccgcacgtacgcaggtacccactccttggtacagagtgcaccggacacgatccaaccttttcggcgctccttatacttgcaaaacaccgccacaacaactcacgtgtacacgtgaccggtgatgtaactttcgcacttggtgcccttcacgagattcgagaccttctcccaaatcgtctgaaacgcctgtcaagcgagtacgtggcagaaaaaagacaacgatcaatgagagagagagtaagtacatggatgttggaagtaactgcagcagcatgtgcaacatacgatgccaccaaaaacgtatatggcgcggagcagccaaggtaactcacagtgtgtgatgaagcgaaagaagccgcacggtacagccgaagcaactcgtcacacttctttccttgcagcgccccctggcagtttttcttcaggttcttgttcatatgccacgaggaatgcaggtgcgttgtgttggacagacgagtgcctaccgcactggtcatggcatggtcggcatccgttaatatcacctgtggagcacgaacgtgcagatatggaacatgcatctcggtgtttgtacacaggaaatcgaaaaccacataggccgagaagtggtccgagacgtaggaaaatgaccagtctgcccatgcatgtacactatttcatagcgctttccatcaaagcataccaacaccaccgcactttaaagcagttcaacgggatttcgaagacgatagcggcacaggagcaggagcccaccttagggtgcccgccacaaatcgcgattaaatggtcgatggcaaattcaaaagacggtatctgctcgttggccagcagcccttgtgcgaagatggtcgtcttgttctccgagtcgacgccaacaacaaggcacagcttcatgttgtacctaccggcaggggggaatggaaatacgatacggtgatacacgggttggcacaaccatcctccatcgcatacagccatgtgcatacagttggcacgttgcccgtgccccaccgaaccgcgacaacctggaaggtagttttgctgcggaatataacaaagaggttcagccccccccgtccttgtcacgggcaaaaaaaaaatgcagcctactactgaacgagccagcatttcgatgcacacatcatatccagggttaagtaaccccccccccccaacgtatgttgatactgtcgctcgtcgcgtcaccaccgaccagatgtcggagttgagcaaaagtagccgtcataaccactaacaacgaccgcggtgctcacctgttcgtcagacacgtgttgtcttgtattaccacgccgccgaattgtctcgccgaaatctgttgctcggctgtggaccacatcaccatagccagctggttgaagctgtccattttccaggtacacttgcaagtggagtccttcagcaatgcctcgatgagcaagacggcatccttcgccgtcccccacgagttgcgcctcgcattggtggacatattcctcacctgcgacaaatggtcacggagcaggtacgcgcggtcgtgaatgcctgatataggaattctgtgcttagtatcccccctctccctcggcgatgtaagactggatcaggaaatagtacaaaaggtatggctatcgtgggcgcagcaacggcgttagacgtccagagaagctctagcaggaaaacgaacactgcgtcccttcctgtaatacgagagcagcggtcaaagctacgcgtacagagaatgcccccccctcccctgctcgaaaggatgcggggccagtggtcacattactacggcaagccacagctgtgtacaacacacaacaacaggcaccttgcgtcggcccggcggaccaagcttgaggggggcgatttccagctcgatcaatcggtgcatgtttaggaccctcactccccctgacgtccacgtcctgatctgaccctcccagtcccgttgaattgcggcaacatcaatcaagttgtcctggttcgcccgctgcgcaatttttggcacctcgcactccgggttcgtttgatggtcaagaatgacctgcgcaggcaaatacaaattcacatgatgcggaggtacaaatcaggccccttcgatctccgctataggcatacaggagccgcagatatgatgcattcaataaggattggtggacgaacaacagcgtgtgacttgcgatggccttgtagcaccagccacacctaaaccgttgttgctcgttcagtacaacgctcaccttcgttatgcgaggcagcgcatcctttgtccacgaaacgcagacctggaatagacagccgcactgaaaaaacgaacgagcgccccgaacgtgcgccgaagagacgacatagacgaaagtaggacgcgtcaggctgatggaaccaaactcaaacctgctgcacccagtgttgtggaacaacgcaagtctggtactacttgggctttaccttgacagaccaccccttcttcgagccggtgttgggtggtgccttgccggcgccttgacacttgatctcatatcgcccaacacgacttgatcccccaccaacctgattcgggattacgccggcgtcgtggggggttagcttcgaacacccgaccggaaacaaaaacggtgaagaaatacgcctcacctgtgaccgaactacagaaatcccctcgacagcaacgatgggataccctaatctacctagggctccaaccacgggcgccctgcaaaaacatactctcgtgctctattttgttcatgttggtaggcacctttttcccggtttttcggaacgttgcacccttgtggcctgcacgatgcaaggctgcacggatgccgcccaaaatcttctcccacgtctcctccggagtgtcgttctcatcaacgctgaaagagaaatctttcactaggtcgacgtgaatgtggtccttgtcgtcgtcgtcttctttgtctgcgtctggtatcaagaagcgttggggtttattgaattccaattatgcgccgaagatgggggggagtcgaacgacgacgcggtatagaaaacgtgtaccactccacaaatctcaacaaaaaagttcgttgagaaagcaccataggtggctggctgggcagtaggataacactttatgctacgatcgagacgtcatcgacttagagggggttttcgtctgcgcgccatggtcacggctgcggggcatccccattcccgtcatcaaaccaaagggtaattcctgcgctgggactcgtggctgtagggtcaatactaaatgtcgtcgcttaccttcgtcagagaagacatcgtcctggctgtcccagccgtctgtgccatccgagtccacgtcttcctcgctgccgctgctggtgtcatcggaatttcgatacagctgtggcgagtcgtgcaaagaagggcaatacaggaaggtagatctctagtcattatatattaacggccagcacgccaccttcatacccataccgctcgaacctatttttgaacagccaaaaccaagctgttcgggacatcctcaggagcctgcttccgaccaacgtagtccccacgctgccaacaaaacgggcacgtaccagcggggattcgaccacaggccaccagccacacacacattctgcagcgctcgctctgccttcttgaactgtttccaggcccgcgctgcagcaactctctgctcgccgcaggctttctcgcgatcgttggggccctcaatgccgtcgtctgtctcatctacagcctgttcgatagcatgtagagaagacggcgcgaagcacatcttacaccacacgatatatcggttatgcgaccggctccccgccaaccaagcacagcactacggccgggctcccctttttgcctttgcattttcaaccccaacacacgttgctcaccgcgaccaggctgttgagcttcttcttcgcctccttcgcggtggttcggagcgcctgtacgtgacgttcctgctcctcgcgccgcgccatctctgcggccgatggtccaggcaggacgctatcgtctgaatcatatcctggcaccaagccagggtgagggcatattgcgcgcgttactctagccagcgagcttttattggtttaaacaatgtgctcacagcacgatttttttttcttctctttacccctttcgtgtaccttacctccgcccatcgacaagtcgtcgtcgctgttccagttcctggctgccttgctgctggtcgtgctagagtcgctgtcctcgttacctgggtcaacccccccctcctcccccccgaacatctgcagcgcgcgcgtaggacggcggctagcgacgctttcatcgcaggtggtacaaaacatggttacctcgcgcagacctacctctctactcgtagatttcttatgagcgagcaagcatacacccaagctgccttctcccagaaagatgaatgacaagccatgcgcaacgaacaggtgcgcctagcgctggcacacggcaataataaatgggagcctgcaatacccgccgaaacccttcaaacataccgtatgcccgccaactacagttttcgcgaggacattctattggcaaccactacacccaccttcgccatcctcgtctcggttcttctcaattttttccattccttgtcgtacccccgccgtgcttttgccgccgccactcgtttgcgtaaaagccgcccgtctgcgagagatgtatcccctacccactcgtgtttgtttcgctccacgtcggcaaccctttgtcgatgggcctctgtcacagcctgtgcgtaattgatggggagatatgcaatcggatatcaatacaacttggttcgagtaacaacggcgaacggtgacctgacaggcccaacaacaattgaaattggccttcttgaaaccaaggcccagcaacaacaaaaataaaacagcaaatttcgagtaagatcaaacgccagcacacgacagcggcagttaacaaacaacgccccatcactcaccagcttcagcttgtgatacagcgtcttcgccttttttgctccctctctggcctgctcggccttctcaccagctgctagaagcgcttctgccgactcctgccgagctttctccaccgctgcctctgctgaatcgcccccggtggcccctccgtctcgccccttcccaccttcgcctccctcctccttgtcgtcctccgcacccttctgcttgtcgtccccctgcttggtgtttgctttcgccgccacggccgccacggctgccgcagcggccgcctctttaccgccatccgcattttgcctccgttcccacgcagctcgctcagcacgggtcttctgttcggaagcttcgtcctacacaagacaaaaccagcaaagcaaacggcggccaacaatacgaattggtggttagtgcaactatattctccattgttttgccttgattcaaggtacagacctacacgagccggaggattggtgacgtgaacagcatgtgtcgcggtgttaaagcaggaaggatagtactctcagcacacgcattgccgagatttcgacataaacgccgacggggtatggtgccacgtatggtgtgatttttcggcaccacacatactcactttgcaccgtctctcagccatgaaccatggcagatgaacggtattcggatgacactcacatgttgcgaaaacatcggcggagcaacttcgtgcatcggcaacggttgacgtctggcacggtccttgctcgctatcgccgcgaagtgcacccatgtgtcaacgccgaaagttgaatcagcatcagtcgcggcgatagcggcgagcgctttctcttcgacgctgtgtgcgcagacgtctgtcagcacgattgcgagctcttcgaccaccacatccccttcgctgcccatcccaccacgtaaggtgatgttcgtacggtctgttggctggatccaccgagatttgcggttgtcaccaaaatcgcaacctttcttccccagccccttggctggctccccactcgccggtccctttgccttcaccttctcccgcgctagtttatctgacgggaccactagtttcaccgctacaccaagcgcctcggcagccaaaacaacaccaaggtcgccacaccaccttttgtctcggcaaaaccatcctacgttctccatgagcatcccagcgtagttgtcacgctcgtagttggcggtgccgtacttaacgtgaatgtgggctgtgaagtacaaaatgttcagatgaagggggctaccctctcccaccagggcgtcgatgttcaccgagctccaactgagcaccacaagcttcagctgacgccaacacttgtctaagccccacagtgccttgctcaatgcgcgccaaaaacagttaccgtctcctgcaacccataacgccgcaaacgtctctcgcaactcaaccgggagggtcatcgttgccctggcgtcatatgcctgctcgcaatcaaggatgcaaggatgccacgccgtttgttgtgtgcgaaaacaaggacggagctatgttggatctttcccacgagagggttcactggtcaactaaattcgaaaccaaacaataccaagcgcaattaattagacacgtaaacattcggagaagtgaaccgcgtttgtttcttactttttattttgttgtctgtgactagcataacaacacggtatgaattatgtctccggatcggtcctttaaagaagtacggagtctccaaaacttccgcgagacgatggagaatcgcaggactcttgcgatcaattcagacaacaggagggcaccatcgatacttgctcgatgacatcgtcgcgatcagacaccgaacaaccaccggacgaagaatcgcatattgccgggtcagctcgtcaaaacaaaaagatgacctgtgcaggcaggtcgaatccttcaaagaaacacatcccgaacacgagatcatcaaggacatcggatcaggtatcaacttcaaaagaaaaggccttctgcgaatggttgacgccgttctcgaaggacgtgtcgaagaagttgttatcgcgcacagggatagactgtgtagattcgctttcgactttctcgaatggatctgcaagagggggaatacacgaatcgtggttcaagaccaggtcatacgttcttccgagcaagagctcacagaagatctcgtggccatcatccatgtgttttcctgcaagctgcacggaagcaggaggtacaagaacaaaggcaagaaagatacgtctcaaaccacaaaaggagcaggagaaagtgcttcggaaatggatgaactctgctcgacaaacctacaacgaagccctgcgactcgttaaggccaagaaggccaaacccaacccacttctgaataaactcgtcgtcacctcccgtgaacggacaagaactcgagactggaaagcatgaaatcgacaccggctgatgtgcggaagtcggctacccgagcccttgtgaagaacttcaagagcgctcgtgctgcgtacaaagatcggcttcagaaagtcaggtcgggaagggtgaggatcaagaagatgcgcaagtcggggaagttcaacgggagacgccgggaggaagccgttcgaggtgaagttcaaggccaggcgactcacatccgattccattgagctcgaaaagaaatcaatctctttggagagtaacatggtttctttttttggaacaagtaagaaacactcactcgaagttcaaatgagcgaggtgttctcggaagagtctggtcggcacaagccgtctcaaagctgtaggatagcctactgctttggcaggtggtacatcatcatacccgaacaagtacaggtcgacaaggcgaccatcgacacatctacggaaccacgtgtcatcggcatcgaccctggtcttagaacggcttttacgtgttcttctagctcgggagaagttcaggaagttgggatcgaaacccggaaccgcttcgagagggaacaatcgaagaagaactcaatcaccaagaagatgaaagatgcagcgtgctccaagagaaagagaaagctacggaaagcttggtaccgctgtcaggcgagagccaagcatctcgtggccgacctgcactggaaaaccatcaagcatcttttggatagatacgacgtcatcgtggttggaaagattggcacccaatctctcgtgtccaagacagggcagtctgccagcaacaagaggatgttctcgtacttgagccacttctctttcaggcaacggctgaagtacaaagctgggcttgtgagcaaagtggttgttgagcaggatgagtcgtacacttcacaagcgtgtttccggtgtggccaccttaagaagaatcttggtccagcaaagacttattgctgtagagagtgtggacttgtgatggatcgagatgccaattctgggtacaacatcatggtgcgctgtgcatccgagcaccatgcaacggaaagcatcgttctcggcaagcgcaagtcttagatgtgctaacacacagggcctcgtatacgctctttaaagtagcttaagcatgaatgtgcgtccagcgtaagatcgaagctctcccgaagctttagaagcagaggggatgagaatttctggcggtatccaattcgttttcaaatttggcccgttttaaataggctgtttgacaagggttggctacgtttggattgaaagctgtatacggcacaccggtgattcaggcaaaccatactgtaaatacattgggttcaaaggtggggtatccgtgcagacaccatcaattacaggagtgtcccttcagggttggtttggggggctcgggtcacatcatgaatggaaacttgttgtatgccggagggatatacaggcagcaacgccgtcgctaacgctcttcccctggttgctagcgctgttccccttctgaacggagtgacgaaaactaatatcaactcagcattgcctacctcatcttccatggcaatgacccccgacaaagctggcaccacgcctctgcgacagccgaaaaccttttgccaagagcaacaagtgccgacgaactcctccagcgtcttcatggcggggccgcctttcccttcctggcccaccacgttggcgatcatgctgtcaaggcgatggagtagtctccctgcctcctcgtctaacatcacataaccagcggcctggacaaacacggcaagcaaacacgccgccagtcatggcacacaggtcttagcggatagcagtagcagcaccaaatgacttttttcaacacaaccaaatgcctattcaagtacttacgattctccatccaaaacatgagccgcctctccacgcggccagccatggcacacaggtcttggtggatagtaacagcagtgtagcaacaccaaatgccctctttcaagtcattacgattcttcatccaaaacatgagcggcctctccatgtaaccttgaatacgaccataaacgggtttcatcactgccaggattttgaaatcacccacaggctacaacaagtggccgccgtccacgacacagcccatataaaacagctcacctcctcctggggggttgacgttggcaccgcggcgtgactgctgctttccctgccagtatatcatgttacaagcccagcacggcacaagtcagcattggtacccgctgtggagcaccacgggactacatgcacatactccagcatgacgaggaggagagagaggcgcggtatgtgtgaacctacagcagtagacattttccattgcaacgaacaccgtacccgtatgtgtaatcaaaacatgcgatgcgctactttagtctggcagtacatggcagtacatggcagtacatgcgtggcctagcgcggcacacacaagccttgaatgaagcgggttcgtgcgtggagaaaatgactgctaaatagatgtacgtggcatcatgtagacttcgtggtaccgcagtacagcagcagtagcaccagcagtagcagtattagcagtagcagtagcagtagccagtagtagcagcagcagtagcattagtagcagcagtagcagtagtagcagcagtagcagcagtagagtagtgatagtagcagcagtagtagtctagcagtagttgcagtagtagagtagtattagtcgtacatacagtagtggcagtagcagccgagaggtctgcaggggtctcattcaaacgcccccaaaacgcgcccgcgaccaagacctggacgcatttagtaccttccattgcaacgaacaccgtacccgtatgtgtaatcaaaacatgcgatgcgctactttagtctggcagtacatggcagtacatggcagtacatgcgtggcctagcgcggcacacacaagccttgaatgaagcgggttcgtgcgtggagaaaatgactgctaaatagatgcacgtggcatcatgtagacttcgtggtaccgcagtacagcagcagtagcagtagcagtattagcagtagcagtagccagtagtagcagcagcagtagcattagtagcagcagtagcagtagtagcagtagtagcagcagtagagtagtgatagtagcagcaggctactgctgtagtagtatagcagtagttgcagtagtagagtagtattagtcgtacatacagtagtggcagtagcagccgagaggtctccaggggtctcattcaaacgcccccaaaacgcgcccgcgaccaagatctggacgcatttagtaccttcgcgtctagaacaaactctcttgctttcgacaaatcaccggagacgatgccggcgtagggcgcgtgctgtgtatgttttggcgcgcgcaggtacatagtctacatcgactacatgtagatcttctatgttgttttagacaggcacatgatatattgtaagttatgtggtccgccgaaggaaatatccggtgagatcacactaccagatcatgaccagagcgtctctagacaccaggggggggggcaagacggttgtcgatggaatcttgtgtgcatccaagcgtgcaaggcacacttccccacacccacccttgtttgctgctggggacctccatctctccggcggcgtgtggaatgctcctcgatttctggctccgggacgctttaatttcgacctagaaggcgcgtacgactcgggtagctttgctgtctatccccgttgctagtctaccgctccttgtcgtgtgtgtggcagcagcagccagcagcagcagccagcagccagcaccaagttttcaaacacagcgaaccgtaatacgacggtgaaaacccgggtatggtcctcatatgtccccgtgggcgaggtttagattccgccatagtgtctgcgagattatcactcccccccccaaatagccccccaaatactaataataatgcctccagtttttggttgaaaccctcactgtcgatgttcggcgggagactgccgtacagaggacgaagaagatatatcgttggcccagcagaagctaacgagactccattgcgccaggctcctccgaagccctagtgccgcccatcgtgcgtggcgcatcaggtgcgaggaataaggtttgcggtaagcagattagctatgtactagaccgtacgtgcgtctagatccttttttgaaggacgcgcctgcggccacagcagcagcaaaacctcagcggatgcccctagcgaactcggatgctcaacaccatacattactgcatcgtaccgtacatagcttgcccgaccttgcgttgcttagtctcggaagggagttgggtgttgggttgggtttggggcgcacggagtggccgggcgggcctgggtgatgttgtactcgtggagggccacccggcgtatcaaatgtaagatcaagatcggatctgctgcgccaagatgcgagagggcatcggtgctcagccgccgctaaatcgaagcctggtatgcttaacagactctagcgttcgttagaccttgcctggggcttctcatgattctggcttgcgttcgtgccgtcttgtttgtgcgtcataccaggaatatcaactggtaacggtacctcgtatggcacgaaagcggtgcgattgttctgatgcacaacgtacctggtactcgtttgcactgggcgggcgtgtgtgtgaaaagaaatgaccggaagttgaaaattgaacattggtcgacgtgttttttgaatgaacgataaatcgttcattcacacacgacactccagcagcacccagcagcagcagttgcgctgaacaagggcagcacaaccgccaaaagggcgatgcagcactgaggacgagctcccgtggccctatctaacaaaagtcaacacccggtcagtcgagcacgcctatgggtccctcatcggtcacatcagagtttggacgtacgtagacttgcttatcgttgtcttgtccctgagcgggttcggttggtacacccatggcctctcaagatgtccctcttgaacacggcctcctccaattacttgcggaactgtccagcttttgtttgatctcttccttcacttttttttttagctgcgagaagtattttttttttttgcatacatttactttccagcttctggacaagccgtggtcacaggtgtcgtcccttctccccgccggttcatgccttcagttttcatcgcgcatagggtccagcagtcccactgctcgtcgacttttcatcgagtgttgctaactcacgctgtcgcgttttccgcaagccaagttgtgcacaagaagaagtccccacgaatttatacgagtatgcactcggggagattcgaactcacgaaactgacctataccaggctcgaggataacctggtacgccacccgggcgtttgattgcttccttcacctttttttttcagttgcccgaagtatcatgtcatgtcccagctgagctcagcttggctcatcagctcagttcagcgcagcagcacacagcgctagctcagcagcgcagcgccgtgccctgccgtgccctgccgtacgctgccatgtggtgcggtgctgtgccgtgctgtgccgtgctgcgtcctttgctgtatttactctatcattcgaggtatcgtaccaggtaccgaaactattaatactacacaaggtgtgtgcgtactacattgaatttgttgaaccacaagaaatgcactcccaacttagctcagcccagctatacgtaactcagcagcccactgccgtgcggtgccgtaccttgccttgccctgcggtgcggtgctgtaccgtgctgcgttgtgctttatttcgaacatgcaaaaaacggtgccggtacgtacgtgtgttctcgtatttttcctctcttcctttgattgttgcggtcctcttcatgcctcctccccccccccccgcaaattgcacccgtactgccgatcagcacgtggcatcgccaacaagcacgcagcatatcacaagggaattagtcctgcactagtagctattggcattatcaagtcgcgagttgcaccaaatcatgggccccttctttttgccccgttcacaatttgtggtgttcttccttgcgcgaacgtggcgggcggcgttagccgcccacggagcggagcctttgtatgctctactgctgcaccagcgcgcagtattttgtagtcgtacggtatcttaagagagggagtatcgtcgtaagcgaagtgcttgtcctcccaatgcacggagattaagtcaatattaatgtactttgacgaaaatacatgtagttggcgttagagcaattattatgggaaaaattgagctgtcatttctagatctgcgagtcggcacgacttaagtcgccaactatttactggtcgggccaacagttggtcgttttctggaggtgccgactgtccgactttttgggtttccatactcgtaggacgcattgtttgatgcgaagtgcctttttcttttgttgcttggcgggacctcctcggccgaggagggtctgatttggctcgcttccctcttctgacttacgtcggcaagtcggttgaccatcaaatgatttcgcaagccgactttcagattgacgccacctagttggctaacggcacctaccgattacctggtaatgtttagtcgtgaaatcctgccgactcacatgtatacatttttgtcatccaggcgtttgtggaaccccaaaactcgaaaaatttcaggccgaaataccgcctctataatgtcccataatagttggtcttttgtagtgttgatatccaatttaaatatatgtttccacaaaaaaagagtaaaaccggaaatgatggtgtacagctccttcttcaagtgaaccttcttcaagtgcgcatttattaattgcttggctgcagcgacagctctggcagcgcaacaccgcagtatcgtagcagtgctgcaatgcctacatatctgacccagcacgcagcaaccctgctgtctgtttcgcgtgttccgccattaatagtctgccagcaacatcccgtaccgtatccacttggcattgccactcacgcgataaaaaccagcactgccatgttgctgccatgaagttcaattgcacacacagaggttagcatcaacacgcctcattatcactcaacaaagtgcaggttagcgttggttcggtttcccctagacctctgatcgtcctctctctccgttggtaactcttcacgcccaatcaagacttcggaggggacaatatcaaagattttcacggatcttgacccggccctcgggtcgagttaggagggatttcacaaacccgcgggtcgagtggggtcgggccacgaggttttggaatctcgcgagtcgagtggggtcggatcaggtggttttccaatattacgggtcgggccgggtcaccctgattcgatccgacgcgcgagaagggatccgacgagtgaaaagccctgtaaaaaaagacgaaatcaaaatgacatgttcataacgttttcagcgtcgcctacgcgacgtagcccgttctactggggtaggggatgttatccgacccgcaaagtaaggagccgcgcgaaacgcgcggagcatcgcgatactcctatcatcccgtttgggccgtattaattttgagtaaataacacgagaagggcggtcttgccaccccatctgtctattagtaggaagagcgtgcaggccacacgtcgggcagatcatcaatcccgtcgtgaggatatagacgtcggacagatcattgatccccacttgatgatctagatatttcagaaagatctgtaaggtctgtagctcatgtggccgggtgggaaccgtacggtctgcatgatctaggtacgatctgcatgatctagcacatgcttgtggggttgaatttataccccacatgtgcagagcttgcacaacatatcatagccgcagctatagaatctactgtagattacatagatgatatacttcgaagtagatgatctagatcgtgatctgtttgagatatgcacaacatctcacaacggcagccatgtaatctactgtagattatctagatgatctagatcgtacagatcctgcacaacatctcacaacggcaggtatagaatctgctgtagattatctagatgatctagatggcctagatcgtgatatgcccgaggtgtggactcttcacaaaatcgcactgaccgtgtgtgtgatcgcaaaacatgggtccctcgagggttacttgtttgactgcaggaacagctcttctactagctctgcaacagcagtgctgcaatcctgcatgtgtactcccggcgcccgcgccaatctcgagaccttctctcgatgcttcacatggcctactatcaggatagtaagatgtcgcttggaaccccgctcagtaggatatttgtaaccctcgtcaaattgtcttgcgcttgtggttggcggcggccgcggctgtatgtatatatatatataaaacccgtcttcagcgatgtcgaaaggaggccgcatttgatattttgtggcggggtgtgtgtcgtcttcacgttaaaccgttgtttctacccaatgacatcagtacacctagtgtccgtgccgattcttcatcgtaggcagatacaaattgtgttgtcagactgagacagggtataccaaacaatcgcaattaatcaaggtaaagcaagtgaaatgctagcgtaccagatacgagaacaccaacaaaacgagccagaccataaaaatgtgaagaaaaaaaaaagacgaaaacagtggggggtgcaaattcgcaactcgcatcgtcataacaagaataaatgtccacgcgaacccggctccagcgatgtcgaagggggcccgtattttatatttttggcggggtacaaattagaaactcgcatcgccgaaacgacataaatatatcccaacgcgacaggtcccgacgacgaggaggaagggccaccgctaagccaatatggctaagtctatgggcatgaacctggcctccgggctccagggaatgctgaaggatgggcacaactcgtacgagggggtggacgaggccatcatgcggaacatcaacgccgccaaggagctggccgccatcgtgaggacgtctctcggccccaacggtgaggattgattggagagccgttgaggttggttgtgttgttggtgtggtgttggcgttggtgttttttgttgttgttgccgtttttgttgtcgctcggaacaccaacgcccagaagctagttcgccatcgtaagggcgtctctcggcccgaacggtgaggtggatggagagctattgaagtttagtaagcaccccgtgtttaagagctctcaatatgagagcattcgagactgcaagagcggtcaaatcggcatgtcccgcctatgctaacagctatgtttttgtctactacagacaagagcaatgtgtagttagagcgcctgtgtcgtcttgtcacgaggtgctcttacaatcggagtacccactgggacccatacaagtcaaccaaacgagcgagaagggcgtttttttctttttcccacgcatttgctttccagcttctggacaagccgtggtcacaggtgtcgtcccttccccccggctcttgccttcaattttatcgcgcataggattcagcaatcccactgctcatcgatttttcatcgagtgttgctaactcacgctctcgcgctttccgcaagtcaatttgtccacaaggaaaagtcccaacgattttatacgagtatgcactcggggggattcgaactcacgaaactgacctataccagtctcgaggataacctgatacgccaccggagcgactggctacgttgtcaaccatcggttaataccgtgggggtcatctaataaggcggtatccccatataaggcggtatcccgatgtaaggcggtccaaatcgcgtggtgcaactgggaagttgcgctcacaacccaaaatgaataaggcggcttccctcagtaaggcggtcatattgctctgaaataccaccgtcttcctgggggacccctacagtaagaagagcgtccagcggtacgaggatcatcaagctgcgccgtctcgtgtagctccttatgctgcagtcgcccccccgcccccgccccccagtcttatcttacatgcctttagattatccgccttgtgtcatccttgtcttatgcatgttgtccgtctggtcttacttgtctggccttaacccctttagagccccaaatccctccctgtactaacttcaagtatctttttcccccgaaagggtttccagtagtgaaggcgtcgagattttcatagtcttatcctgcccgtcttatccgtcttgtatgtcttatcttattcgtctactctgtcttatccgcattgtccggagtatgatatccgtgttgccttactttttttgttcttgcaagttattttgcgccttgtccgtcttttccgccttgttcgttttatctgccttgttcgtcttatccgtactatccgtctcgtccgtggtgtccgttcaggcatgaacaagctggtggtgaaccacctggacaagacgatcgtcacgagcgacggagcgaccatcgtccgggagctggaggtcatgcacccggcggcaaagatggtggtcatggcgtcgcagatgcaggagcaggaggccggcgacggcaccagcttggtcgtcactctcaccggtgagcgaagcaaagctgctgctgtgacagcaatacagcagtaccattatttcgtatttcagtgtttcaccatcgttccagtgacattatttgtagctttactgcagagtagtacgtactgtagtactactgctgtactacgagggttaccagtatttcagtgtttctgtgctatgatatttttgtattttagtacggtataacaccattaatcattaacatgcagcagaatggttatgttactgtcatacttacgggttgtttttcgactaatggaatctgttgtgcctctaataagcgaaccaccgctgctgccgccgctgctgctgcctgcgcaa

SEQ ID NO: 105 - DNA, 20900 bp, Cladosiphon sp.
  variation 14298..14487: note = n is any nucleotide
  variation 17528..18425: note = n is any nucleotide
  source 1..20900: mol_type = other DNA
accgatgtaaggatacagccagaaccatggttttcgtcgcctacgtgtacgacgacacctctttcgctcgagtggtcaaaacgtcaacaagttgtcgcacgacgaccgtgtcgcggaacctgcatctttgctcggcaaccattccaatttcggccactgctgcatttagcccagtgaccttcatcagcgggaggtaagcccatctaccgtcatccacagtgtgcaacgggttgtccggggaggcgttaccaaaccagtccggtccgaagacttctgactctccgtagtctgtcatccctagggcggctgtgaggtacagcaaattggcaaacgaagaggtccagagaggatgcgtaggcttcagaagaacgggacaacaggttcgacaaatcaaattttggcatccccacaggatgcgcaagccagtctatcggctatatgccctgtcaacactaatatgtaagtcgaacttgcgaccatgaaacccacgagagcgccggttcgcaatcgcccgaacacgctcactcgtgggcaacacgaaaagaattcggagaaatgagatgggtgctcgcagcattgcaatcattttccttcgtgcatacccaaatcggtcattacacaagtgttgtcaagccctctgcctggaccggtaggttcccgacggcggcggctctgccagcacgaagaattttcgtcaaggcaacatcaagatcgggcacagctcaccgcacagaaagcacacaccaacacccccaacatacattcgatggtgtactcccagtaggggatggagacggaggggtcgacgacctgtagggcttgctcgaactgcaggatgtaccccatgtggtgggtcatgatgcctgccgaatcaacgtcgagactggattcagaagcgacaggtttgagcatgaactgtgcacagcaagggggataccagacagaaagtacgagggtcgttcatacggccgcaacagcgctggcctgcaccgagaggatcacgcaggtgcaggatggatttgttttgaagtggccatcacggtaacgttccgtcctacgcttggttgtacctgcagtgtaagcttcgaataaatgaaaggggcacggcaatgacattggcgtgaaggcggaagtttcaacatacgggacagctccattaccggctccatcatgccagtgatcgcagtcctttacgccggccccgtcaaggtgcatctgcacgaagaagttgatgccctgctcgattgaagcagttgggggggtcaggaaggacgtacaacgtggtgtcggaggggcaagtgaagacatgggaaaccaagaaaaccgcagcggagggaacggttcgaacgtgttcgggttactgcggatggttggcgacgtggtcttcgttcccatatgtgccaaggaacgactgtgcaccatagtatgcatcacgacatctcacgccgaacgacggagaatttctcactttgtattctttgccgtagagcgcagtgccttcggcggtgggtagtcggtagagcgtttccatcgcgtcaaagaacgcctccctgtcttcgtccgtcagctgccggatctcccgtcgcacgtactgaatggttaaaggagttccgacagcactagagttcgaaaggaattggcagtggtattgagcttctggtttgtctggttcgtcaggacaaccctgggtgcaaccttgtttttggcagatacatgtcaacagaggcacgaatcgagagaattcttcacggcatgtggagcgagtcagcctcaaactgcgccgcttctctcaggcggcactcaccttgaccatgacggatgcgtgcatgcgatacacattgccagtcgacaccacgatctgcgtcaagaccacttcatgcggcccgacttccgtgaaggtgtgcgacactacccttcatggataacagcagcagaaacagcccacaccgccgtgcaagggcggggggggtcaggcactcggaggcacttcgacatggaagaggtttcctttaaggagatatgcaaagtgttcagggggagccacgcatgaaaacataacgtgacaacaggttgtttcagacagccctcgctcggtgaactcgaacgaggcggagaaatccgatgccgttcttgcgggtcgacgtcgccaccacagacaacctacaggttcctgatgttggaatgtgaatgtagcgttgagggcctggtggcattgtaagatggcatgtagatccacgtgaaaagtcccatggctttctaccacaaacattcgtcgagacggatcaaacgaacaatgtgcaggccaactcacctcccctccagcacggttgtatctggaaaggtccacttgaagacgtccttttctggatccccgacgttagaaatagctgtgaaggtcgtgctgcgaaacggctctgccaggagcagccatctggagtgctctattggcgggtactcgttcgtggtcgtaaagcccaacgcgtgggcggtggcgtattccagcgctcctgctaccacgcaccgcacacagtgaacaggcaccaacaagtacgttttctttattcgcccccacactagatttgggaaccatgtacggcaaagaaaaatggctttgacttcttcgcggttggggctccacattgtcaccacaaagaccttctaggctagtatcttccttgatggcaggatacctgcaatatcaccataagccgagagatttgcctttatcttccaactggcgtactacttccgacatacttttcgcgctctttatagtttcgttccccccccccccgtccaatgcagtttgacgtttcgtagccttctcccctttggtgcgcaagtgcacgcttaggtgtatctgtgcacggctgactgaacggtcccattcgggatctcgcaggcggtttcccacaccgcgggttgttctttctatttttttgttgccaacaggaataactcgtgcggtgcttgcctcggttactaccgcgaccagggttccgtcattccttcccctctagtcaagagtgaagtggaagttggcgtactcatgagcttgtcagccatgctaatttagtgcgtgccaccgctgttgagaatacagttctcgaatacggcacgagtttttactttcgagaacgttcgcagaaggttccgcctcttccggtctccttccttttctcctgaagtacgcgagagcagaggaagtaggcaacggtattttgagaccatcccacccattcctatgtacacactgtaatcatgtcatcattactgatcattcaaacaccccctagcctggacatatagcgacatgcccaccccggaagggttacttcaaggcgagctcgtcctgccggcgcaggaggcctcaccggaccaatcctatgcttccactcaatgatctgggtaagagacaaggatacaccagtgtgctcataaatttcaacgaccgacgtcgcgttcacacaaaagtgtcatgcgttttcaaccaaccctcgtttcacgtggtgtcgccattattttgtatttcggagtagtttattttgtgcatggagcgacacaaactcaaacaactggacactccattgtgcctctacctgcccgctcatcagtaaatatctttcgcaaaaaacaggagagaggatggcgctcggtacacgagacaagctcacatggtgcaagccaaacacaacaaaaaaacaccgtaaagaagattggtatggtactttagagtcaggatatatatgtccgttggatatagagatgaaggatccacgctcaacgatacaggcacggatagatgcgcgtgtagctctgagaggttaggtcaactgtttgacacagtgtctcagtagcagttaagaaccaaggatgattgcacctgacaatcataacccccccggtcacttgcctggtcacttgcctggtaccagtcccgcgccttcctgctcgagagtttcaaaaaaacgtgagtgacactttgaagcaacatgctgcacttcagtggtcgggttcgccccacactgcctatctggaacctagagacttaccaacttctcatgaaagatggcatcgcatgtacacgttgcttcgggtcgaactcgtgtctgtttaagttgttttttgcatttcccttttccatcaccaaactctctttatgtccgtagcactctgcactcgacggaaccataacaagtccagagcgtccccccgcctctgcctgcagcagcccgtcacggtcacctgctgcttaccgtaaacgtcggcgtcgtaaccccggcgagggaatcgttttttattttgataacacgttgcctgggggctaaatggtagacagggggcatcgtttttcttttttgctggcactaccccggggtatactaaccccggggggaagaacaaaaaaaccacacttatccacacaccgcacatcaagatggcaatgtctacgagaagcagtacaaaaggcagagaggggaggagaaggaggaggaggaggaggaaaatgtagctgggtagggtttaaacggaagaatgatgcaatcgttaaggtagttctctcgttgctgtttttttttgcgtgtcgcttgtttgttgtgatggaagtcgagggggcactgcgcgtcgttttgtagtcgttggtgcacttatgggtagactagtggtagctgacgtgaatctccatgcgcattgctggcgccgacaacggttgcttgtcggcaacacggggtttgatacttaccttttgttttccgcacttacagtcgagggacccttttagtgccggtacgtgcgcagagttttcaccggcactaaaccgggcacccggcactattgcgaatagtgccaaaacgacactattgagggctggccaatgtttcattagtgccggtaccggcactaatgaggttgtgttcgatttgcggtgtagcgcccacgcttgcggggccaacagagaacgaaatggatcgacactatactgtactgttgagtgaaactccagcatggtcgtgggcagagttgtgtttcctttttgttgtcttggggcgctctttggttcttcattttcttctgcacctcactatgtgtgtactgtgcgtggagacacattctctcctgtttgcctggcgaacccgcttcgatgttgcaagaaattaaaaacgacaagcacgacaggcagcgcaccgcaaaaaaatcaaacaaccgtcaccacagctgtgacccctgccctcactactatacgtcgggacaaatactctcctgtgtgcctagcgcacccgcttccatgccgcaagaaaaaaaatgacaagcacgacaggcagcaccgcacaaaatcaaacaaccgaatcaaacaaccgtttaataccacagctgttcctgcccttggagttgaaatccggccgcgcacgaggctgagacttgttactccccccattcgtggccttcgggcgtttacattgtgccttcccagtgctgtctgctgctgatactttgcgcttgccggctttggcgacgcacgtgctgcagatgcggtgattctcgttgcctacatcaaccacgctgccgcaaataccgtgcagtcgcccgccacatccttcctggcagacgtgaccatgagggtcttgcggcgttgtgtcctgtagttggcacagttcaccttccgcacagggcatggtacgcccctgcgtagagctgttcgggtctgcagcagcacgtgtaccccacacaactgtgtgtggagtctatgttttccgccctggttgtgcgtgtgtgtgtttcgcacatgcggagtaccggcactattgggggtgacagcagtgccgaatcggcactatatcgggcatgctttaattagtgccggtctgccactattgagagctccacctgtgcgcagagattttaccggcactagactataccgggcacctggcactattcaaccggcactaaaagggtccctcgactgtacttctttttcttgcctgcttttttcgttgagcgtgatgatgctgtattgttgctgtattgttggcagacctgtccccaaggaatgcatgtgtctggttcttcttcaaacaacaatcctctctacgatatttcccagtgctccatgtgatgctcattgcccggtgaagcgtcgatgattacggtaggcaacagtggcgcagtgtcacacttcagcggacttcacgtgtcggatttgaattcgtctatgcggctagctggtgttcgaggctagcactacaccgccggggcggccggctctacactcgagaagaagatgcagccacaacccactgctgtgcatgtgtgaatgcgcatgttcatgactgatgtaggctactgcgtccgtagcgcaaacaacagcagcgctggtacttgtgatctccgatggggtatctacgaatacttgtccaggctagagatctggcctagaccacatacatacctgatccctccctttgggcggctcctcgagtctccccatactccttcccagcagcatctgctgcgatgttggcgctagcgcgagtgttttctgacaaacccatggcgatttgtccgccagtgcactcgcacccaacgaccaagacgctggcaacaatagcagcaacggctgcagccctcatcataagtagagcacgcgcgaaggcacttccgaactctcggcccaggctgtagtatcagagtgaagttagagcagacaaaagcgcagctggatgcagcttggacccattttttctctccaccttgttgattaaccgtgaaccgtgctacagatgtacatctacgtacgcacgtagaacaggactgtcgtttgttatcacgtgatgcggcccaacctattaaaaacaatcgtgaaatctgagggaacctcccaaaaaagaatcgaagctcaagctactgtagaaggattagcggttccattcttgttgtgggctctgttgacctgcagcgtgtattatttgatgaatcatttgtacgcgtagatgccctgtgcccagggcgcattgaatatccacgtccaatcgttggttatcctcttgcaggacgacgaaaccacgccggctggaggtgaagccaacatcaagaaaaaaagaatcggcacacctcaagacgtagacagtgggacggaaaagcccaacaagaacccgcatgcatgtggatatttacggagtaggaggacctacgtatggcgccaacgcgttacagaccttactatgaagtacttgagtacctaaaacgaaaagatacagctcgggtggaggagtagggtatgcggatgtcccggaaagctagaatcatcgtgcatgcgtgtgcaaggtatagactagtctacatcatacgaagcatatgaagtacataaaaccctccttcatcaaagctggcgaaggttcgcaagcagctggtgcacaccttaaggcgacaagcaaaacgcactgcgcactgcaacgcacaccccaaaacaaagaagaaatctgacgtgctgctatggtcaaatccaagccatttgccgacgggtgcttcgccgcaaggtacacctccactcgcgcctccgcgctcacccgcacctgtccgcgatcacttgcaccactccacagtcactcgcaccactccagggaccacgcaattttcagcgcggtaccacgaacccgcccagaagaacagctttcactcttttgagaggccggacttagcgggcgctttcttgctggaggacgcgcttcgcccaaaagcttttcccacaacttgacggcttgcttccgcaggaggtgggctatccgtgaccggttcccacgaagtctccgtccgcgctgtgtttgcgaaccgaaaaaacaggcaacagacacggaaacgcggcaagggccacgggaatatggagtagatcaagacacctcgacgatcttgcttgggtcaaactccacacgttcgctaggagctccgaagctacaggactttcgattcgcatgcagagaaaggtaacggaaggtttgtcaaacgctgcaactgaaaggcaacgacatatattcacgggaggctgaagacctaaccctgtgatatgctggtagacccagcgagcagattgttaaagctgtcgtagataacccatggcagatggataacccacggcagatgcaaatgtatgcgttcacaaactcgaaatgtcacatggagctctggcgtgagccgtgtcaacggtaagagttaaaagctccccagcctttgtggtatgcgccaggcctacccacgcgcggtggtcccagtcgaactcgttgtacatataggaaaggtcgtcattatccgggaagataaagttgtacaactccaggttggtcatcttgacgatctcgcccgtgagctataagggagcagaacgccgacagggaaggattgcatgccacgaggcggtcaggcaggcggatcaacagcttccagtgttggggctacgacggaggatcaagtgaaacatgtcaaatgaaatggataaggcggggaggacgtacgtgtgtacggtgcagtggaatcgccatgtggaccacagacgacgttctcgaatgaaagccaaaaaaaaaaatcgccagacggcgcccggggctcaacgacgaaatcgctccgtctaagctgccaccgcgcgcacgaccgaccttcaacttgaagggtagcatgtcaccgcccttgtggccgccacaggtgcccttcacacatgtgggcatgtcgagcaagtcttccctcacgcccgtccagtcacacaccacccctgactccccggtggtctgcccgcgaccttatccccaggtttcgtccaagggctacttgttgcagccaagcggcagggaatgggcacatacaaacacgaggtttgagcaccatgaatatggctagtgagatgcgaagggcaagagcaactgtctggtccgtgttttttccccagtacagaaggtcaaccacgcgatgaatctgagccgtcgccgctctgcgcattctgtgcgcattcatatgcaacacgccctgagcacaaacggtcaggtccccgtcgaaacgcaacacagctggggggcgacaattacactgctgtctcgaatcaactcacatgtctggttgcttggtggccagctttctcctccattcaaggaaacgttcggcagcagggtgaataacccggaacagggggtcgtacgatgctgaggaggtgataagctcgccaactgccgggagaacaaaataaacgtgaaatcatggtggatcagtaccaaaggttgccgtcgtccttgggatgaggaaattctgcaatagaggaaagcatacgacctacctgttgttaacccactcatcgtaagcagggcgcgaattgacgggagatattcggaattgagcgatggtgaaacaatcaacggtgcattttcaactgcagcagatgcatgctatagcgctcgttctccggcagtgccgcaggagaattccccgggccgccgggggagggtaggagctacagtagcacaacagaaaaacaaaggcgggttttcaatgttttttcttcttcatgcgcatatccggagttcagccgaagcaaaccaaccatggattactcaatatacaggcaagctgtgctagcgatcgaatccaatgagtcatttgggcttagaggttcatgaccatgatagacgttacggtcattggtttgaacatgtgtgtaccaacctaccattagcggagggtaaacgagacatgacaagagaacaccgtcgcaaccccaatacgtttccaccccactgttatcccatataaagacgtaccctacatcgcagaatagtgcaatacccgcttcccgaactcgtggttaaagtcgtcgtcgccttcgtggccggcaacgatgaacctgtctcgagtcttggtcgtacctcttaaaccagagtttggcgggaaatgagacattggacgcatgcaggggggccctcgaaggctttaaaaccctcggtcaaggagcaactcgacatgagttatgtctcggcatcggtcctcgcaaaaaagtacggagtctccaaaacttccgcaaggcgatggagaatcgcggggatcttgcgatcaatgcgaacaccaggaggacactacagatacttgcttgatgacatcgtcgcgatcagggaccgcacaactaacagaagaaagatcgcatattgtcgagtcagctcgtcaaaacagaaggatgacttgtgcagacaagtccagtccttcaaaaaaacgcacccggaacacgagatcgtcaaagacatcggatcaggcatcaacttcaaaaggaaaggtcttctgcgagtggttgacgccattctcgaaggacatgtcgaagaaattgttatcgcgcacagggatagactgtgtagattcgctttcgactttctcgaatggatatgcaggagggggaatacacgaatcgtggttcaagaccaagtcatacgctcttccgaacaagagctcacagaagatctcgtggccatcatccatgtgttttccttcaagcttcacggaagccggagatacaggaacaaaggcgagaaagatacggctaaaaccggtgaacggacaggagaaagtgctcagaaagtggatgacgtctgcgagacaaacatacaacgaagctctaaggctcgtcaaggccaagaaggccaaggccaatctacttctgtctaagctcgttgtgaccgcccgggataccgacaaaaactctcgactggaaagtatgaagttggctccggccgatgttaggaagtcagccacacgtgacctcgtgaagaactttgcaagcgctcgtgcggcttacacagcccggctacgaaaggtcaagtccggaaaggcgagaatcaagaagagacgcaaatccggccagttcaaggggagacgtcgctacaagaaaagaaagcccttcgaggtgaagttcaagtcccgccgtctcacatccgattctattgagctagaaaagaaatcgatctcgtttcaagacaacacggtctgctttttcggaagcaccaagaagcacaaactacgagttgacatgagcgaggcattttcggatgaaccgggtgcacacaagccttctcagagttgcagactagcctactgttttggtagatggtacatcatcgttccggagaaggtacagatcaagaaggagtgcgccgacgcatcgatggaacctcgaatcatcggaatcgaccctggactacggacagccttcacgtgttcttccaatttcggtgacgtcctggaggtcgggattaacacccgttatcgtttccagagagaacacggcaaaaagacttccatcgctaagaagatgagagatgcgacgtgtgtgaagaagaaaacgaagctaaggaaagcttggtaccgctgtcaagcgagagccaagcatcttgcagctgacctacactggaaaaccatcaagtatctcttagatagatacgacgtcgttgttattggaaagatcggtgttcagtctcttgtgtcgaagacagggcaatctgctagtaacaagcggatgttctcatatctgagtcactactctttcaggcaaagactcaagtacaaagcggcgttgctgaacaaagtagttgttgagcaggatgagtcgtatacatcgcaagcatgcttgagatgtggtcacctaaagaaggacctcggtgacgcaaagacctacgtctgcaaggagtgcggcctcgtcatagatcgtgatgtgagttctggtttcaacatcatggttcgctgtgcatctgagcatcatgtaacagagactactgttctaggcaagcgcaagtcgtaggtgaagcctaaacttgcatacagggcctcgtatacgctctttaaagtagcttaagcacgtatgtgcatccaacgtaagattgaagctctctcgaggcttttgaagtagaggaaatgagaatttcttgcggtatcgaattcgtttccaagtttgccccgttttaataggctgtttggaaagggttggttacgtttggatttaaagctgtatacggataacaaaacaaggtaacacacgaataagcgcgtaggtaagacaaaacaaaaaaacaaaagccagaactcactttcttgcagtctagggactgcttgatccgtccgatgcacttcttgatcgtgtcctcgtacttgagtggcatcaagtggttctcgttctcgggctcgaacctgtccccgacctccaccacaagaacctggagacacatgtcaatctcctcctgggacaacatgtccatgatgggctggatcgtgttgtgcttggttagcttttccatgaacttaagactcggcagccacctggggtcccccggtggaaacattctgctgttttgaacctttgtccccgaggccgtcttcctttcccgattctccacgttgtccgacttcttcttgatttcaccggcgaccttgttgttgaaggccctctgcacgtcgccgagtagtttaaagtctttctccttcgttgtagcagtggagtgttgcatcaccagttcccaagctgggttcccttgcgagctttggacgatgaattgctgtgcttgctcgtggccttgatggtccccttctcagcgggacgagtgaggtccagcatgtcgttcatcggagcccaaagcatccacttgcagaatcccttttccgatcctctagctagcaaggccctcacaggcagcccgaagtcgttgtgctcaactctgtgagagattgtttcgtctttggggaagggaagactgacccccggaggcatttccttcggactgagcggggcaatcatagactccgcggtgaacagccgaccaacgcggaacgctccctgggccgccctgatgtaaaccttcgcctccttcagctgacctttcgtgaatcctcggtcagggtgcaacatgagaccagcgagcccagttggatgtccctccgcggcatccccgagacgcagcaagtcttggatagactctttcttcagtgcggcttccaggcctttgtcctgcttgagaagtttgagctcttcgccattgagtagagagcacgctttggagtctttgatgagtttccaggcaatggcggtcgcctccttggagcgctcaagggcatcaccctcgagtttctccgtgtccgtcttcttcttcaggcgatcgtcacggatgaacggaatgatgaacgtcttaataaaggcgtagagggcacccagaaaggtggcacagtgttggtatgcgtccttcaacgcgatggctgtgccctcatccgcctccttcagaacctgaatcgttgtgtactttgcgtcagcggtcctcttgcgcccccaccggatggtgaacttccagtacccactcttgttctctctggtgacgattgttcccttcccaagtttcggggacgtcaatgtggtccccccatctccagcaacgatgccgagaagtcccggttgctctttctctagcttgaggaaaatgacgtctggaatggtgccatctttctcgtgttgctggagcgccgtctcgatttggagaagcgtcaatgcgcgatagtccgatggggtgtgctccctgtcatcgtagcctttcctggcctcctgaaggtttttctcgatgcgctggctgtcgtcatcatccacgggatcgcagtgaccgtcgaactcatgtggtccgtagaaagcggttttcttgcggcttttcctgccaccggcgctgccgctgctgctgcctccagtgctgccgctgctgctgccgccggtgctgtcactggagtcaccgaagccttcctcgtcgctgctgctgtctccggagtcttcctcgtcgctgccgctgtctccggcgtcgccgctgccgctgcctccggtgctgccgcctccggtgcctccggcgtcgccgctgccgctgcctccggtgctgccgcctccggtgcctccggcgttgcgggtgccgctgcctccggtgctgccgcctccggtgcctccggcgttgcgggtgccgctgcctctggtgctgccgccggtgctgtcactggagtcttcctcgtcgctgccgctgctgctacctccggtgctgctgctgtccccggtgctgccgctgttgctgcctccggcgtcgcgggtgctgccacgggagtcaccggcgctgccaccacggaatgcatccagccatttttgagctttttcggggttctctctcgcgagcgcacgctgattggctccctccttagcagagatagggccacggggggctgcttccccccttccagcccttgaagacctccggcgcggtgtcnnnnnnnnnnnnnnnnnnnnnnnnnnnnnnnnnnnnnnnnnnnnnnnnnnnnnnnnnnnnnnnnnnnnnnnnnnnnnnnnnnnnnnnnnnnnnnnnnnnnnnnnnnnnnnnnnnnnnnnnnnnnnnnnnnnnnnnnnnnnnnnnnnnnnnnnnnnnnnnnnnnnnnnnnnnnnnnnnnnnnnnnnnnnnntttttttttttccttgtgtgcgtgcgtgcaacgtgcggcgcaacttccggtacgttgttggctgtccgttttcttgcatctacctggttctgcgtaattacggaacgttcgtgctcgaccccgctcccccgctgcgagttgttgtccgcttgcgcttgcgtgtcgcccgtgcaacactcgtcaccagccgcgccctgctgtttgcatgtgctctggcgctgcgcgccgtgccgtctttcggcagaccgccgcggtgccttctgttcatgttctctgcttctgcctcttgcgttttcgctgtgcaccacttcctttctctaccggcctgctgcggtatacacttgttaacacgttatgtcgtggtatgtggtgcgcattcatccccatgcttatttatcttgtgtactaacctatccctgcggctccaatgggccactctttttcttcttcgggggtaccggcctgcccgtggacctctcgccctttcttctgttttttttttctttgctgtccacagccatggctagctacggcaacgacgtcacgccggtcgtccaccacagccgtacctttcagggcgtgaattcaaactggtcactgactgttcggcgttgacttggttgtttaggagtagggagttgtgtcccaagttgcacagatgggccttgcggttgatggagtacagctttgttctgcagtggcgtgagggagctcaacacgtgctcccggatgctttgtctagactgccccatgccccacacccccagcccgacatcgatgactccttccccgacgatcccgcgatgccgtcggtgcaagcgcaggagccatcggggccggtactagacggtgttaagttggtagacctcgagttgtttgacgacaccggctcccagccgtcctcccacgataccgacgctgccctctcagcccttcgagccttcgaagagctgccctccctggctgcattcgagacggaccccacccctacccgtcgcagcactcggaagaggacatccaacgtgcgcctggtggatctgggtaccctgcagttgcccgccgacgccgtgcccgaggaccagcagacacggccttgcccggtctcggaggtggagcttcctgcacaagccccaccaacggcaccatctttgccaccgctcggcagcgccgccaccgaccacgtcttggaactgctccatgcagggggggatgagacgaggtcagtcgcggcagagtcgagggaggggggaccggccacttcagcagtgcaacaggccatcgacggcctctccaagcccgagtccttcttacgacggcaacgagaggacttccgtttgggtcaggtctgccagcgtttgagtggatatgaggatgagacggggccgacgtagaggggtacgacattggcgttgacggtttgcttcggtttacggacgatgtaggtagaaggcgcctggtcgttccgcaatccatgatccccgacgttctcgcattggtgcacacgcttcatggccatgtgggaataggtgctacggtagccatcgctcgcaaacatttcttctggaaaacgcttgctagagatgctcgccagtatgtgctatcatgtggttgccgacgacgcaaaaggtccaacagtaggaaggttgcgatgacacctggtagaccgttggacccgtgggaggaactccaaatggatatccttcgcatcgatgttccttcgcagtcgggcaacaggtatgtgttgttggtagtggacagagcgtctggatttccttttgggtttgtgctgccctctaagcaggccgagggagtagcgagagtgttgacggagttgtgtttgacgttcggcgttcccaaggtaatttcttgtgacggaggaggtgagttcggctcgcaagtggtcaagcacctgtgtaggtggctgaacgctgacatcagattcggcccggctgaccacccccggggacaaggtgccgtagagaggctggggggatggttgcaggagttgttagccgagttgtgcggtagctggcctggtaggtgggatgagtacgtttcgccagccctttggatcaaacggacccttcccgacttgtctctccccggcaacatgacccccttcgagatgctgttcggccgaccccctcgcacgtcgctcgactctcttgtcccgctcgatggagaaaccgacacctccacagggctagataattttgtggaacggcgcaagcagaacatgcgtgaagtacgtctggctttggagaagcggcattcttttcgcgtcgctgctcgtgcgagagcgaaccagtctatctctaggttgtcacagggagtgcaggtagaaccgggtagtttggtgctggttagggagtccgagagttcacgacaccgcgaccgtagaggtatgaaactccagcacgagccgtacactggaccttgggaggtattgaaggtattggaagagggcctcagtgtacaggtgtcgatgcaggggaggaagaagcgggagcggcgagtgtcgctagcggatgtcaagcggttccacaccaggcctgcggccttgagacactcattggcggatgagttcgcccagttcgcgtggtcttccgacttcaaacggtcaggagtatcagattctttgcctttcgattctatctcggcgtgtaggagaatgatcaagccgaatggtgtgagagtatgggagttcaagggaaggcggactgacgggggggagtctgagtggttgtcggagaacaaggtgcttgagacgttcacacccctccaactcgacgtgttcgtggctctctggcacctctacgaacccgaagccgctactgatcttatgccccctccccaaaggtccggtgccccgttgtcgcgctccgaagccctgaaactgttccccataggatacaggtttgcgagggacttcggaggaggcttgaagatgcagggagtggtcttcgactacttcgacagctactggaaggttcgctacggcgaccaagactgggaggacctgactcgtcaagaacttcagnnnnnnnnnnnnnnnnnnnnnnnnnnnnnnnnnnnnnnnnnnnnnnnnnnnnnnnnnnnnnnnnnnnnnnnnnnnnnnnnnnnnnnnnnnnnnnnnnnnnnnnnnnnnnnnnnnnnnnnnnnnnnnnnnnnnnnnnnnnnnnnnnnnnnnnnnnnnnnnnnnnnnnnnnnnnnnnnnnnnnnnnnnnnnnnnnnnnnnnnnnnnnnnnnnnnnnnnnnnnnnnnnnnnnnnnnnnnnnnnnnnnnnnnnnnnnnnnnnnnnnnnnnnnnnnnnnnnnnnnnnnnnnnnnnnnnnnnnnnnnnnnnnnnnnnnnnnnnnnnnnnnnnnnnnnnnnnnnnnnnnnnnnnnnnnnnnnnnnnnnnnnnnnnnnnnnnnnnnnnnnnnnnnnnnnnnnnnnnnnnnnnnnnnnnnnnnnnnnnnnnnnnnnnnnnnnnnnnnnnnnnnnnnnnnnnnnnnnnnnnnnnnnnnnnnnnnnnnnnnnnnnnnnnnnnnnnnnnnnnnnnnnnnnnnnnnnnnnnnnnnnnnnnnnnnnnnnnnnnnnnnnnnnnnnnnnnnnnnnnnnnnnnnnnnnnnnnnnnnnnnnnnnnnnnnnnnnnnnnnnnnnnnnnnnnnnnnnnnnnnnnnnnnnnnnnnnnnnnnnnnnnnnnnnnnnnnnnnnnnnnnnnnnnnnnnnnnnnnnnnnnnnnnnnnnnnnnnnnnnnnnnnnnnnnnnnnnnnnnnnnnnnnnnnnnnnnnnnnnnnnnnnnnnnnnnnnnnnnnnnnnnnnnnnnnnnnnnnnnnnnnnnnnnnnnnnnnnnnnnnnnnnnnnnnnnnnnnnnnnnnnnnnnnnnnnnnnnnnnnnnnnnnnnnnnnnnnnnnnnnnnnnnnnnnnnnnnnnnnnnnnnnnnnnnnnnnnnnntattcgatacacccgttgatatgcccttgtttgtgcttaggcagcgagtaaagtttggtttactgagttcttaagctcccgtggaagaggggcaggagagagtcacgcaccacgcttctctgaaaagcggtgtcccgtggcaaacttctttgaagacattccctctttctactgtacgaaatacggaaccccctgctcgggaatcttggatccagcaatcacacgaacaccctcccctgtttgtcactccagtgatgaacaactcgtgtgacccgctagaaaacaagaatgccaaaaaaccgtctcaaacaaaagtcatctaaagggaaacctagcctccagatcaaaaccccttactcaacaccgtcacaagaatccaaaccacaacgccctccccaaatcatttggcattgcaattctcctggcagactgtggaattttctttcaacttcccgacacccctacgtgtgcccgaacaaactgtcccgaccttggcgtccctgactgcacgcccgaacgaacaaattgtcccaacctggtactagcgtccctaactgtacgcccgagcaatcagattgctccaagtttctgtagcgcctttcctgcactacctcgattttagtcaacacatgacatggaagcgccttttctgcactaccccgattttagccaacacatgacatggaagcgcgcttttctgggttttagtcaacacatgacatggaagcgcgtttttctgcactaccccaacgcatgacctgaaagcgtctttcttgcgctgcagtcacgcaaagagacacgtctgcctcaatacagaatggacaagtcttcactgcatgccccctttcatcaattatcgacgcaggcaatatcgttcatcacctaccgacgaaatggaaccggctttccccccgaatccccttgagcggcccagaatgatcaatcttccggctccacctagcgtccctaactgtacgcccggagcacacttgagtactcccacaaagattatgtggcccgggagatcaacatcccggctccacctagcgtccctaactgtacgcccggagcacacttgagtactcccacaaaacatcatgatcggtcatcgggcataccataaacaaccaactcacgaacggaaacgcatttaccacgaatccctacaacttcaatatctcatctggtcgcaatcacacacattcaacactctcgaactaaccagatagaaagaagccttgttgaaacgcctcgtcctggatgttccacctctcagaaagcttggtcttcctcggagtccggttcctcgaagtgctcgatcatgaccacgttcgcttcttctaccttttcttcctccgatgggcactcttccgccgtgtgtccataccccccgcagttgccacaccgcggtagcgggttgttcgggtacggacagtcctcagcatagtgccccctccgacggcaggtgaagcaccgcccctttctaccggatcccccgccgcctccctttgcaccgccaccatttccgccaccgccaccatttccgccaccttcgttgccgccaccaccgttgcggcccttctttccacttccttttccattgctcgctgacgtcacgtaggccctctcctgccccttccgctgcgctgccaccttctcttcgtgccgcagcctggtgatcttctcgcgctgcgtcgtgacgaggcgcaccacgtcgttcctgctgggtttcgacatcccgtgcaagttgatctgtgcagcttcgtactctgggatgggcaaggtatcgatgaactttgtcaggaggaagctctggtccagcgtaaccccgtccttttcgtttagctggctccagatcagctctaagttgttcagcgcctggacgggatcgtccttcgctccgaactcgaattcgttgaagcgtttgaagagctcctgcttggccccttgagtgtcagggctgtacactttatccaactcctgcaaagcttccttaccactggtgcactgtctgatgatggatttcgcatggtcggtctgcaaggccgaagaaatcaagttccacgcgttccttccagcattaatctgggtctgggtgaaaccctctccccgtagctctacactatcctttgtggtgtcaggaacaggtgacgacccgacaaactggcccttcagctcgagaagtccagcggtctttagaaagtcggcacggaatgccaaccagtccttccgatctcccttgaacgcgggggtctggaagcgggggaattgcttcgcagcactattgctgtacacagcgccccctccaacctcctcaccacccccaacaacgctgggaatcagctcacctcgggggttatcaaaacccccagatacctgcagactctcctggtcttcagcaggtgtgcggcccgggatactcgcgaccccggctccgcctggcgtccctgactgtacgcccggggaaacctcgta

SEQ ID NO: 106 - DNA, 20981 bp, unidentified
  source 1..20981: mol_type = other DNA; note = Undaria sp.
ggacgtgtggaggaaaagaggaacacgttgccaaatagctgccttacagctagctttcggcacccattacagtacaacttcagcccacaacttccgccattgagggaaccacagctggctgtcaatcaaccgtgagatctggaaactttagatgagcaagcatatgatataaactaaaataaacggtagtttggtgctagttttaagctaccggcactattgtcgtacattttctgttgtcccacctcccatttctggtggcccaccatttttatgtcgagatggcatgtggacacatatcatacattccatgtcgtgtgtgcatgcctgtcacagccgtcacaaacccggcgtttgagatgcttgtttgaaaggcagtacaactacgactagatgagtatatatatgaagaacatatattctgttttagtatcagcatcttctgcactagacagcataagctttccggcgctttctatgtatattcctgtgttttgtcccactacaagaagatatgttccctgtattcggcacatacatacatacatacatcgtgtatttttaactttaaaacagagataaggcttgcgcccggcgttaagatccggccccgaacaaaaataaggtaccttttaaattaaccatgacccaagataggctgcattacagtctgccaaacgcaccttctacaccttaagcctctctccaagtactcactgacctgctctaccaaagtacgcacctactacggtttccgtcattcccccccccccccccgtccccaaccaaaaagcaagacaagagcgaagaacccagatgagcataaaatattagcacgcatatatacactatatacggcccactatatacatacatacattgataatgacaataccgcacttgcggcgtggccccgatcctcccatacaagtactctctatttcagaccgattcctgtttgattctcttggatggccttccctcacaggcaccttgtaccctactctctttgcgattcttactcacagggataggcgggttgcgcagccccgataaattaaaaggatcagaagggcggtcatctgactgcaccagcgcggccatgccgcgacaaaacctatcaacaacttcttcggccttagcaaggaagtctgggtttttccgatccacgttgtcggtgcccaacttaacgctagcggtgcactttgccaaccagttcgcaaaggctctaccacgaataacagagaccaagttatcgggtgcatcccctccgtcacttccctcaccgtccccaaaatccatctgcctgtcgtccgttaacccgccacctaacggtccacactcttcagcatctaattcacgcagtccccaaagttctacactccaggcgcccgacgtggcccgccaacgcgggtgaatagacatgccactaaactccgccggacgccgtaagcagtaaagaagcacggccatcaggtgtctacacggcaaacccgtcctgagtatctgcaaacacgagcagagttgaaaattgttcggcccaacgacaacgatgtgacctacctgtgggtccctcattttgtacaaaactttaaccaccgtgttgatctctacgctctcgaccagcctagcaaaaacaagcaatgaagttgtgccatacattgtggtatccgtgacgtcatcctcgacaaggctcgttaccacgctttctggcagctcacaacaaacatctatggcctcgccgtcctcttggcgggtcgccagcgaattcaggtagtcgagggcaccagctccttccgtcaagatttcagttgaataggctgggctcgcgaaaatctcgttgatcacctcctgtacaaggtgacgtaaacaacggtcgtcggaaggaacatggacgttgtgcgtgaagggggtggtggagtctttcaacagcaaggccttaactcaaaccaacccccccccccgttccaccgctatcggtccaggcatcacgggtcaactcacctctttggcatacttgctggcgttgacttgttctagttctttttttattggctccccggtcttcatggcatcagcctccacgtgttctttcccgtagaatgtccgccttgtgctatacctgtagacgaaagaacgtggaatagcgtcggttacaacctcgatacacgcatcggtttcatgtatccacgagttggatgcttggaggaaaatttgccgacgcagtgcttccggagggcggtcggctttcgaaggacccatggggcctgcacaccgctatatttcgagcgttcaacagcacgagcgaagtactgcggccaaatatcgccacaacacagcaacacttaccaccgagactgcagggccaatttttccgccaccctttccgcctccttcttcactgccattagactcgagcgtttgttgaccatgcgtccgttcttgatcacgctgaagcctccctccacacgctgagaagctgtcatgttcaacgtgagtgtcgttggatgatagcagcgtgcccaatgcttgcggttcctgtgttcgtagtggcacatccgagagtgtaagattggcgcgcatgacgacggcacaaggggagaagagggcggccgcacgtacgcaggtacccactccttggtacagagtgcaccggacacgatccaaccttttcggcgctccttatacttgcaaaacaccgccacaacaactcacgtgtacacgtgaccggtgatgtaactttcgcacttggtgcccttcacgagattcgagaccttctcccaaatcgtctgaaacgcctgtcaacggagtacgtggcagagaaaggacaacgatcaatgagagagagtacatggatgttggaagtaactgcagcagcatgtgcaacatacgatgccaccaaaaacgtatatggcgcggagcagccaaggtaactcacagtgtgtgatgaagcgaaagaagccgcacggtacagccgaagcaactcgttaaacttctttccttgcagcgccccctgacccagtttttcttcaggttcttgttcatatgccacgagcaatgcaggtgcgttgtgttgggcagacgagtgcttaccgcactggtcatggcatggtcggcatccgttaatatcacctgtggagcaccaacgtgcagatatggaacatgcatctcggtgtttgtacacaggaaatcgaaaaccaaataggccgagaagtggcccgagaagtaggaaaatgaccagtctgcccatgcatgtacactatttcataacgctttccatcaaagcataccaacaccatcgcactttagaagcagtacaacgggatttcgaacacgacagcggcacaggagtaggagcccaccttagggtgcccgccacaaatcgcgattaaatggtcgatggcaaattcaaaagacggtatctgctcgttggccagcagcccttgtgcgaagatggtcgtcttgttctccgagtcgacgccaacaaaaaggcacagcttcatgttgtacctaccggcaggggggaatggaaatatgatacggtggtacacgggttggcacaaccatcctccatcgcatacagccatgtgcctacagttggcacgttgcccgtgccccaccgaaccgcgacaacctggaaggtagttttgctgcggaatataacgaagaggtttagccccccccgtccttgtcacgggcaaaaaaaaaatgcagcctactactgaacgagccagcatttcgatgtacacatcatatccagggttaagtaacccccccccccaacgtatgttggtactgtcgctcgtcgcgtcaccaccgaccagatgtcggagttgagcaaaagtagccgtcataaccactgacaacgaccgcggtgctcacctgttcgtcagacacgtgttgtcttgtattaccacgccgccgaattgtctcgccgaaatctgttgctcggctgtggaccacatcaccacagccagctggttgaagctgtccattttccaggtacacttgcaagtggagtccttcagcaatgcctcgatgagcaagacggcatccttcgccgtcccccacgagttgcgcctcgcattggtggacaaattcctcacctgcgacaaatggtcacggagcaggtacgcgcggtcgtgaatgcctgatataggaattctgtgcttagtatcccccctctccctcggcgatgtaagactggatcaggaaatagtacaaaaggtatggctatcgtgggcgcagcaacggcgttagacgtccagagaagctctagcaggaaaacgaacactgcgtccctccctgtaatacgagagcagcggtcgaagctacgcgtacagagaatgcccccccctcccctgctcgaaaggatgcggggccagtggtcacattactacggcaagccacagctgtgtacaacacacaacaacaggcaccttgcgtcggcccggcggaccaagcttgaggggggcgatttccagctcgatcaatcggtgcatgtttaggaccctcactccccctgatgtccacgtcctgatctgaccctcccagtcccgttgaattgcggcaacatcaatcaagttgtcctggttcgcccgctgcgcaatttttggcacctcacactccgggttcgtttgatggtcaagaatgacctgcgcaggcaaatacaaattcacatgatgcggaggtacaaatcaggcccgttcgatctccgctataggcatacaggagccgcagatatgatgcattcaataaggattggtggacgaacaacagcgtgtgacttgcgatggccttgtagcaccagccacatctaaaccgttgttgctcgttcagtacaacgcccaccttcgttatgcgaggcagcgcatcctttgtccacgaaacgcagacctggaatagacagccgcactgaaacaacgaacgagcgccccgaacgtgcgccgaagagacgatatagacgaaagtaggacgcttcaggctgatggaaccaaactctaacctgctgcacgcagtgttgtggaacaacgcaagtctggtactacttgggctttaccttgacagaccaccccttcttcgagccggtgttgggtggtgccttgccggcgccttggcacttgatctcatatcgcccaacccgacttgatcccccaccaacctgattcgggatgacgccggcgtcgtggggggttagcttcgaacacccgaccggaaacaaaaacggtgaagaaatacgcctcacctgtgaccgaactacagaaatcccctcgacagcaacgatgggataccctaatctacctagggctccaaccacgggcgccctgcaaaaacatactctcgtgctctattttgttcacgttggtaggcacctttttgccggtttttcggaacgttgcacccttgtggcctgcacgatgcaaggctgcacggatgccgcccaaagtcttctcccacgtctcctccggagtgtcgttctcatcaacgctgaaagagaaatctttcactaggtcgacgtgaatgtggtccttgtcgtcgtcgtcttctttgtctgcgtctggtatcaagaagtgttggggttcattgaattccaattatgcgccgaagatgggggggagtcgaacgacgatgcggtaaagaaaacgtgtaccactccacaaatctcaacaaaaaagtttgttgagaaagcaccataggtgactggctgggcggtaggataacactttatgctgcgatcgagacgtcatcgacttagagggggttttcgtctgcgcgccatggtcacggctgcggggcatccccattcccgtcatcaaaccaaagggtaattcctgcgctgggactcgtggctgtagggtcaatactaaatgtcgtcgcttaccttcgtcagagaagacatcgtcctggctgtcccagccgtctgtgccatccgagtccacgtcttcctcgctgccgctgctggtgtcatcggaatttcgatacagctgtggcgagtcgtgcaaagaagggcaatgcaggaaggcagagctctagtcattatatattaacgaccagcacgccaccttcatacccataccgctcgaacctatttttgaacagccaaaaccaagctgttcgggacatcctcaggagcctgcttccgaccaacgtagtccccacgctgccaacaaaacgggcacgtagcagcggggattcgaccacaggccaccagccacacacaccttctgcagcgctcgctctgccttcttgaactgtttccaggcccgcgctgcagcaactctctgctcgccgcaggctttctcgcgatcgttggggccctcaatgccgtcgtctgtctcatctacagcctgttcgatagcatgtagagaaaacggcgcgaagcacatcttacaccccacgatatatcggttgtgcgaccgactccccgccaaccaagcacagcactgcggccgggctcccctttttgcctttgcattttcaaccccaacacacgctgctcaccgcgaccagactgttgagcttcttcttcgcctccttcgcggtggttcggagcgcctgtacgtgacgttcctgctcctcgcgccgcgccatccctgcggccgatggtccaggcaggacgctatcgtctgaatcatatcctggcaccaagtcagggtgagggcatattgcgcgcgttactctagccagcgagcttttattggtttgaacaatgtgctcacagcacgaattttcttttctctttgcccctttcgtgtaccttacctccgcccatcgacaagtcgtcgtcgctgttccagttcctggctgccttgctgctggtcgtgctggagtcgctgtcctcgttacctgggtcaaccccccccccctcccccccgaacatctgcagcgcgcgcgtaggacggcggctagcgacgcttttatcgtaggtggtacaaaacatggttacctcgcgcagacctacctctctactcgtagattgcttatgagcgagcaagcatacacccaagctgccttctcccagaaagatgaatgacaagccatgcgcaacgaacaggtgcgcctagcgctggcacacggcaataataaatgggaacctgcaatacccgccgaaacccttcaaacataccgtatgccagccaactacagttttcgcgaggacattctattggcaaccactacacccaccttcgccatcctcgtctcggttcttctcaaatttttccatgccttgtcgtacccccgccgtgcttttgccgccgccactcgtttgcgtaaaagccgcccgtctgcgagggacgtatcccttacccactcgtgcttgtttcgctccacgtcggcaaccctttgtcgatggccctctgtcacagcctgtgcataattgatggggagatatgccatcggatatcaatacaacttggttcgagtaacaacggcgaacggtgacctgacaggcccaacaacaattgaaattggtctttttgaaaccaaggcccggcaactacaaaaataaaatagcaaatttcgagtaagatcaaacgccagcacacgacagcggcagttaacaaacaacgccccatcactcaccagcttcagcttgtgatacagcgtcttcgccttttttgctccctctctggcctgctcggccttctcactagctgctagaagcgcttctgccgactcctgccgagctttctccaccgctgcctctgctgaatcgcccccggtggcccctccgtctcgccccttcccaccttcgcctccctcctccttgccgtcctccgcacccttctgcttgtcgtccccctgcttggtgtttgctttcgccgccgcggccgccacggccgcctctttaccgccatccgcattttgcctccgttcccacgcagctcgctcagcacgggtcttctgttcggaagcttcgtcctacacaagacaaaaccagcaaagcaaacggcggccaacaatacgaattggtggttagtgcaactatattctccattgttttgccttgattcaaggtacagacctacacgagccgaaggattggtgacgtgaacagcatgtgtcgcggtgttaaagcaggaaggatagtactctcagcacacgcattgccgagatttcgacataaacgccgacgaggtatggtgccacgtatggtgtgatttttcggcaccacacaaactcactttgcaccgtctcccagccatgaaccatggcagatgaacggtattcggatgacactcacatgttgcgaaaacatcggcggagcaacttcgtgcatcggcaacggtggacgtctggcacggtccttgctcgcgatcgccgcgaagtgcacccatgtgtcaacgccgaaagttgaatcagcatcagtcgcggcgatagcggcgagcgctttctcttcgacgctgtgtgcgcagacgtctgtcagcacgattgcgagctcttcgaccaccacatccccttcgctgcccatcccaccacgtaaggtgatgttcgtacggtctgttggctggatccaccgagatttgcggttgtcaccaaaatcgcaacctttcttccccagccccttggctggctccccactcgccggtccctttgccttcaccttctcccgcgctagtttatctgtcgggaccactagcttcaccgctacaccaagcgcctcggcagccaaaacaacaccaaggtcgccacaccaccttttgtttcggcaaaaccatcctacgttctccatgagcatcccagcgtagttgtcacgctcgtagttggcggtgccgtacttaacgtgaatgtgggctgtgaagtacaaaacgttcagatgaagggggctaccctctcccaccagggcgtcgacgttcaccgggctccaactgagcaccacaagcttcagctgacgccaacacttgtctaagccccacagtgccttgctcaatgcgcgccaaaaacagttaccgtctcctgcaacccataacgccgcaaacgtctctcgcaactctaccgggagggtcatcgttgccctggcgtcgtatgcctgctcgcaatcaaggatgcaaggatgccacgccgtttgttgtgtgcgaaaacaaggacggagctatgttggatctttcccacgagagggtttactggtcaactaaattcgaaaccgaacaataccaagcgcaattaattagacacgtaaacattcggagaagtgaaccgcgtttgtttcttactttttattttgttgtctgtgactagcataacaacacggtatcaattatgtctccggatcggtcctttcaaagaagtacggagtcgccaaaacttccgcgagacgatggagaatggcaggactcttgcgatcaattcagacaccaggagggcaccatcgatacttgtttgatgacatcgtcgcgatcagacaccgaacaaccaccggacgaagaatcgcatattgacgggtcagctcgtcaaaacaaaaagatgacctgtgcaggcaggtcgaatccttcaaagaaacacatcccgaacacgagatcatcaaggacatcggatcagggatcaacttcaaaagaaaaggccttctgcgaatgtttgacgccgttgtcgaaggacgtgtcgaagaagttgttatcgcgcacagggatagactgtgtagattcgctttcgactttctcgaatggatctgcaagagggggaatacacgaatcgtggttcaagaccaggtcatactttctcccgagcaagagctcacagaagatctcgtggccatcatccatgtgttttcctgcaagctgcacggaagcaggaggtacaagaacaaaggcaagaaagatacgtctcaaaccacaaaaggagcaggagaaagtgcttcgggaaaggattaactctgctcgacaaaactacaacgaagccctgcgactcgttaaggccaagaatgccaaacccaacctacttatgaataaactcgtcgtcacctcccgtgaaacggacaagaactcgagactggaaagcatgaaatcgacaccggctgatgtgcggaatggctacccgagaccttgtgaagaacttcaagagcgctcgtgctgcgtacaaagctcggcttcagaaagtcaggtcgggaagggtgaggatgaagaagatgcgcaagtcggggaagttcaacgggagacgccgctacaagaagaggaagccgttcgaggtgaagttcaaggccaggcgactcacacccgattccattgaagtcgaaaagaaatcaatcttttttgagagtaacatggtttctttttttggaacaagtaagaaacactcactcgaagttcaaatgagcgaggtgttctcggaagagtctggtcggcacaagccgtctcaaagctataggatagcctactgctttggcaggtggtacatcatcatacccgaacaagtacaggtcgacaaggcgaccatcgacacatctactgaaccacgtgtcatcggcatcgaccctggtcttagaacggcttttacgtgttcttctagctcgggagaagttctggaagttgggatcgaaacccggaaccgcttcgagagggaacaatcgaagaagaactcaatcaccaagaagatgaaagatgcagcgtgctccaagagaaagagaaagctacggaaagcttggtaccgctgtcacgcgagagccaagcatctcgtggccgacctgcactggaaaaccatcaagcatcttttggatagatacgacgtcatcgtggttcgaaagattggcacccaatctctcgtgtccaagacagggcagtctgccagcaacaagaggatgttctcgtacttgagccacttctctttcaggcaacggctgaagtacaaagctggacttgtgagcaaagtggttgttgagcaggatgagtcgtacacttcacaagcgtgtttccggtgtggccaccttaagaagaatcttggtccagcaaagacttattgctgtagagctgtagagagtgtggacttgtgatagatcgagatgacaatgctgggtacaacatcatggtgcgctgtgcatccgagcaccatgcaacggaaagcatcgttctcggcaagcgcaagtcttagatgtgctaacacacagggcctcgtatacgctctttaaagtaacttaagcatgaatgtgcgtccagcgtaagatcgaagctctcccgaggctttagaagcagaggggatgagaatttctggcggtatccaattcgttttcaaatttggcccgtttttaatacgaaggctgtttgacaagggttggctacgtttggatttaaagctgtatacggcacaccggtgattcaggcaaaccatactgtaaatacattgggttcaaaggtggggtgtccgtacagacaccatcaattacaggagtgtcccttcagggttggtttggggggctcgggtcacatcatgaatggaaacttgctgtacgccggagggatatacaggcagcaacgccgtcgctaacgctcttcccctggttgctagcgctgttccccttctgaacagagtgacgaaaactaatatctactcagcattgcctacctcatcttccatggcaatgacccccgacaaagctggcaccacgcctctgcgacagccgaaaaccttttgccaagagcaacaagtgccgacgaactcctccagcgtcttcatggcggggccgcctttcccttcctggcccaccacgttggcgatcatgctgtcaaggcgatggagtagtctccctgcctcctcgtctaacatcacataaccagcggcctggacaaacacggcaagcaaacacgccgccagtcatggcacacaggtcttagcggatagcagtagcagcaccaaatgacttttttcaacacaaccaaatgcctattcaagtacttacgattctccatccaaaacatgagccgcctctccacgcggccagccatggcacacaggtcttggtggatagtagcagcagtgtagcaacaccaaatgccctctttcaagtcattacgattccccatccaaaacatgagcggcctctccatgtaaccgaccataaacgggtttcatctctgccaggattttgaaatcacccacaggctacaacaagtggccgccgtccacgacacagcccatatacaacagctcacctcgtcctgggggtttgatgttggcaccgcggcgtgactgctgctttccctgccagtatatcaggcccaggatatcatgttacaagcccagtacggcacaagtcagcattggtacccgctgtggagcaccacgggactacatgtacatactccagtatgacgaggaggagagagaggcgcggtatgtgtgaacctacagcagtagacattttccattgcaacgaacaccgtaccgtatgtgtaatcaggcccgtgtaatcaaaacatgcgatgcgctactttagtctggcagtacatggcagtacatggcagtacatgcgtggcctagcgctgcccacacaagccttgaatgaagcgggttagtgcgtggagaaaatgactgctaaatagatgtacgtggcatcatgtagacttcgtcgtaccgcagtacagaagcagcagcagtagcagtattagcagtagcagtagccagtagtagcagcagcagtagcattagtagcagcagtagcagcagtagcagcagtagcagcagtagcagcagtagcagcagtagagtagtgatagtagcagcagcagtagtacagcagtagttgcagtagtagagtagtattagtcgtacatacagtggtggcagtagcagccgagaggtctgcaggggtctcattcgaacgcccccaaaacgcgcccgcgaccaagacctggacgcatttattaccttcgcgtctagaacaaactctcttgctttcgataaatcaccggagacatgccggcgtagggcgcgtgctgtgtatgttttggcgcgcgcaggtacatagtctacatcgactacatgtagatcttttatgctgttttagacaggcacatgatatattattgtaagttacaaggggctacgccggcggcctggacggccgccggtcgcagcgcaggatagtaaatattaagagggtaagaagtaatgccaagagttagacgaagtttgttaattcatatactacgtatggtgcgtatcgtaaacaaagcaataaatagctgaggcgtgcccccgcaacgacggcaggcagcggtcggcgccgacaaaatgcccgcccggcgccggtcgtcaaatgtacggaactgaaaatctaaggcacgcatgacaatgaggtgatgagcgtttgaggaaaggcatcaccgagaaggaagcgattggcaaataatggaacccagtgaagggagaagaatatgggaataaatatttattgcattaacgtgaaggagagcccccttgaaaccgcacgaagagagaaatgcggaaggcatcgctaagaaggaatgacgcaagcagaatgctccagcgaaaaaaaatcatgcaaggggggggcacaacttgaaggatgaaactgaaatcacggcaagctggcaaaactgaacaacggaatggaaagcattaccgggaacgcaaagcttgcgcgacagcatgaagaaaagctgtgtttgaaacacctgagacaacaacgttcaacccacactaatgacaaatgtctagaaactaaaatcttcaagccacactaatgacaactggcaaaacttagatgaacgtccagagcttcggagcaacgcaagcacccgaggcaagaacgttgaagcgacactaaagacaactggctagacttagactaaaatgttcaacgaccctaatgagaacttgctagactaatgacaacttgctagactagaacctagggaggcagaaaacgcaaaactaggacgaaagcatgaaaagctgattgtaagaaccactagacacaacaccatcaaacgaaccggtcggactcggactaaaatccacggaagggggggaagacgacagggccgcaaccgagtttgatgggtgtgaaaaggtacggagcaacgtaaaactgcacgtaaggggttgtactaaaaaaggtacaacgaggaagacagcaagaaaagctgtactggatggacgaaaagcatatcatccagcccacactaatgacagctggctacgcttggagtataacggagggaaggaagcaaatgtgtcaaggcggcaaccgatgacgaaggatgcgacgagcaacggagcaaagaacaactggatgggaagggttccagagaaaaacgcacaactagcacgacagcaagaacagctgtacatccgataaataacacaatgtgcacgacggcatgaatgaaacactatttccaaccgcgtaacacaacagaactaaggaagcggcagcgggcaaaaacaggtcaaaccggactgcaccacaaaaaaatgaaagggctacttacggaaacatgagtactgaacacaaaggaagtgaagacaataaacctaaaatgtcgaggaggaaggagtcaaactctacgcaacaaagacgacggtgtaaacacacgaagtggaacactgacaccgcctaccactaataacgatgtacatatataaggatgctgaaggcaatcctcaaggtcgatacgcccgagcggggagggcgaaggaaagggcggggtgtcgtgtaggaagcacgcccatgtaaatgaagactggattacaaaagtaatcgccagctacagggccgagtgtggaaggcgaagggtagagagagaagtcatgtcggtagcacaccgaagtagcgagcacatgttgggaggacaccgatgtagggagcacttaggcacctgttggaagaggattggcgagtgcaacggatggtgggaaggtaatagttagcgagtcgtaatgtttggatattgagttgaagagtaggtggatggtgtcggtgtaggcaattggcacgatgggcaggggcgatccagcgaaagaaacgtgcactgtcctgccgtactttagctgagcagcgattatctcagggtgtcccatgtaggttgcaggattggacatgagctcaaggtagtggtcgtacgattggtaaagacatgggggctcaccgagaatgggcaagttttcaatgccaatgccagatgtaattgctgcttgaaatgtatgaatgtgacggttagcatcgaggtactgaacaatttcttgtcgaatctgggagtgaaggttagcgtcaccaagaagagcacgtgcgagagcacgaaatccgcaagatccgtcaccaatttcgtggcaaatagaccatgaaggcgtaggcggtaatgatggtggatgaaaagacgaagggggtaaaaaggggggtaagggtggaatttggcgaacaattccagtagcagcttctacaaaagggtcatagacaacgttcgcagcatgaggaatgccgttgagaacatgagatggggaaatgaggcacatgacagaatgcctattttgagcacggctgagggcaacatagagttgcccatgggcgaagacatcacttcgaaggtctagacctatacgggtaagtgtttgaccttgagatttattgatagtgaggggatatgcaattcgcaaaggaaattgtacgcgttggaaagttacaccgtttctgccgacctgcgcgtgaaacaaaatgcgaggaatgaggacgattggtttgtccggagtgagtagttctacctggataacgcgagagttaggagaaatgcctctgagaacgactttttggccattgacgaggccctcggaaaaattgaggtttctggtgatcatagcaagggcgtcagatttgagatgaagctgatgagggggaacaccctggacgttgagactgttaaggtgttcaggcgaggcgaaggcggtgttggtgttagaatcgtcttttactaatgtgtcagaactataaaaggtagcggagcttccgggacgtttgtcggtgatgtgatcatttgacgcgtcgatagaagagttggttgtggccaataaggcacgatcgtgaagtaagcgggtatcagcatcgggatcaggataaacaaatttggctaacgtatcgaagtcagtggtgtgttgaagggtgaagtggtcggtagaggagacgtcgtgggagtttgaaaggggcatgaggtccgcgccgtccggaaatcgcacgcttggttggcggttttcaccgacagcgcgaacaaaagaagcataagcagcgtcgtccctgtcacgctgtgagatagtgaggcgtacgcgagtgatatcacgccataagtagctagagataatggacgcctcgaccgtatcagcagccgatccgaattggacagtgggtcctatttggcggaagtcaccagagaagatgatagtcttacctccgaagatggaggagttgcgcataaggtcacgtaatgtaatgtcgagggcttcgatgcagtatttatgggtcatgggagtttcatcaaagatgatgacatcgcatttcttaatgagctcggctctctgcgtttcgctgttgatgttgcacatagctccagggacaacgtactcgttgaggggaagtttgaacatggagtgcgccgtccagccaccaggtagctgaagggctgcaattcctgtcgacgcgacagcaatgacagagaacccctcaccccttaaacgggaagcaattactttttcggtgaacgttttacccgtgcctgctggggcatctatcatgaaggctttcgggtggcgctgcttcacggcgtctattacagcggtgtaaacgcgaagctgttcagaggtgagtagaggttcgtggacgtctgcgtaagaggtttgttcgtcagcatcaaaagaagatttcattcgctggtattcggtttggcgatgtgtggcggacggaagaccgagctgttcattggtcttgccatgtagctgtaatttaatgtctatcaatcgcaaggcttcctgtgaagcttcttccctgtcgaagcgacgggtcaggtcttcgatgaggtcatcttggtaatcagtccataccttcggcgcaggaccgccgtctaaaatcagggtgacaaaaagaccgcgcaattgatgtggcatttggaaggaaatggcttcttccatgcaaatgaagtactcttcttcgccggagattaaaccgcgtgctctggcggcgtcatggaaagtcggatgctggatgggttgtccttccgggtttcgtacggtacggagttcgaggaaggatctaccaaaccatttatggtagccagtatcacggctaatataagccagtatcagggctaatgaaagccaaatatgagatggtaaacgactaaccttttggatcttcaaaagtcggcgaagtcggaggggaccaaggcagaggggttcttcgcctcactttccgcggaggctcccgtcttgcgcaggaacttcttctcgttcacgagctcttggcgctgtcaagacgaacatggggaagagcgcaacacaggaaaaataaggagtgtgatcatatgttataaagaaaagagccagacctacacaacagacgcaaggcggcatgatggaaatctacgatgactgcgtaccttcttcgcccagagacgcttagcgcaacgcaggtgcaacggctccggaatgtcggcgttggcccaccccttgaccacgagctggccgtcctcgatctggccagtgcacccgtcgcggaggtggtcgaacgtgtgcgttgggtcgtagcatatgcagagttcctgtgtgaaatcatgcgtagggaggggaaaattataaacagtaatatatactcgtatgaaagatgcatctaatatgtgttgactcaaccgataaatatactcgtatgaaagatgcatacaatattagaaaaattcacttgataaaaggatacatttcccttcacagctgtcagattttgtccccctcagaaacgggttttatagtttccgcgcacagactgactaaaatcatcctgttgaccctgatagctacactgtagttgtaaggggagtcgccgacctatatactgaggacacacaactcgtaatgcgcgcgatcggagtatcacacacagcttgcaaagatgagtttcgacgaaatcttcgatctcacagctggagtgtactttcattttttataatagaaaaattaaaaaaaacaacagctgtgagcaatatgtgttacatcatgtagaacacaggcgtttataaatatactcgtgtgaaagatgcagttggacacaggcaattgtcgctcactccgatgaggtcttctgtggccgaggtcccgctggtgaaaacttcctccccggaagcgttcgtgaccctccggccagcgcagtcctcgaagtgtacgtgcaagttctcgtactctttgggtcaagtatacggacggagagcaaaaaacgagacagacacgagaaaaaagcaaaaacgagacggacgcgggaaataaagcaagtatgagtcccctgaaaaagaaacaaaaacagcaacagcagtagtattcaggcgggttggcaagtgttttaatttcaacgtgcctttgatacgacacgaaagagggctgtgatggtgccgaagaaacatatacgcaggctaacccggaaggacgacgaaaggatgcgattacagagcagaaaagagacggacgccctacgagtaaacgtgaaaaaaaaagcaggtaaaagcggaacaaagccagcgaaatcgcagcagggcgttttcgcaaaggaataaacgttcgccataccgtcggtacatacagcacacaaaatcatacgctcaaaggagggcacacacgctggcaggcggacaacgcaggacgaggaaatgatgcgaggatcagacgagtcacgcacggggcgacttacactacagcagtagggcgcaaggctgcagaagtgagacgaaaaacaaatacgatcgtaggaatgaaaagttgggggaaaaagccagtaaacaccagtaggggaaaagaaggcagtaaacaccaatcaaaagtaggcgctcaacagagtagcagtcgtgcggtttggcaacataccctcagagggcgctgaaagaatgggacacacgtcggcatgcagacacggctggacggtggaaggatgcaaggcatcaaatgatcacacccggcaggcaatccaacagcagcgcaataaaaccccgggcaaaagcgctgtactgctgttgtatcgactattctattatacgatagcaaaaataccgaggaaagaaacgaaagggcaaaaataccatacttacttggcttgccgtcgtcgtcgacctccccgtcaagcttctttccgatggagatggcgccgttgaccggggggatgcagaccacacagataagcttggactgcttcttggtcgagtcgcgctcgggccgaaacttgttcgcggtgaaggggcaggagtcaggatccccctgtacgttttggtcacaggagtaccaaactacaccacgggatgtcaccttctccaggaagcgttgctacgcagaaaggcgcggccacagctgcatataccatttgtagcttcgtgatgctgctgtgcatataccatttgtagcttcgtgatgctgctgtgcatataccatttgtagcttcgtgatgctgcaggctcatcatagcttcagctactgctgtacatcatgtacatgtatacgtgctgctgtagaccaccgggggttcaaaatttttgagagttcgcagttctccactacgcctgggtggcatgtgttctcggggattacgaacttttcttccccagatcctagcacaaacctcgcttagtggcctttacaatggcgacgccggccaggtaatcgacccccccccgtgtgtcggaggtcagagaacacgtaccgaagagataacgcgaagacattagccctgtgtgcagactacgcaccaaacgtctcacagggcatgatttttcggagatctcgtcgtagatctcgacgtcgaggcctcgcgcgcgcgctacggcgccgagcgggcggatcagctgagccggtggttgcaggcgaggcgggggcacgcctcagcgaagaaaccgcgcggaaaggcggtcagaggcgggagatatctgcagacgtaaggatgtgcatatgtgataagcgaactaatatatatatatttacaagggcttcgctcgcggacggctgggcgccgcccgctacgcttgcggaaggaggaaaagacattcagtagaaaggcggaagagaggcacaaatggcgcaactggcgacttgaaaatgccaagaggtccatatatagtacaacggtacaggatagagacgattatgattatgagtttgttattatcatccattcgcccaatccatgatgggcaagtcggaggacttccttggcatatccttccacctctcaggtagcacctatctatgtaggtcctgtacacttattaatagctctctctctaagtcgatcatcaacaataaattatcgcagtgcataaacaccaggcacgcgcttgtcaaggatagagacaggaaaactacaacttaagatgtaaaggagcgcagtgccaaaaaaaacatgctggaagcaggaacttgaacgcacacaccgcaaacatgtgaagtacatttgtattcctgaaagacgaagagcacgcatttaggcatagttctcaaaaaacgatgctggtataataaaccacaacttaacgttctataaagaacgtgctgtcaacattgcttccgaaggagcatgcaggcttgcttggactcttcctcctcagcggaggtacccagcaccttgcactcttgttttttgtcgatggtcttgtggatctgtccacaaacgttgaagcagggcgggagaacgtcgataagtgtcaaggaattagtggggtattagtccgtttgaccacttgcacaggttaaccaatagcttacccaaactaagccttataacactttcccccccttaaacg

SEQ ID NO: 107 - DNA, 20591 bp, unidentified
  source 1..20591: mol_type = other DNA; note = Undaria sp.
gacaagcgcgtgcctggtgtttatgcactgcgataatttattgttgatgatcgacttagagagagagctattgaagtgtacaggacctacataggcgctacctgagaggtggaaggatatgccaaggaagtcctccgacttgcccatcatggattgggcgaatggatgataataacaaactcataatcataatcgtctctatcctgtaccgttgtactatatatggacctcttggcattttcaagtcgccagttgcgccatttgtgcttcttttccgcctttctactgaatgtctattcctccttccgcaagcgtagcgggcggcgccaagccgcccgcgagcgaagctctgtaatatatatgtaatagggtaaggtggccgcccgccgtaggcggcgggacggccacccggagatacgcccgaagaaggtcaatcaatgaattgaggatgagaagtgcgggaaatagagaggaggatgcaggttatgtctattaaaggaggaagtggcatcgatgatacatccccgcgactttgggcatgactgaattgaaacgcggtggccgtatcaggggcgatgaatgtgtaatcagtacgaagtcgttggtatggatgacattagataatgtactgttttgtgcggtgatgcaaacggaggcaaatacagcatagggtttaccttgttgcatgtcatcgtgatgaagtagtccggaggtcccaagtgacggaggatggccatactatatgtataacggcaagcatcaccaaccagtcgcgcaacgcagcgatttttcatgcgtttgtgataaaaatttaatgttgtcgttgctatacaacgcgtttcttttgcgttgaactccttggtgtgtatcgaatgaatgaagtagggctttcggtgacaatattcgactgggaagcgatgcgggtggttccgccaaaatagacgacacgaacgccacaaaataataggacccatgcaactccagttcaaccaaatgaatggcgatgcttttgaaaaatcttccttcatccaatatagacacttatgtgtcgcgtatgtattggcactgaaccgttcttgccacccggcgacatccagcacccccatcatgcccggcgaaggaagagaaataccaggggggtggagaatagctacgagtaggtaccaggtaaccccccccccttcttctttccctctccccaggtatggaaaaaaaggaaaacgtgggaggggaaaaacaaaacaaaaagggctcacaattgtgtcgacaacggtagtagtatcgctgttgaccccccccccccgagatgaaacagacaatcaaacccagggccacacaaaaccaaacggccggctcgcaagcgaagcaaaaaacataataaactcgtacggtcttcattctttgtaaattaacaagaggcaaacttgacacgacactgcagacgctaacctaccacaccaagatgggccggagtgcacttttcacattcacaccatgaccacctccgctttccgtctgatctagttttttcccagttctgcaggcctcaggtcggtgcttttctggcggcacattgcattgggaccgcccctccctcccacgcggggcagggtgagcctcctggcacgcgccttcttgtcgactgtaaccgaggtgaaagaaaatctgagggccccggagtggggccttgggcttcttgggcgtcggttggcggcgccaaactacacagcctcatccccgccgccgccaaaatccaacacctctgcagctgacgccgacacgcctgaacctgccactgcgccccccccttcactgccgccacgaacgccaacaatacctgccccataccaactccgcgaaacagcaggggaaacagcgctaccgacaatacccgcaatcatagcccccgtcagcttcctgcatcctagcacgcaatgcagcatgccgttgactaatagagatcatcgtattcttaacgatggcgtgccctttgatttcatcatagtgattcggaagttgttgggaggtcgacaagatcaaccggcccctcaccccgagcatcaggtccccacaatctcggagaatggtcgcttctcacaccagtgtctgccacgtcaagagcagagacccacccaggaaacatcgggctatccggtgaccagctggccgtgtcgctttagataatatcaaactcaaactgttcgtagcacgctccaatctacttcggcagtccgcggttcttcgcagccatcccaatattccagcgataattgaactccagcaggatcgagtgggccagcgcaggagaagcgcaatagtagcctgcggaggtagcgatgaaaacccttttaaaaaggacaaacagttacagcaggcggaaaacattttgaacaggtgtgcacgtcaggtccatcataacgcgaattacctggttgaccaccaagccgaggaaaaaactcaacatgttacaagcactgcaacaaacggaaccgtgacacaacgtatgtaactgtaacttattgctaggctgttcgttgagacaagctatatcgtgttagcaacactacaggaatgttcctactcgtcaatgttacagggatcgtctcgtggtatcacccacgagtagtcccacgggtatgtacgagtaggcactatgcgaggaggtttaggtattcgactacgagcggttgttactgggctgtggagagttggcccacatgacccactccactttccagcatgtctctccagacggaagtctcaataagataataccttttccccagaagctaccgatttaccaacacatcgcactttagaagcagtacaacgggatttcgaagacgatagcggcacaggagtaggagcccaccttagggtgcccgccacaaaccgcgattaaatggtcgatggcaaattcgaaagacggtatctgctcgttggccagcagcccttgtgcgaagatggtcgtcttgttctccgagtcgacgccaacaaaaaggcacagcttcatgttgtacctaccggcaggggggaatggaaatatgatacggtgatacacgggttggcacaaccatcctccatcgcatacagccatgtgcctacagttggcacgttgcccgtgccccaccgaaccgcgacaacctggaaggtagttttgctgcggaatataacaaagaggttcagcccccccgtccttgtcacgggcaaaaaaaaatgcagcctactactgaacgagccagcatttcgatgcacacatcatatccagggttaagtaacccccccccccccaacgtatgttgatactgtcgctcgtcgcgtcaccaccgaccagatgtcggagttgagcaaaagtagccgtcataaccactaacaacgaccgcggtgctcacctgttcgtcagacacgtgttgtcttgtattaccacgccgccgaattgtctcgccgaaatctgttgctcggctgtggaccacatcaccacagccagctggttgaagctgtccattttccaggtactcttgcaagtggagtccttcagcaatgcctcgatgagcaagacggcatccttcgccgtcccccacgagttgcgcctcgcattggtggacatattcctcacctgcgacaaatggtcacggagcaggtacgcgcggtcgtgaatgcctgatataggaattctgtgcttagtatcccccctctccctcggcgatgtaagactggatcaggaaatagtacaaaaggtatggctatcgtaggcgcagcaacggcgttagacgtccagagaagctctagcaggaaaacgaacactgcgtcccttcctgtaatacgagagcagcggtcaaagctacgcgtacagagaatgccccccctcccctgctcgaaaggatgcggggccagtggtcacattactacggcaagccacagctgtgtacaacacacaacaacaggcaccttgcgtcggcccggcggaccaagtttgaggggggcgatttccagctcgatcaatcggtgcatgtttaggaccctcactccccctgatgtccacgtcctgatctgaccctcccagtcccgttgaattgcggcaacatcaatcaagttgtcctggttcgcccgctgcgcaatttttggcacctcgcactccgggtttgtttgatggtcaagaatgacctgcgcaggcaaatacaaattcacatgatgcggaggtacaaatcaggccccttcgatctccgctataggcatacaggagccgcagatatgatgcattcaataaggattggtggacgaacaacagcgtgtgacttgcgatggccttgtagcaccagccacacctaaaccgttgttgctcgttcagtacaacgctcaccttcgttatgcgaggcggcgcatcctttgtccacgaaacgcagacctggaatagacagccgcactgaaacaacgaacgagcgccccgaacgtgcgccgaagagacgacatagacgaaagtaggacgcttcaggctgatggaaccaaactctaacctgctgcacccagtgttgtggaacaaacgcaagtctggtactacttgggctttaccttgacagaccaccccttcttcgagccggtgttgggtggtgccttgccggcgccttggcacttgatctcatatcgcccaacccgacttgatcccccaccaacctgattcgggattacgccggcgtcgtggggggttagcttcgaacacccgaccggaaacaaaaacggtgaagaaatacgcctcacctgttaccgaactacagaaatcccctcgacagcaacgatgggataccctaatcaacctagggctccaaccacgggcgccctgcaaaaacatactctcgtgctctattttgttcacgttggtaggcacctttttcccggtttttcggaacgttgcacccttgtggcctgcacgatgcaaggctgcacggatgccgcccaaaatcttctcccacgtctcctccggagtgtcgttctcatcaacgctgaaagagaaatctttcactaggtcgacgtgaatgtggtccttgtcgtcgtcgtcttctttgtctgcgtctggtatcaagaagtgttggggttcattgaattccaattatgcgccgaagatgggggggagtcgaacgacgacgcggtatagaaaacgtgtaccactccacaaatctcaacaaaaaaattcgttgagaaagcaccataggtggctggctgggcagtaggataacactttatgctacgatcgagacgtcatcgacttagagggggttttcgtctgcgcgccatggtcacggctgcggggcatccccattcccgtcatcaaaccaaagggaaattcctgcgctgggactcgtggctgtagggtcaatactaaatgtcgtcgcttaccttcgtcagagaagacatcgtcctggctgtcccagccgtctgtgccatccgagtccacgtcttcctcgctgccgctgctggtgtcatcggaatttcgatacagctgtggcgagtcgtgcaaagaagggcaatacaggaaggtagagctctagtcattatatattaacggccagcacgccaccttcatacccataccgctcgaacctatttttgaacagccaaaaccaagctgttcgggacatcctcaggagcctgcttccgaccaacgtagtccccacgctaccaacaaaacgggcacgtaccagcggggattcgaccacaggccaccagccatacacaccttctgcagcgctcgctgtaccttcttgaactgtttccaggcccgcgctgcagcaactctctgctcgccgcaggctttctcgcgatcgttggggccctcaatgccgtcgtctgtctcatctacagcctgttcgatagcatgtagagaaaacggcgcggagcacatcttacaccacacgatatatcggtgtgcgaccggctccccgccaaccaagcacagcaatacggccgggctcccctttttgcctttgcattttcaaccccaacacacgttgctcaccgcgaccaggctgttgagcttcttcttcgcctccttcgcggtggttcggagcgcctgtacgtgacgttcctgctcctcgcgccgcgccatctctgcggccgatggtccaggcaggacgctatcgtctgaatcatatcctggcaccaagtcagggtgagggcatattgcgcgcgttactctagccagcgagcttttattggtttgaacaatgtgctcacagcacgatttttttctttctctttgcccctttcgtgtaccttacctccgcccatcgacaagtcgtcgtcgctgttccagttcctggctgccttgctgctggtcgtgctagagtcgctgtcctcgttacctgggtcacccgcccccccctcccccccgagcatctgcagcgcgcgcgtaggacggcggctagcgacgctttcctcgcaggtggtacaaaacatggttacctcgcgcagacctacctctctactcgtagattgcttatgagcgagcaagcatacacccaagctgccttctcccagaaagatgaatgacaagccatgcgcaacgaacaggtgcgcctagcgctggcacacggcaataataaacgggaacctgcaatacccgccgaaacccttcaaacataccgtatgccagccaactacagttttcgcgaggacattctattggcaaccactacacccaccttcgccatcctcgtctcggttcttctcaaagttttccatgccttgtcgtacccccgccgtgcttttgccgccgccactcgtttgcgtaaaagccgcccgtctgcgagagacgtatcccctacccactcgtgtttgtttcgctccacgtcggcaaccctttgtcgatggtcctctgtcacagcctgtgcgtaattgatggggagatatgcaatcggatatcgatacaacttggttcgagtaacaacggcgaacggtgacctgacaggcccaacaacaattgaaattggtctttttgaaaccaaggcccagcaactataaaaataaaacagcaaatttcgagtaagatcaaacgccagcacacgacagcggcagttaacaaacaacgccccatcactcaccagcttcagcttgtgatacagcgtcttcgccttttttgctccctctctggcctgctcggccttctcactagctgctagaagcgcttctgccgactcctgccgagctttctccaccgctgcctctgctgaatcgcccccggtggcccctccgtctcgccccttcccaccttcgcctccctcctccttgtcgtcctccgcacccttctgcttgtcgtccccctgcttagtgtttgctttcgccgccgcggccgccacggccgccgcagcggttgcctctttaccgccatccgcattttgcctccgttcccacgcagctcgctcagcacgggtcttctgttcggaagcttcgtcctacacaagacaaaaccagcaaagcaaacggcggccaacaatacgaattggtggttagtgcaactatattctccattgtttcgccttgattcaaggtacagacctacacgagccggaggattggtgacgtgaacagcatgtgtcgcggtgttaaagcaggaaggatagtactctcagcacacgcattgccgagatttcgacataaacgccgatgaggtatggtgccacgtatggtgtgatttttcggcaccacacaaactcactttgcaccgtctctcagccatgaaccatggcagatgaacggtattcggatgacactcacatgttgcgaaaacatcggcggagcaacttcgtgcatcggcaacggttgacgtctggcacggtccttgctcgctatcgccgcgaagtgcacccatgtgtcaacgccgaaagttgaatcagcatcagtcgcggcgatagcggcgagcgctttctcttcgacgctgtgtgcgcagacgtctgtcagcacgattgcgagctcttcgaccaccacatccccttcgctgcccatcccaccacgtaaggtgatgttcgtacggtctgttggctggatccaccgagatttgcggttgtcaccaaaatcgcaacctttcttccctgccccttggctggctccccactcgccggttcctttgccttcaccttctcccgcgctagtttatctgccgggaccactagtttcaccgctacaccaagcgcctcggcagccaaaacaacaccaaggtcgccacaccaccttttgtttcggcaaaaccatcctacgttctccatgagcatcccagcgtagttgtcacgctcgtagttggcggtgccgtacttaacgtgaatgtgggctgtgaagtacaaaacgttcagatgaagggggctaccctctcccaccagggcgtcgatgttcaccgagctccaactgagcaccacaagcttcagctgacgccaacacttgtctaagccccacagtgccttgctcaacgcacgccaaaaacagttaccgtctcctgcaacccataacgccgcaaacgtctctcgcaactcaaccgggagggtcatcgttgccctggcgtcgtatgcctgctcgcaatcaaggatgcaaggatgccacgccgtttgttgtgtgcgaaaacaaggacggagctatgttggatctttcccacgagagggtttactggtcaactaaattcgaaaccaaacaataccaagcgcaattaattagacacgtgaacattcggagaagtgaaccgcgtttgtttcttactttttattttgttgtctgtgactagcataacaacacggtatgaattatgtctccggatcggtcctttcgaagaagtacggagtctccaaaacttccgcgagacgatggagaatcgcaggactcttgcgatcaattcagacaccaggagggcaccatcgatagttgtttgatgacatcgtcgcgatcagacaccgaacaaccaccggacgaagaatcgcatattgccgggtcagctcgtcaaaacaaaaagatgacctgtgcaggcaggtcgaatccttcaaagaaacacatcccgaacacgagatcaaggacatcggatcagggatcaacttcaaaagaaaaggccttctgcgaatggttgacgccgttctcgaaggaagtgtcgaagaagttgttatcgcgcacagggatagactgtgtagattcgctttcgactttctcgaatggatctgcaagagggggaatacacgaatcgtggttcaagaccaggtcatacgttcttccgagcaagagctcacagaagatctcgtggccatcatccatgtgttttcctgcaagctgcacggaagcaggaggtacaagaacaaaggcaagaaagatacgtctcaaaccacaaaaggagcaggagaaagtgcttcggaaatggatgaactctgctcgacaaacctacaacgaagccctgcgactcgttaaggccaagaaggccaaacccaacctacttctgaataaactcgtcgtcacctcccatgaaacggacaagaactcgagactggaaagcatgaaatcgacaccggctgatgtgcggaagtcggctacccgagaccttgtgaagaacttcaagagcgctcgtgctgcgtacaaagctcggcttcagaaagtcaggtcgggaagggtgaggatcaagaagatgcgcaagtcggggaagttcaacgggagacgccgctacaagaagaggaagccgttcgaggtgaagttcaaggccacgcgactcgcatccgatcccattgaggtcgaaaagaaatcaatctcttttgagagtaacatggtttctctttttggaacaagtaagaaacactcactcgaagttcaaatgagcgaggtgttctcggaagagtctggtcagcacaagccgtctcaaagctgtaggatagcctactgctttggcaggtggtacatcatcatacccgaacaagtacaggtcgacaaggcgaccatcgacacatctacggaaccacgtgtcatcggcatcgaccctggtctttaaacggtttttacgtgttcttctagcgcgggagaagttctggaagttgggatcgaaacccggaaccgcttcgagagggaacaatcgaagaagaactcaatcaccaagaagatgaaagatgcagcgtgctccaagagaaagagaaatctacggaaagcttggtaccgctgtcaggcgagagccaagcatctcgtggccgacctgcactggaaaaccatcaagcatcttttggatagatacgacgtcatcgtggttggaaagattggcacccaatctctcgtgtccaagacagggcagtctgccagcaacaagaggatgttctcgtacttgagccacttctctttcaggcaacggctgaagtacaaagctgggcttgtgagcaaagtggttgttgagcaggatgagtcgtacacttcacaagcgtgtttccggtgtggccaccttaagaagaatcttggtccagcaaagacttattgctgtagagagtgtggacatgtgatagatcgagatgtcaatgctgggtacaacatcatggtgcgctgtgcatccgagcaccatgcaacggaaagcatcgttctcggcaagcgcaagtcttagatgtgctaacatacagggcctcgtatacgctctttaaagtagcttaagcatgaatgtgcgtccagcgtaagatcgaagctctcccgaggctttagaagcagaggggatgagaatttctggcggtatccacttcgttttcaaatttggcccgtttttaataggctgtttgacaagggttggcgacgtttggattcaaagctgtatacggcacaccggtgattcaggcaaaccatactgtaaatacattggattcaaaggtggggtatccgtacagacaccatcaattacaggagtgtcccttcagggttggtttggggggctcgggtcacatcatgaatggaaacttgttgtatgccggagggatatacaggcagcaacgccgtcgctaacgctcttcccctggttgctagcgctgttccccttctgaacagagtgacgaaaactaatatcaactcagcattgcctacctcatcttccatggcaatgacccccgacaaagctggcaccacgcctctgcgacagccgaaaaccttttgccaagagcaacaagtgccgacgaactcctccagcgtcttcatggcggggccgcctttcccttcctggcccaccacgttggcgatcatgctgtcaaggcgatggagtagtctccctgcctcctcgtctaacatcacataaccagcggcctggacaaacacggcaagcaaacgcgccgccagtcatggcacacaggtcttagcggatagcagtagcagcaccaaatgactttttgcaacacaaccaaatgccgattaaagtacttacgattctccatccaaaacatgagccgcctctccacgcggccagccatggcacacaggtcttggtggatagtaacagcagtgtagcaacaccaaatgccctctttcaagtcattacgattctccatccaaaacatgagcggcctctccatgtaaccttgaatacgaccacaaacgggtttcatcactgccaggattttgaaatcacccacaggctacaacaagtggccgccgtccacgacacagcccatatacaacagctcacctcctcctgggggtttgacgttggcaccgcggcgtgactgctactttccctgccagtatatcaggcccagtatatcatgttacaagcccagtacggcacaagtcagcattggtacccgctgtggagcaccacgggactacatgaacatactccagtatgacgaggaggagagagaggcgcggtatgtgtgaacctacagcagcagacattttccattgcaacgaacaccgtacccgtatgtgtaatcaggcccgtgtaatcaaaacatgcgatgcgctactttagtctggcagtacatggtagtacatggcagtacatgcgtggcctagcgctgcacacacaagccttgagtgaagtgggttagtgcgtggagaaaatgactgccaaatagattacgtggcatcatgtagacttcgtggtaccgcagtacagaagcagtagcagtagcagtagcagtattagcaatagcagtagcagtagccagtagtagcagcagcagtagcattagtagcagcagtagcagcagtagcagcagtagcagcagtagagtagtgatagtagcagcagtagtagtatagcagtagttgcagtagtagagtagtattagtcgtacatacagtggtggcagtagcagccgagaggtctgcaggggtctcattcaaacgcccccaaaacgcgcccgcgaccaagacctggacgcatttagtaccttcgcgtctagaacaaactctcttgctttcgacaaatcaccggagacgatgccggcgtagggcgcgtgctgtgtatgttttggggcgcgcaggtacatagtctacatcgactacatgtagatcttctatgttgttttagacaggcacatgatatattgtaagttatgtggtccgccgaaggaaatatccggtgagatcacactaccaggtcatgaccaaagcgtctctagacaccagggggggggggcaagacggttgccgatggaatcttgtggcacacttccccacacccacccttgtttgctgctggggacctccatctctccggcggcgtgtggaatgctcctcgatttctggctccgggacgctttaatttcgacctagaaggcgcgtacgactcgggtagctttgctgtctatccccgttgctggtctaccgctccttgtcgtgtgtatggcagcagcagccagcagcagcagccagcagccagcaccaagttttcaaacacagcgaaccgtaatacgatggtggaaacccggggattattttatatgtccccgtgggcgaggtttagattccgcctatgtctgcgagattatcactcccctggcagattctcaaactttgcctcgcatggcatatttacggcggctgccggcgaacgtttagctgtgctggctgtgtgggctaaactcgcttacactgacaggtggttttgcgccctgcttgtccttctgaacaagccgtggtttaagttgtcgccccttctccaccctgggggtaagtgccttcatgtttacgtcacagagaggtagccttaattcccggtgctcgtcgatttagtttttacttcgattttttaacaaccggcactctccagttagtctgcactctcaagactatgcaaatccgcatgtattgtgtacaaggtatatattccactgctgtacgacactccgccagcaaccacccgatattccaaccccgcgcaaccgccagcaggggtgacagcagtcgaccgctgtcccataaacgccaagcttaccgctgaaacttacttgttatgcgtgcgtcttatccccaactagagagtactctcccaacaacaccagtaacttacccgtacactgggaaaaaccgcatttgtgtcttccgggctggatgcaattccccgtcccgccaagcgatattgacaacatcctttagcatagggatacaggtacctttcattacctttcattcagactgactcacaaatttatgttaggccattgtttatggtaccctgatccaggccccattgttcctgacattcgtttcgccgcctgagggccgttcttatcggagagctttttttgtcctaatttgcataatttgcataattttccacatttcgtcttaaaatacggaggcgttctgtcataatttaggaaattcagccctaaaatatatggaaaagttaacaatcacaaattaggaaatcctgtcgtcgatttccatatttcgaagacaatcagtgctccgacaagcgccgtggctcaacgctgggaccatcgagtagcttcaaacgttgaccagggtggtccaacgttatggccgatggaaggaagcggcctgggcctccggaggactcatcctcgagtcggacgaagcaacgattcagccttcccaattatccagacacgaggcgcagaaacagaaggctatcgctggtgtcctcgtcgcgttcggcatgttcctgacagcaggagctacactctatgctcccaagacacgggcgcctatctacgagccgccccgtatgacatggccagagttcagagaagatctacgtcggcgcaaggctttccgcaggactgttcgaatgtccttggcgagcttcgtgaagctcgctgacctgcttcgtccagctatccaaaagaacgagcgctttggaagtgagtatcacgtgaggtaccctctggtacctggtatacgagtacgtagtttgtcttcgcatcccaaggctgtaccctctgcagcctagctacgttgtaatgctcagcactcgcttgcagcatctcccatctaccataccctctgtatatgatagtttgtatgcctggtacgttgcacggcaactcgtgctgctgcaaggcggtatgtactcatgaactaaaaaccacctgtacatacgctaagtaataaaacatcagctgtgagatagatttttcacaaaaaatcccggccataggacacatggtacggctacgagtacgtgctacgtacatacgagtacttgataccggcaccaggtacctggtatacgagtacgtagtttgtcttcgtatcccaaggctgtaccctctgcagcccagatgcgttgtaaggctcagctctcgcttggagcatttcccatgtaccatcccatctgtatatgacagtttgtatgccctgtacgttgcacggcaactcgtgctgctgcaaggcggtgtgtactcatgaacaaaaaccacctgtacatagtctagtcaaggcaaaaaaacataagctgtgagataaatcttccacaaaatcctggcacatggaacgactacgagtacgtgctacctacgagtacgtgataccggcaccaggtacctggtatatgagtacgtgggtgtatattttgtggtttacggagggagctacctggtatgtgttagggttatggcagctgttcgtacatacagtagcactgcaacagcagtagtcgcgttaggcaatgcaagggtagtgcattgcggcaagcaggagtgcgttgcggcaggcacagcaacgggatgagcaatgctgctgtaccggatggggttggagctcgatcgaggtggacaccaacattctatcgtttttgctcttacccaggactgcattgcgcgaagcatggagctatcgaggtggaaatccggctggcgataggcctgcgaatgctggcggggggttcctacctggatatcgcaccgaggtttggcatttcaccgtccacggttttcaccatcatggagaaggtcgtcgacgcgatcaacaacacccctgaagtcggcccgttcttctttccgcagacagacgaaaagtgccgattttttgccgcgggattcaaggtgagggtacgtgtactattaatacaacagcaacctgtcacagcagcagtagtctatggcgtagttatgcaagctgtacgaaagagattgaattatatagatatggtttccgaaggcaggcctgcttatttcttcgtgaggaaccttggttctggcgtcctgatgtgaccccctctgaagcacgcctccccggccctgttcttgttcgtccatatgtcaggccaagagcaccaacggaatcttcgatcatgttgtgtctgccacagatgatctgttgatcaatatgaaaacgccgcctgcaaagagcacctcccacaccgtatcgtacttctcaggcagcaagacgggattcggctttaacgtacaggcgacgtgcgatgccaactatcgcttctgcagcgtctcgatcatcgctccgggggctgccaacgattggtcggcgtggacccgatcttctgtggcaaaggcaactatgcgccttccagacgggtaccacatcaccgagtatgcggcgtacccaatcggcgacaagttgctcacgccgtaccccgggaaaagcttgccaaaggaccaggactccttcaacttctacctgagccacctgcgggtgaagatcgaacagtcgttcggcatcgtcgtgtcaacgtggggcattctgtggaggcccctcagtgtagggttcgcaggccggactgacctgatcgtcgccctcttccacctgtaaaacttctgccgacatgagcaaaccaaagtggtcgcgtcggaagaggactacaagacagaaaaggggcgaatcctactggcgacgggcggggttctgccgcctgcgtgcaagagtgcggtccaaccggcaggcccagccgccaaacccacgcgaaacagcgaaactcccacgcgagcggcgaccacttcgctcttagcctacaacagacggtttcgcccgaaggagaatattctcaggaacgcctagattactacgcgttgtataatgcgtaggtagagagtttgtcggcatccgaacgtcgtacggcggggcgattgtgcggtacaaggaggatgggaatggcgtgtggaagatgggaggtgggccggagtataagctgttggagatggacgtgatggtcgtcaacgggtgagcgttgggccagaaaaaggacgagtgtcaaccgtggtgatgaacgtctgatggcatggccttaataatactgaggcggagggggggggggctttggttgttggattcgatacatacatctgacggcgtggtttttctaatttccaggtggtgagttcgaagacagctgcctatacccccccccctcccccagttattattgtttgtcgagcgtcagaaacaagagccccacccccccctatcttggtttgtatattatcgtgtaaataatggtgtgttttatcgtgagagcaccccggtgcagccggccaccgttttgttatttttgaataggagtgcagggtgttggccgtcgagcatcagaaacgaccccccccctcatctctatttttcaaatcctgcctgacgaagcagtggagggtgtaagtttggggtttgtcgtgagagtaccacggtgcagattgcccccttcttttttgtttgaataggggtgcagggagttatttgtccatcgtctgtaacgaacccatcccccgctctcgttttttccctcccagtctggtggagcggtagagggtgtaattttgtggcttatcgtgagagtaccacggtgcagcttgcacccgtttcttttttataggagtccagggtattggttttggtcccttcccccccccgttttttcctcccagtccggtcaagcggtggagggtgaaattttgtggtttatcgtgagagtacaacggtgcagctggcccccgttttttttgtgttgaagaggagtccagggtattggtcgtcgatcgtttgaaacaaagcccaaccctctcgttttttcctccctgtctggtcaagcagtagagggtgtaattttgtgctttatcgggatagtagcacggtgcagctggcgcccccctttttttgaagaggagtccagggtattggttgtcaatcccccccccccaccccaccccgatttgttcctcccagtctggtcaagcggtggagggtgtatttttgcggtttatcgtgatagtaccacggtgtagctggcgcccccccccctttgtttttagaggagtccagggtattggttgtcgatccccccccctcctcccgtttttttccccccagtcgggtcaagcagtggagggtgtaattttgtggtttatcgtgacagtacgccggtgcagctgccctccccttttttttatatataccaattcagggtattggttgtcgatcgtccgaaacgaagcccccccttccatttttttcttttcagccagatgaagcagtggagggtgtgagttttttttttttcgtgagagtaccctggtgcagctggcccccgttttttttcaatgagagtgctatggaacctggtctctcacggggtcccggagtcgaagtggcgagggtggtcccggaggtctggtactcgtcgcggatggtcggtagtcggagcggagaggtcgttgcagagctgaagtcgaagcggagagggcgtcgcggtgctgaggtcccttgacgatcgttctcaacagcgaacgcgactgaaaacctttctttcttatatgtagcaaggagatgctaagccagagctagagtgacggtgggcatatgcccttcgtcatgcggcgggatcatctttcggcagctgaccttccggggacgggtcaacgccgtctatgacgggtgacgccgttcgcgacccgggatcgtgtattgcctgaccggtgacgtgtcttctcgcgcatgcgtgtacgcgatctacgataggtatctacgaccctgtcttccacagtgcaaggttttgtttgtccattgtcagaaacgtagccccccctcccctaccatttccctccgcgggtctatgatcatacgacttcgaccatgcacgatttcaacccctgccgccccaccccccccccctgcccctttcggtttcctcccagcctcataaacgaatggagtgtgtaatgttgtctgttgtcgctgaaggaccccggtaaagctgcctccttgattttttataggagtgcctgcgattatcgagcgtacgaatagaaagtgctctttcccccaatatggatgcgccagcagtatttttattctatgatatatcgagggtacatattcgtttcttgtaatgaagaggacgccggagaaccttccgcctactccttgttttccgttattcgtttgcaacagagcggtaggttgccgagcttttacctgtaagtgcccctttacccgcgttttgtgctactcggtttttgatggggagcatggcgtcggatgcttgcattaatatattaagcacgtggaaatgaatacgaggggtactgacgacgtcactggacctaataacatctgcgtttcacaggatgtgttcgcgatacgacgacgcatagtagttactggagatcgtaataaacatacttccgcgccacgatgacccagctcaacgacttcaataggattatgagggctcctgcatcggattcagccacgatatcttctgattgaaacccacacgtgtcccaagctgaaatgcatacgttcccgagggaaatattttctgatactggaggggcttattagccgatatattactgtggtttgatgggacaacaaaccaagacagggagtactctcgcttgccaatatcgaataccccgtatgctctataaacctgcacgtgaaaaataaacacgtagtgagctggggccagctacaacggggtactctcacaaccaaactcaaaattacacccgccactgctcaaggagactgcgaggaaaacaagcgggggcgagggggggtgggcttcagttttgacgctcggcaacaaaataatctttacacctaccaaaaaataaaacaggggccagctgcaccgtggtatgctcaagacaaatctcaaacttgcaccctccactgcttgaccagactaggcggaaaaaaacgggggggggggacgacaactaataccctggactcctattaagaaaaggaggggggggcgccagctgcaccgtggtactatcacgataaaccgcaaaaatacaccctccactgcttgaccagactgggagaaacaaaacggggtggggggtggggggatcgacaatcaataccccggactcctttttgaacaaacaaaaacggggcccagatgcacaagagtactctcacgataaaccacaaaattacaccctccactgcttgaccagactgggagaaacaaaacggggtgttggggggggggggatcgacaaccaataccctggactcctataaaatataaacgggcgccagctgcaccgtggtactctcacgataagccacaatgtttcaccctccactgctccatcagactcggaggaaaaaaaagggggggaagggggggggtgggaatcgacaaccaatgattctcgccttgagcacgacaggcgggattgaaaaaaggttccccggtgcttgtcggaaacaatcgactccagtaccagcatacaacggtgcttcgacctccgggtgttgatggaggacgcatcctccgcgacatcttccttcctgatgacggcgagcacatcagacgccttgcactgatttcctccgtacctcaacgtaatgttttcgtcgacagagtatgacttccccttcatagccgcgcaaagcgtaagaacgaccccccctgggatagtttctgactggaccggtgtgctcgctttgacttgacctgtgttcaaaacgtagcgagcatcggggaaaggcacaaactttaaagtcatggacgtgtgacgtaaaatcgggctgcgcactcgaacgagtagcctgaaacagtagagataaaaaaactgcgctatggagcagtatactgggttgcatcagaactggaagcgtatactggcagagtggaccagtacaacacaccaccagaaatataataccacctggcaatgtat

SEQ ID NO: 108 - DNA, 18323 bp, Rhipicephalus sp.
  source 1..18323: mol_type = other DNA
agtgttctctggctcagcagccaaagcggttccgccgctgtgcacgacgaaagacgtatgcatctagatagatagatatactcaaagtgcattcggttcgccaagaagtgttgcgcataaactaaacgaagattcgagaagctccacattatagcagtatgaatactgaaaaaacagcggagctggtgacacatgcccgctgttacggcgcgacgccaacacgctcctgaaggcgccactgctctgaaactcgccgctgcaaaggtcactggctgttaggtagagtatgtttctcagctcgcgactgcttctgcgcagagctgacacagaacacctagcagtggagctgagagacgagcaaacaagacgatcgtgagttaaagcaagctttgtgtacagtatagaaatagaggcgctacatattcggcactggggcagacagcttaggaactccaagagccgagatgtcttctctctgacactacgtcggcttctctatgacgcatagctcgactgcttatcgacgcaccacttggcttttttttatagaccccgggtcatccattacgtcacccaacgtccaatcagaagcgccgctggccgtgatgtcagattcctctagtcaagaaccgccactgggttgtatcatgatcctcgaatccggagccgctgcgctgggttgcacccaagaaggagtgatgttgccacgcgttgggtaaggctcgccagactcgacggtgccacttgcttcatgggcccgtgggctgaaggagctcgccgtgcgttgcgtaagacagaccggcaccggcgcttgatgacgtcgttgagttgatggcgttggggtgagctcgctcgctggccttgacacagattgcctttgcagaggcaatgacgttcgtgtggactcccaggaacgccacttttcctcaccctcgcttcttttttccgccgcttcctatacaaaactacgctatgctttattctcatacctactgcctttcctcctcgcttcattcgtcctcgtcttttctagcctttcccaccccttgttgtgccttaaaagataatgctatatttcactctctctcctcatttccctcctcctcacactcacgtcacacttcaccctcactttctataccatatagctgtgccatgcttttcccactcccttcctgctttccttccgcacatacctcctccttacccacatttcccttttcaaaccttgcagtactatgcatggctatgccatgcactcttaaaaaaaaagttgtagtacttactaagttcggattactaactgcttgtcacatacgttactaaccagttggtaaaagagcctagtaacggggaggttagtaaccgttactacctccaccgttactaacgcaatggttactaacgtaggtagtaacggttgctaacaaaaaaatctactaggcgcaatcatttcacctcacaaatcacccttttcataacagtcctattcgcgagcatcaacattttgatatatcgtgcactgagtaattatgcacataaagccgtaaaaagagcagcacacatacacaagtccacgcgagaagtacagttccctaagcggtaccaggagtatttagagctccgactttggggaacgcagctggtgccggtgggcggctatgctgtatataggatgtatatttaagtaatgagtttttatttgtacaacgtacagtttttttaggtgagcgaggtaggttttcgtagagtaggtaacttttaatcaaggactttttatcaagattaaaaaacaattagttatgtctattttgcataataccacctgaacacggcctaatattaaggcataagactaggtcagtaagcctgcttatattgcctcaatgaacttgaatgcatccccgtgctactaaataggttgttagacgctcgtagtaataacctcaaattttttttaacaagttcattaagtacgtgcatgacaaaaagttactaactgtgcgcaaaacgtagtaaccgttgtaaccttcaagaattaatttgctaacgtgggtagtaaaaggttagtaatggcacaggaaggttagtacagctgctgttataacaatttgctcgtggttactagcttttactaacttacttttaatagtgtgttgtaggagctgcaatgcacacccgctttcagtggcgcaaattgactcgcccgacattgtgccaacgccacaacgagtgaaaaaaaaaaagtgtcggttgcggcacaccgattaccaacgtacctttttctggcaaaaccacgggcgtgagttccgttggtgggtttagcgagtgcagaagagccgccattgcttgttggtcctccgactgcagtgtttgtcatttccatcttttgcgttgataggctggaaaaaaatatgcggaaaaaataacgcaaatggaatgctgatatgtgagctcacccttgcttactccgaagcgcaatatataaagtatttctctgcttaacacctcttttacgaaacaactcgaatgggtgcagaaccagttctgacttcaggccctgacttatttgtatccgtttggccaatatagctaaaaaaagtgcacaatttgcattaatcgtaatgttcttttgttaatctaatgaacatctgtttcatataatatgatgtgtaattcttgagatgtttagaaaatggtaaaattaacatcctagggcttctttggaaaggatcgccttactatgtagttatattctcaagctatacgtatattttctattcatattcaacggctggcgaatatattttgcagctcaacatcggcgacgttaatgaagaagcattttgctaccttctgtaataatcaaaatgactcccgttaataaagcctgcacaaaatgcgttttgtgcgtcgtcttgtcagtgaaagatcatttttgtacctggtgtctcagttaaaatggctctcaaggtattaatcaagatcacacaatgtgctctttggatgatcttgttcttttattatcacccttccgcccaagttctccgaacaataaaagccgagtttccaccatcttgaaagttgctattgactaccgttatcgctgtgttatcagaaacaaacaaggaccatatgagctgtgatagttggctctttctaagaggaggagaatgtgtgggtcaacgcgtcacattccttagcatacgccctggtgacgtcatctgtggaaacatggcataccgccctgtggtgttatcttatagcgagaaagtcgcgaaacttagcgtcttttcagtcgtgctagcgacaattctatctcttcgaagtcttagcgacttttttttcggggggggggggggggtcaacatttgaggtagaggtagtttctacagcagagatggaaactagcaaactgtcggaacagtggaatgctcggaacgagtttcaatgaatcaggccaaagcatacaggatcatatttgaacacaacgcacgactacaagcacacaaaaggagagacataccgcagcgctctcctcttgtgtccacatagtcgtgcgcggtgttaaaatatatgttcaagtactgtcaccaactggcccagctttcagcccttttgcatacaagatcaagctgcttgtggcgctgtaatctttagcgtgcaatgtggccgttccgggcactccttctgttcctgttagagagggcaaagcagctcggctgaacgcctcacggttcaccgctaacggtggactatacagctgctcactggctcgcagtggcgtagccaggagctagcagcgcattgattgattgattgattgattgatgattgattgattgatgattgtatggggtttaacgtcccaaaaccaccatatgattatgagacgccgtagtggagggctccgaaattttcaccacccgtggttctttaaccgtgcacccaaatctgagcacacgggcctacaacatttccgcctccatcggaaatgcagcggccgcagccgggattcgatcccacgacctgctggtcagcagccgagtaccttagccactggaccaccgcgcggggcaagctagcagcgcagtccaacttcattcagaacaacaaaaaactgatttcaaatgttcattaaatgaaaaataatctcttcacgtggtttatcaagtcaagaactactgaagcaggaaaaaaatcatcatcgtttagcgacatttgtataaattggcgacgtttcggaagcgttttggcgactatgccagtaaaagttaacaccactgcccagcggccgaactagttaaataagtcacagctttgggcaagtaggtggcgcgctggtcgccgaagagagagaatgggcatgattaagaagtccgcactagagacctatcgaacctttaagcaggaaattgccaaggaaaggatctatatatgatagtactcggggtagttctctactgtgttgaggccaggacggagtacgtgcgaaccaagacatatcgggccaaatacgaaggggtagacacagtatgcagtgcgtgtggagaggaagaagaaactgccgaacacttgataatgttctgtaaagggcttcaccctatagttcaggatttggcgcagagttttcaaagcactggggtttagggaccgggagggcaaaataaactttaagcgggtagacttaactagaaggaggttatctgattggtggctaaagtcaaggcacgagtgaaaattaaactcttcactgcaaagtacgaatcctcaaactcactttttaaagaaaaaaaataaatctagtttttggttcattaagtattacggcttggtggcgctagccaccgcccgatctaaagggtacagcccatcatccatccatccagagcggacgcgcatcacgtcggctctcgtcttccaagaactatttgccagtgattttcggtcattcagcccatgaattttacaacaacgcgtgcggaaagtgaccaggattcctgacacaccaaatttcaagttggaagggactttttgccggattcgagaggttttcaacccgcgcccctttggcccgacgctcacgcaagccggccacccgacgagacgcgctgagcgtctcctctgacgcgggcgctttcttcgcgccatcaacgatggaagtccgagtgaacggggaggatatctcccccgaaaagtttctggagggcacggattggtgcaccatcatctaagacccaagttaaccgcgcaaacgcgcagagcaacacccagaacggagctccctcctgcaccggcgagggagcggactgcaaccgacagcgttcgcgtcgacaaccgcgtaacatcaagcagcaagtcattagaaagagcaaatgccactactccccacggagcgagttcaagatcgtgatgcgaccacgaggaggcctcgacgtggccaccaccggaaccgtgccgctcgcaccggcgatttaccgcgcggccaacgtaccaacgcatgaagcaggggaggacacggtgtgttccaacaaccatcaaaacatcatcgtcgtgtgagcacacccatgcctctcacgccgataagtacagcagcttcaagccatcaccatcggcgaccaccaccacgaggttagtgcgtacgagatgtcccccgacaacacggtgaagggaataatcaagggcatcccattggaagaagacgccaagtccattcacaccagcgtcgttcacgcacgtaaccttactccctggcagccaaacggctcagtaacaccacgaccatcatagtggcgtttgaaggatcgcgagtgcccacttacgtcaattatggcggcgctctccttcgctgcaccttgtatccgcaagcaaatcgacgtgtgtcactgctgctgcggagacttggtcaccgcatggacgtgtacacaaagcccaaggacaaagtgtgtcgtggttgtgacgcccctaacccaggccccaaccaccagtgttccccccattgcaagctgtgcgggggcgcacacatgacggcggacccaactgccgtgcaaggtagaaaactccctacatcgtgacgaagagacaatgggaacgacgcagggccaacgaggaggcagaggccactgccaccaactattccaccagcaggccccgctcaagatccaggacacccagtcgaagccactcccgatctcgtagccgcacaccgggaccccgaaagcagcagcaacgccgagctcgcagccgaaaacctggccggaccccaacgagggacgccaaggcaactgagtcggtgagctttgcagatgcggtcaaaggaaaacgcgcaacaaacgcggaggctggcggcaaaacacacactaagatagaggcggagatagctcagttgacacagacgatacaaactatgcaaatggaaagcatgcaggcacagattcacgcaaaagacgaactcatacaaaagctccagtctgccgctcacagcgagactgatcaacaggcaatgcaggaaacacaagaacttattgaggacggtgaggtcgacggccatgatactaaacgcggaccggctatctcccttaaaaggtcagtacgttccaagcgtacgcgcgcagcgatagggacacgcgagtgaaagcactcgaggctcgcgtgagcagtctcgaggaaactatcaccgcgactatcacgcgtacgattcaacaaagcttggagagcatttatctcagattgtccagattagaagctgccaacagcacgctggtgacgtcgcatagcgaagcggcgccacacatgtagcaccacataaccatggcaagacactcttcgaaacaaaacatacaatatggcagtggaactgcagaagttacaaaaacaaacgagcgcacctacaaaatacctgaaaacaatccccgaccgcccaggcgtcatcatactgcaggaaacaaacggccccgctaaattttcagggtaccagtctataacaggcaaggcggagaatccaaacgtcaccacactggtcaagcgagagctcacggttatcgaacacgacacccaagtcaaggatattgaaaacgttctcgtagagctaattccaccgcctaatacaccctaatgcatcttcgtactcaacgtctatagcagtccgagatgccgcaaacactgcatgctttcacgtcctcttcaaacgagcactcgatatcacccaggggcaacaactcttcattagaggcaacttcaacgcggtgcatgcggcgtggggttacaaacacgatcagccgaaaggcaggcatttgtgggaaacggcgcaactcgccggcctcgggctggtcactgacccagcggcaccaactaggcagggcaacagcgtcagcactgacaccacgccagaccttacctttacgtgcaataaacgaaaggtgacttggagaaacactatgcaagacttgggcagtgaccattacattatctctatagaagcagaaggtggcccacaggaacacaatgccggtcgccaaatgaagatcactaattgggaactactacgaaaaaatcgagacaagcaacagattgaagacatcaaagacattgagcaatggaccgagcaacttcggcacgacatcgagagggcgacgaaatgatgccgtcaacagctggacttgatagaatagacacccggttactgcacatgtggcaagccaagacccaactgcatcgccgttggaaacgacaacgatataataggagattgcgaaaacgaatagcacagctcaacaaagaaatagaaaagcacgcacttaacctgcaacaacagcaatgggaagagaaatgcacgcatatggatggtcagctcactacgagtcgcgcatggcagatactgcggtacctcatagatcccgcgaacaccaagacctcacagaggcaaggcatatgcaaaatcatacacgcttacgaggaaacggagcaagatttcctacgggaagcggaactccattacataccccgaatgcccccgcaagtacatccggactacaggagagaaggcaacgccatcctagacgcagaattctcaatttccgaaatcgaggcggccctcgtcaaactcaatgccaagtcagccccaggcctagatcgaatatcgaacagggcactgcgcaacctcgattacagattgctagagaaactcacagattatattaacgagtgttgggtgcgtggaaagttaccccagccatggaaagaagcgagctcatactttaccgaaacccggcaagaaattgcagctgcagaacctgcgccctatcttcctaacatcatgtgtaggtaaactgatggagcatgcgttcctcaatagactaacagattacctcgaggacaacaacctattaccacacacaatgattggattcagaagacatctctccacacaggacgctctcctgcaactaaaacatcaatcatagaaaatcctgggtgctcaacaagagccatccttggcctggacctgaagaaggccttcgataacgttcgtcacgacgccatattgaacgatagacagattgaagctcggaatgcgagtgtacaactacgtccgagacttcctcacgggaccacaaccacacgcgtgcgagatcaactagaatcaaatcaaatcaacattggaagctcagctacaccgcagggctcggtgatctcgccggtgctcttcaacctcgtcctgctggggttacccgagcgattacatcaaattgatggactgcaccacacgctatacgcggatgatattgcgatctggacgacaacaggcagtgacggagagatcgaggattgcttacaggcggccatagaatgcgtggaacattacctcgtaggcacgggactcacctgctcggccaaaaatccaattactgctatatagaaggtgaaaaagggacgcccgcccaaagactacgtaccttcagaaaaacaagaaatcaaactagcatcatcaaatggctcaccaatcccaatggtaaagaagatccgttggctggggatgagtgattgagcagaacggcggcaatggtgaagcactgcgcaagatatggcaaaggcctaccagcacgatgcaactcatccgacgcaatcccgaacaaacatgcgtgcatgacgcgaaggcagcgtcatacgactcatacaagcctttatttccatgtacacggcaccgtttccaccaaatggacagttgcggaaaaaagacaagcttaacgccctgatacgcaagacgtacaagttcgcgttgcgactggcgcccggaggttagcacccagcaaactcctaaagctagggttgcataacaccctcgaggaactcgtagaggcgcaacaagtttcccagctcgagcgcctatccaagacccgcccaggccgacggcgcctactcgaaaaacttggaatcacgtaccatacgcagcactgacatcaaagtcgaaattccaagatcggtacgcgggcaagtatacgtacccccattgccttgcaacatgccccccaacaccatacggaacggcgtaaagccagggcacaacgcattactcaaagctactccaacgacactgaagcggttttcactgatgccgtgcgttatacgaataaaaatagtttcgtggtggtatatagttaccggcaatcgcggcaagtacaaacacaagcctcactgttgtttgggactccgggtcatgccggtctcgttttcggtagctggccccgtcgcagaatccatcgtccaacaattcagcgagaaagaagcgcccgaacgaacgacagagatttatttacatgtggagaagtgatcaactgatccaaagagagagagagatacaaaacgtcttcggcattttatagcgtcgcgttgccaacactgggcgcattggtccgcatcgtctagccaatacggtggccccggcaccacgggccacgagggagggggaaacacacctcaccaacacatgggagtggcacaacctaacacgatgtccatatatgtcacggcgccctaaaaatgccccaaacatggtcacgataacgcacagcagattacggattctcccggcgagaggggggagcgtgaatggggaggtgggggtcgacgacacaggtcggtcaagaaccggttcctccccgcaactcctcttgcttggttccctaggggccggtcgtaacactgtgaacatggcacacgctgaagcggcagaggaagcggcactggcgctcacacagaccaatgccacaaacgcgattagtgattcgcgaaacagcgattcgcatttgccaacgacgcatctcgcaagaggtgtttcacatactccaacgacatccatacatccaggagaggttcgacttcgatagccgaagggcacctgttatggatcccggcacacaccggactgagcacccccaacgaagcggctcaccgcgttgctcgaggcctcactcaaccgagcatcgccggaggacgacgagcccccgcggggaactgcaggacatctgggcatgggtggatcgtatgactaggttcacgacatcaccacacattaccagttacaacgacgcatatgcccatcccctcacgaaaggctaaacagaacgcaagcggtacacttcagacaattgcagattcataaagaaaaccccagactcatgcacgccatgtatccagacatatacgctacaaacagatgcacgtcacgtggcgaggttgccacccttagtcacatgctgtgggagtgtcagggcctaataaacaattcgaacgattcatctcactctttcaccgccagcctccgctcgcgttggaaggccgcactgctcagctcgaacctgacagcacaactctgggccgtccagcgtggctgaggaagccgcttcgagacaaggtctcggaaccgcatccgcggtgggtgcccaggcccactaaaaacgccggactcgaatcgtctggattcgacaataaagtttatgttattctttggcgcaaaggtgaaaacaatgaacgtggtagcaattattggaaggtcacacccagaatggcaagcaaatcgaaacatgcgccgcaacccttgcgaacaaatgacgcacgaaacgtactcacaggtacagatgaacgcgaataagcgtttcagttgttacttccttgtgtctgaaaagcgtgctcttctcgcagatggagactgtgcaatgatgatggtggtggttgtggttgtaaagaaaaggaaaaaaggcacctaatttctgtctgtctcaggggcgacacggcgcaggtgccttataggggtgggaggaaggagggatagaaataatagaatgaaatagataaagaaatagagaggcaagcgacggacaaataggagataggaaagtggggatccgatcgaagcagtccaatggcgggggcataccacaaaggcgagctgcacggcgtcaggagaccgcggagggcgaccgtgcgggagctgcgatgtcgtcggagattgcgagggcacgaccgtctagcttgaagtcctccgagcaatgactgcagtgagcctgcatccgccgcgtcccaaactggaaggtgttctgtggccgtccgcgatgcgtcgcctctgccctagcccggccaaagcccctagatgttttaagcccggcgcgaggggcggagaggagcggagaggagtctgtagcaacgcgcagcgacgtcacacaccacgtgattgcgcgcgtttccgccctccgctcgtggctgccacgacatgctcgagatcggcaagtcgtcataggtatggattcatggcaggcatcaacctcgactgcgatacctccaacaacgagtcataacgcaatcgaatgcgagcattgcacgcgtcgttgaagatgtcgcgccggttgaagacaaggcagcagcggcgatgggcccgtgatgccgggcgcaagcgggcgaagcgggccgcggacataaacactattatagcgcgaatttactctcacatatgcgcgtaaactctccaagatttgccgagagggtctaatggttcctggcaatgtgatcacacgggggagcttacgttaactcactgcgaatgccaacggattttatacttttactcccctcatagcatcaccccgtacattcgcacttaaccatgttcaccctcggggaatgcttgggagttttttcattcaagaagtgttgagcaattactgtctaaaagtgtgttaccgaaagatgtctgaaactgcagcatgaaacgatgcttatgatgtgtgctgaggtttcggtttgataatcggtcataacgttcctattatccgtggttatttcataatgtcacaatggcgcgccttctagttcatcttatatgaatagcgccacataccagagggatcccgtaggctacatgaacgcgaacacgcgtgcgtgcacgtttattattgtgctcgataaacccttagttgtgaaactacggtgtatgagtgtttcgccgtgcgtgttgtattttgaactataggacaactcgatttgaggtgacaaaaaccgcctatattatggaatgatgtttttttaggtgttttcggtcgcagaaaattacaccgattcgggtcgccatcagctcttgttgtcaaaatttgtgtttaatgttctcacaacagatgagatggtatcatttacacgaattgtaattgagcgttgctgtcatagcttcaatcgcacctttgcccttatgacgagaaaagttcccaaaacgcttcttcggggcctgccacaatttataccttttttcggacgaaccatttcatctgcaaagtataatatcaattgaacattgtaataaaatgactacggagaacgtcttacatactaattgccataaagccctaaattatcacattgcaaacgaataatgtagctgacctagctgattgtttcagggaaacctttgaaataaactgcgtgctatttttaactgtaagtgcccactagcacagcaatagcttgttaattcgacgcacattagttcggaaaactgaattattcggacatgttctctggcccgcagcgtatgtattgtttaagggcaccagaactctcattgatttggtgaaatttggacgcaacccgcttaattcgggtgttcctcggagcgcgtgcaccgagcgtgaagcatgcaaatatgtgacgtaaaagtaggaaaaccaagtttcgcggacagccgaaatcggcactgctttcagaaagctgtggtcaccacccgcgattggagcgccacaaggtgttgaatcggaaggcacttcgcattgaaacacggggatcttgaggagggtcttatcaaaagacatgcgcggttcaagaaatccctgaagtcagcgcactccgtccgcccacgacgccatttcttgtattactgcgcgccgtccgtcgtgccggggacgcacgctagccgctcgcgtctccccgccgaggtagggtgagagggttgcctctgaaacgtaaacatcacgtgggctagctgtgaggcgaagcgctctttcaaggcaaggagcggacctaagggcgcacgaaggtagctcgtgtctttcgtgtccttcttgtctctgtgtcgtcgtttttttctcgcgctataactatcgtcgtagccccaaagcaaccttaagctgaggaagcgccaaggaagccttcgccgagggctcctcagtgaggaagctttcagagtgacataaggggcctcacaaaaatcaagccttcctcactgaggaaaggaacgtttcgttgtctggcccttaaactcgggcgaattcgtggcatgtgcttagtacgctggtatacagtaacgaactcttcaagtctattctttatcgcaaacgttaaaataaactaaactgcgctgtgcaccttgccttcataggtgagcttcgttgacaggtagaaccgtcactgccgttattttgcatctgctatggaaaaattcagctgcttaagcatcaccaaaataaataagtacgctctctccccgcgtttcgtctttcttttagtatgcatagggtaggtgtaaggtgacaggagtaccgtgttacgaatgcttctgttttcattcatagcaaaaattattgacgggcattccgtccaacgagaattcccgtattttttttttttgaaaaacagaagttatgcattctaagttagagtcgtgctgtgctagggataacataattgctttgtttagcaatacacagatgacgtgcacctaatactgtgtggtgctgtcacaaacgactccaattttcggatcatccgcggaccccattgcaaggaagggcgcttttgtgttggggggacgacatccggcgactataacgacccagcgtggcgccggctcgtcttccttgcacctgcaccgaaaggggcaccggcggtctaaaaaaggaaactacccccagatgagacgggatcacgtgtacgccgctgaagaagttttgactgcatcggaagagcagttgacgtacagccacacaacaagtgcggtcgtcggtgtctcgcgtgggcggcgagcatggagtgacccgttcaacgtattgagacggctgcaattccgggcaccctcgtcgtctaccaagccggcgagatcttcagcggcacccgtcaactcccctacgtgcaccaagagctggcctggtccgtatggaaatttttgttgtgttgtttttttaaactgccagctctcttctcaagaacattactgcgtaatgttcaagaaaatcacaaacgcacaatgttcgagagctttcagtgttccggtcgtctaccaatgcgttttctttttcgcgcactatttcactgccgtggactcatcgcagagaacacccgacacactacgcttcatggtcaccataaaatgaaagtcataacccgcgcaccacgacacggacatacacatgaaacacgaaaaagtctcaaaaatactgcacgattcaaggaaaaggcacgtaggcattctttcatgccgcatattcgaaaatacacgctgtaagcggcatacaaaagtcgcttattcgcacgcagctttaaaaaaataaagatgattgaaagaaatcggcatgatcgcctgtacacagttccggtacttgctgcacactaaagcgcttcgcttcgaagtaacaacaaaaactaaagctttgaagaacatataccgccatgtttatcacacaagcctaccgcgttagacttcgaatatgtgatcaaccagtctcttgaaaagaagcccaagccactaaaataacaatatccctaaaacgaggctttctaactgaacgggtaatagatgaaacaacagatcatcatttagaaaacacacagacgacacaagaaaataaaaaaaaccaagcgattgttccgagcgtttagcaaatgcttcaaaatcgaatgaccgaaatgcacattgtttcaaaaagtatcccattagccctgaaggttaggtgtacgtttcgatgtacatacgcataagttttatccgcgctcttgggggagccgttcgaagcaacaagggcagacaaaacagtggacggccgctacccggacgcctgtttcccgctagtttgccccgtggcagcaagccatcgtcgacacagcgttctacggaaatgggcttcgcaaccgcgtcgcgtcatctaggcataatgcgcgccctccccgtgcattccgctcctcgaacacgagaatggagggggtcggctcctccgagctgcaggtacaatcgcctgcctcgcccccccacccttcagccggtttggggacactaggaccctgggcatctgcctcagttgcgcagaaagtgactaaagcactgctactttacttaaagtcaacaaacctgagcgaccgcctgtagactgtgtgtgctccccgagtatgctcgtgattgtgtgtaccttctcatctctctgcaacctctttttctctcccctttatcccttccccagtgcagggtagcaaactggatgtgcgtctggttaacctccctgccttccttgcatctttatctctctctctctctctctctctttctagtgactaaaaataatcgggaaatgacgaacatggcctccaagattacgggcgcgtagtgtggttaaacccgccgcgcgcccaccatctcagaggtcttgtcacaagattgttatggcagaaacattgcgcatcgtatgtctggtgtatagaccacgcagcggcgttattacgaatgagttacctttttttgttaatcgttctgacctgccccccgccgcggtggtctagtggctaaggtactcggctgctgactccgcagtcgcgggttcaatcccggctgcgcggctgcatttcgatggaggcggaaatgtcgaggcccgtgtgctcagatttgggtgcacgttaagaacccaggtggtcaaatttccgagccctccactacggcgtctctcatacataatgtggttttgggacgttaaacccaacaaatcaatcaatcaatcgttctgaccttatttaattggcggcggtggtgtatagtggtatacggcgctgactcgaaaatcgcgggttcgatgcggccacggttgtgacatttcgatagaggtgaactgatggaggcccggcgctgtgcgagtgagtgccagttaaagaacaccacatagtccatatttctcaggccctccccccattacggcacacctcatcataacgagggttggaacgttacctccagatgtttctgttattatcactatttttttaaacaaaagcaatatataaaggtaataacgatattcgtatgagtcctttcaatgtcacgatgatagtacgctgacgatttcgtcactttcgtgtcactgcaacttgtagtgtgcaagtatccccgaaggaacgccactagcgtgggtcgtcttagcgacccgcagagcacgcgtcaaccgtcgccaggccgagaacacggtactgctcaaggtcgcaacacctcgttgtctgctgcggcaacaccaaaactcactacacagcccgttccaaaggcttatctacgcgccggcaaaaagcttgtcttaccgccggcgagaatactacatgggattccgcgagcacgtctccacgggcaacggtgactcacggcggcacgggacaaaggacccattgctcggcgagggaaaagagaaaaaactcgcgttggcttcataggtacgggccggcttatagtttgacttcgcactataggacaacgcgccgctgttcgaccaagcgtttgcaaggggcaacaaaaggtgagcgtttgccgcgggcgccgttgtggcgaagtccgacaagcccgaacaacgagagtcgacggacggagagaaagtgcgtgctcaccctcagctctcctggacagatcggacttcttcgccggtaacgcgtcagatattcccgcgtcccactgcttataatacatgcgctcgagcgacgcaccgaggcttattacagcttcttcgatcggccgccctctggtgtggcgtcggcaacgcgttcgtgtgctccttcacgaaagagcatcgtcccgatggtacaacgtaatgaatacaaatgaactggaagccttcttaacaattggtgtagaaaaaacgtacacatcacaaaagattgtccattagtccgcttatacttcatagcgtaatcaggccccgtgtgcatcgcctctcaattgctggccacgcttcgttctcggtgcgtgcatcaacaggtccgtaaagaagctacgacttacgctctttaaactatccttgaatgcctgctgcaagcccatttaagtgaactgctaagccctatatatttctgcattttgcgcagcgaaggcctattacgcattcgtgaggcatttacgtgaaccttcgcactgcatgcttccttcgttttttttttttaagatgatgagtaaacatttcgagcaccttgtaacgcgtgagcctttaacacaactcactcgttgcgatattgaaatgttatgacgggagacgcaaacttgtgttagcaaattacatgcgttcgggaagcttcgcagaattacatgcgttagggaaattcgtgggtgtttctttcggggaagttctcgcaatatcgtggctcagttaccctcccagccattcaagatgctgtgtttatttgtctctgaaacctagcattctattatttatttttctatttgaattttcctcgatgttccggtcacagacagcactgatttggcgcttacaaccactgacaccgacaccggaatttcggcaaaacgagctatcgatattgcattgaaa

SEQ ID NO: 109 - DNA, 20798 bp, unidentified
  misc_feature 1..20798: note = Fanzor polypeptide
  source 1..20798: mol_type = other DNA
tagttgtgtccgtagcgcggaatcgaaccagggacccctcgcttccgaacgcgcggcgctaaccactacgccacaaagcgcacatggacacacgcaccacgatgacaataaatacccaacattaactaaagactgcgcgtttctaacgcgtttgtgctagcgcgttacggcccgtgtaagaagctggtgtaagacgctgtggcctctccgccttgcccccgtattcataaacgctcctcgacttgaacttgacttgccaccgccttgggcagcgcgttcgaaacgcattgaaggcggtggcaagtcaagttcaagtcgaggagcgtttatgaatacgggggttatactctctcagcagtcatgtgatggcgtcggcaaacgcggtgcacgttccggcatgtgtaaacggctgcgtaagacgctgtggcctctccccctagagtactgcacgtttctaacgcggttgtgctagcgtccccttaagcgggagatggtgcaattataatgaagggcgctgttataaaataggaatgacgtcacatatggcgcgtgtcaatggcggaagtcaattgttcgatttagtgcggcgagactgggcgaattacacggaagattcacggtttactgatgattccctccggagcttcgcccactcatcatcattcactccgtggatatgcggtgttttttttactgttggctttatgtggttctaacctgcaatgttccgaatgtaattgaggcatggaacgggcttccgaatgatgtgatcaatacaaatgatgttattgaattcatccgtttacttgatgtacatttatgtgatttactttgatgattagtctgaggtttagctatgattattgttatttaaatgtgtcttcttgttacatacatatatatatatatatatatatatatatatatatataatgtgtatgtatgtgtgtaaacgactgtatgcaaaatgtcctccctccctgtaatgaccctcaagagagggttaacagtatttctaattaaaaaataaaaatgttttgtgtcaatacctgctttcaccttaaaggggccctgaaacactttttgaacagagtctaacccggatatatccaacgctgaaggggatcacaaaaaagttagatgtataggtaattcaatatataaaataaaaatggtatacagaaattttctaggggatttacagctgttccatatcaacaataataagttatatgcgggttcgatatattcgggttcaactgtagtaagaaaacattgttcgtttgacgaggctcctgtgaatatgcgagcaacagcgtaatgcactgcatgctgcaggaagcttacgatgtcgtttcaattgcagagaaaaatcgcctttgctctccttcacaacgtaatcgcgcagtgtcatcgcaagcagctgttggctgatttctcgatcaccagaacgttctcagtaatacaattattgctcattcgagttaaataaatggaaaatatatacttctgcgatctcaaagcgacagaaataccgtttcgtattttcactgccggtctacatacgacagttgcgcgttgctgcgcttgctgcacgcggcctccgaagtgactagcgtagcgtagacactgcatggtggtcgccacgagcagcatcaccacgaataaattcaactttttggcggagccaccggtccgttgctcccttgcgcccccttgccatctcccacgtggatctcacagcgcactggtgcaattcaaataagaaagaaggccgcttattggcccggttactgcgattaacttcgcttatgcttgaaggattcgaaattttgagggcaggagattcatgaggagacgtaatataatgatgatgtcattctatgattaggaagaaaaccgtttcagggcccccttaaggcatcttttgcaattcaaataacggaagttagcaagaacagcgtgggctagctgcaagagactgcatgatggaaaacgcgctttcaatttcctatcgcacttaacatggccttactattgttctaatgaacagacttagcattaacttgcgtagattcggctttctggttaacaattactcggagagcgcttgagcccatttgtgttctttcttagacttgagaatgcctacagttttcaaagtgaacaacaattacagagtaatgtaaatgcacgtacttcgcatacatctatcggttcatttacatgttaaacatggcgttgaattacataagatgcagcatgaaaaatatgtgttgtttgtagtgaaagtatgtaaacaagtgtgttatgtatacggagtgtcgagaaacaattgagtgatatcggtcagtaaggttgttgaatgaacagcaagcgatgcagccgagggccattaaaattaggtctgcgctagttacgactacacattatatcacttttgtcagggatacattcaataaatcctatatcgacacgtcgatacatattggtggaaaacctagcaagcgcatccttcgtgaataacgtctagtggaatgcgcccaacccctgcgatcttttaggcgagttgtcgcaaacacgcatctttgaaggacgatcggccagccaaagggtctcaaatataatccactttcattcagcgtgcatactggggcggtattttgttaagatgcagttcatttatgctggtgccgcaggctatttacacgtggcctcatgctcctataagttacacggctaagggtccagtttgcggccttgccagctacattatgctgtcggagaaatgcaaacgaggaaaaaaggaaaaagaataaaaaaatagctggctatcgatgcacactaaaaattcgcaggattgccccacctgatctgaagccgtgcactacatgcggggtaataaattcaatcatttctttttatcgccgtaaatatgctccgacaccaccgcgccgccacagtctacacgataggccactatagacgtactggtattaggatacgcaatatgtatatccaagagattctttcaaaatacggtccctttacgatctggactgaaagtgtctgtgtcgtcgcaggagatcagtgcctccctgcgacactcgggacaggcagcgcagtgccgacaaagcgaaccgtaactgcgcagctgttgccaactgcagcgacacgtgccaggcacaagatctgctcgcgccagccacgcgtgcctcgtcggccatcttagcctgcaatctcgcccaccctttcccgtgggagcactagagaaggaggtgagaataaaaaatcaaaaccaaataatctagaatgcagagagagggagtaataaaaggagccggctgtgcgtaactacatgaccaggtgcatccccgattgccattcgacgggcgatcaggccgcacgccgatcggtccgtgacattgaagtccgcagtgcaaacgtatctgggtcctgcgagctcttggctcctcgctttctggcgacttttgatgttttcttttctttccttgttttgagccgagttcttttcgcccgcagcaatgtgaatgggagcggatcagtcgctgtatttggcacttgaagcgctttggcgttgttatactgattgttgaatcttgaaaagaaaacactcaatgatgcttgcaccacgcgctttgaaccaagccgaaagcaggacaaggtgaatgttcctccgcaggttgcggagggaagcacttctggaaaaatgttttatttgtatttttttgtgcgtgcttcgtttttcacttcaaccttcagtaattcgcagcacctacatttattgaggccttttcctttagaaaagtatgcaattatattgtatttatgctgtagggacacaccgttaaacgcatgatttagttagccaagtttcagctgcacttttctatacaaggacgtgctagcgttggcaattaagctgctaaggtaaaggctattgtttacaggtaggtgcattcgttttacgagtcgtttctcgagaatagctagttcgaaaaaatttgccaaggtaataaaaatgatgctgaataccccaacatattaggtaacacgatctaaaaaaggacattggaatgataaagtccctgaactataaaaaatattagtacgtgttgtgaatctcaaaaaacgaaataaaagaacggcactagaccatttcgcgccatcatgttattcgtttttgaatcaaatattcttgtaagaaaacatttgccaacggcgacattacggatttcgtctaaaatggtggtctactttcaccctgcccctaaaaacgaacactgaactcaaccgtcataagaatgcgagacttcagtgctccacttctttaacaggtgaaatagacttcggtctctgtctcgatattttcagaacaccctaaaagcctgcagcatgcaacgcttatgctttaatcctcttcgcgatttacatccatcgacctccacagttccacttcaattacctgccgtagcatgcgatagcggcaatgaccttggagcaaaagctcgtcgtgtcgctcatggcttctcttacaacagactgagcctatgtgaaagggatctttggtcttgcgcgcagacgtacttgcgtgtgtaatgctctacgtcaagtcgcattacaaccaacgttcgattacaaatcacagcctgctttgcccctatacgcttatttctcacagcggagcatcaatttagcgacctccacggcatctccaccatggtttctctgatcgtcgccatttctcttaaaatgtgtcgctgcaatccgctgcacaaatcacgccccaatagatcgcatataaaacgctaaagcttcaccagaaatgtatcgtaatctttgttacaatgaaatgattatgaagacaacagcttaagaagtaatctttatgtagacgctagtagtgacgaatacctgctttatgcccttaggtaacaaaactaaaaatactgtaggacgccattgacgaaaacagcagaagtccgaattctggtgttatgtacatgaaaggggaaccaaacttaagtatacgcactcctcatcggtgccccacgaagtgtgcatgaaaaacaatccccctgccagaggctctctccgtgcggactctgcagctcgggggttgggcgatcggtgtaaggtgataagccgccatggcacgtacaccctacacccctcatcacgcagccttggaggcgggcagcctctaattaggcctagcacgaccgaaagagcgccggtcgcgcacgagttgtacctcaaggtaggcggagcggtggcaacgcaaacaaatacaaagaataaaagaaaggtggcgggggccaggagggagcatgtagaaaatgaaaaggtaagtgaaaggaactaaccaagtggagagagagccgcgttctatcgaggcgcacattctgtttccttggtatagcggccccgactgtccggaactttacgaggaagtttgcctgttgctgagggcgcggcgacaattttccaagggatttgtattgtacgtgtccttaatgctatcattaatgcggtgaatattatgcgtcattacgtcgctgactcatgatagacgagaacagagtattttgcacccaagattccttaattgtgcaacacccctatacaccaaacatataatggctcccttctctctccacacacacacacacacacacacacacacatatatatatatatatatatatatatatatatatatatatatatatcataagaagccaacaaacacagacaccaaggcaaacatagcggaaattgcttgtgctaactaattgaattaaagaaatgataaattaatcgaaatgaaactggatgaaaaaacatcgccgctggctgccacgagtacggcccggagtgccacggaggtgtgggcatttattagttaatacaattagcacgagttaagtcgtaggctcggtttgaacggtgaattaaattttatgcgtaagtgtgaaatgacccattgagcgaaatgcagctccactaacctgaaacctggggaggtgcgaagcacgcagtgatgcactgctgatgggtgtcatactgcgttgagcaatggctcataaccccgtaaacgcggccttcctattacgacgacagaagagaagtcaaattctacgctggaatgatgagcggcaacgcagccagctgtggaagacgacgaagacgacgaacgcgggagcagtgtcacgagtgcgtgccgagcgcgaccacgagccgcttggttaccgtgactacgacaggagacgccgacagcccgagcgcatcaggtgcttcgcacctaaaacaacttgccgcaattggggaatgatcccacgtcttcgcattacgcctgcgatgctcttgccaattgagctaccgcggcgccgttttcccatccactttctgggttatttatgttttacaactagaaactaaccctgggagtcagcgccaccacaaaccttggcggcgcatgcggaacatcctgtctgccgcaggcgatacgagtacgtgatcttttggggtgaagggagccgatgaataaacccgcatatgctacctgaaggcatcaatgttgcctgattcgagaccctcgttatttaatgaaaaagaagaaaggaaaccgaggggcccgatttcttattaatcatattataagatgccaacaaacacagataccaacgaaagcataggaaaaaatacttgtacttactcattgaattaaagaaatgatagaataattgaaatgaaagtggatgaaaaaaattaggggcaacttcacactagtagtgaactgggcaaacagcgaagctctcgaccccacctagctttatctcgcttcggccaagtttttgcgaggttatgcttagagaatcgtccacgtttgcgcaaggttaccccggaatcattgacagcccaacaagccacgaacactcggtcattatagtatctggaggcttctggacgctcaaaggtttttgctcggtttcgcgggctcgtaactccggatcttctgcaaatcaccgacgtttcgccgccgttttggcggcgcgatgcttgggatccaaccaaagtcatctcactcgctctcgagtagcggcgcggcgatattcgtgccgcgcttccaatgcttcgggagtgacgctcttcttcggccgtccaacttcgcggcgatgtgctccgccgcggaggcggcggggctttggtgtcgccgcggcggcgacacagagctatttatcccgtgggtcggcgcagtgacattacggcatagctccgtgtctgcgcagccgcggcaatcactccgcatggcgcggcgacgccatggctcggcaaagctaaggcgaagtgatggggcgcgcgcgatgacctcacgggtcgcgcagctgtggcgaggctctgtaccgctggggcgctcgttgataggtgacgcatggtgacgtcatcgccaggtggagattatgcagcgtacactcgacggaccatcctcgagattaaacagcttcactagttcacaggaatttgtgccattgcgcttggacccacctcaaggatcggcccccattttttgttcaaactacgtggtctaaccaagagcttgaacagctcggctgttaaaaaaacttgtcacaggtggggaacgatcccacgccttcgcattacgcgtgcgatgctcttaccaattgagctaccgcgtcgaaaaaacaaaatctaaatttttcactgtaatttcaaatttttccgcatctaaaatagccgtaatcgtaccgaacgttaaaccggccaggatagtttttattttagctctgttttcccatccactttctgcataggactgcccttttcgggtgacccaccctttatgtaacggagaagtgaaaggtcgataggggaacagcgcaaaaaaacacgacaagaagacgagaagggcgacacacaccagcgctgactgaccactgatttctttattaagaaaggaacacatatataccaaaagaaaaaagaaagaagggtagatcactgcgcatgggcaaaaatagacaccgattagatttagatttacacaccaacacacaccaacatcacacatctattcaccataattcatcaccatctattcacaccaacatcattcatgtacgcaaccctcgcgccgtggcagccaaacggctcagtaataccaagacaatcatagtggcctttgaaggaccgcgagtgccttcctatgtcaggtatggcggcgccctccttccctgcgccctgtatcgtaagcaaatcgacatgtgtcactgctgcggaagactcggtcaccgcatggacgtgtgccccaatcctcaggacaaagtgtgccgtggttgcgacgccattaacccatgccccgaccaccagtgctccccccgttgcaagctgtgcgggggaacacacatgacggcggatcgcaactgccgcgcacgatacaagacaccctacgtcgtgacaaagaggcaatgggaacgacacagggccgccgaagaggcggaagaggccgccaatgccacccgctccgacggcaagtcctgctcgagatccaggacccgcagccgaggcggctcccggtcccggagccacaccccggactcgcggaagcaacgccggttgcgcagtcgcgcccccagaaggaccgcaacgagagacaccgagaccaccgagaaggtgagctgggcagatgcggtcaccggaaaacaagcaccaaccgcgaaggctggcgacaaaacacccactaagacagagacggagatagctaaattaacacaggcgatacaagcgctgcagaagcaaatagaacacatgcaggcacagattcgtgcaaaaaacgaactcatagaacaactccagcatgccgtgaaaagcggtactgatacagaggccatgcaggaaacacaagaagaactcatagaggacggtgaggtcgtatgccccgacactaagcgcagacccactcccgcccttacagaagcaacacgacgcaagcgcacgcgcgcagcgatacgcgacgcgcgaatagatgcactcgaggctcgcttaagcaatctcgaggaaaccatcatcgcgtccatcacgcgtaccatccagcagaacttggagagcgtttacctcagactgtccagattagaagccacgaacagcacgatcgtaccgtcgcatagggaagcggcgcaacacatgtaacaacatataaacatagcccgacgcccacctaaacaaaaacacacaatatagcagtggaactgcagaagttaccaaaacaaacgagcgcacttacaacaatacctgaaaacgatccccgaacgcccagacgtcatcatattgcaagaaacgaacggccccgccaaactcacagggtaccagtctataccaagcaaggcggaggaaccaaacgtcaccacgctggtcaagcgagcgcacacagctatcgaacacgacactaaagtcagagacattgaaaacgtcctagtagaactaattccaccacgcaagacgcgcaacagcatcttcgtactcaacatctgcagcagtcccagatgccgccagcaccacttccatgttctcttcaaacgggcaatcgacatcgcccaagggcaacagcttttcattggggggggggggggggggactttaacgcggtgcacacggcgtggggttacaagcatgatcagcccaaaggcacgcatctgtgggcaacggtgcaatacgccggactcgagctcgtcaccgaccccgcggcaccaacaaggcagggcaacagcgtcagcaccgacacgacgccggaccttacttttacgtgcaacactcgccaagtcacttggacaaacaccatgcaagacttgggaagcgatcactacatcatttgcataacggcagaagacggcccgcaggaacacaatgccggtcgccaaatgaagatcaccaactgggatcaactacgcacacatcgtgacaagcaccaggtggcagacaccaaagacatagaccaatggaccgaccaactgcggcgggacatcgagcgcgtgacgcaaacgatcccgtcaaaagctgggctcgatacaatagactcccggttactgcacatgtggaagtcaagacccacctgcagcgccgatggaaacaacagagacacaataggagattgcgtaagcggatagcgcagctcaacaaagaaatagaaaggcacgcgcttaccctgcaacgacaacaatgggaagagaaatgggcggagatggacagtcaactcaccacgcgtggcacgtggcagatgctgcggtacctgatagatcccgccaacactaaaaccacacacatgcaacgcatatacaaaatcatacacgcttacgggggaacggaacagcaattcttatgggatgcggcaagcctttacatatctcaaacgccaccgctaatacatccagactacacgggagaaagcaacgccaccctggacgcggaattctccgttgccgaaatccaggcggccctcgtcaaactcaacaccaagtcggcccctggccccgatcgaatatccaatagggcactgcgtaatctcgattacggatcaattgagaaactgacaaactacattaacgagtgttgggcgcacggcaagctaccacagcaatggaaagaagcaaagatcatacatactgataccaaaacccggcaagaaattacagctagagaacctgcgccccatctccctcacgtcctccgtgggcaagttgatggagctcgcgtttctcaatagactcacggattacctcgaggacaacgaattatttccacacaccatgattgggttcagaagacatctctccacgcaagacgcccttctgcaactaaaacaccaactcatagacagtccggggcgctcgacgagagccattctcgggctggacctgaaaaaggccttcgatagcgttcgccacggtgccatattacgacaaatagacaagctaaatctcggactgcgaacgtacaactacattcgagacttcttcacgggaagaacagctcgcatgcgagtgggacaactagactcagatcaaatcaacatcgggagctcgggcaccccgcagggctcggtcatctcgccgatgctcttcaacctcgtcctgctggggttacccgactgtcatatgtaagtgccgcgaggtgccgctggaggatcggagcggccacccaagctctggaaagaagaagtgaacgggtgcacgagcacggcggcacgaggcgagctcgcagtgttcgggccaggcgggcagcagttccgagctccgggggcgaacgaggcgagaggacctgcctggcgagacgtccgtggcaaggtgcggaggatcgcggagccgggcgtggacgagggcgtccgaggaaaccgggctcctgctcccagtgctcgaggcgctggctgacccgagtgccgccggtccctgagctgctgcacctgagctgtgcccagcagcgttggtctggcacagatgttgctgtgctagacgcggtcctcacgtgcgaccgccgcacgtggattgcgagcggcgtacgagctgggcaccgaggtcgtgctggacaaggcgttgcctggctgctgccgttgctgctcctgagcgtgccgagcccgagaaccgtgctggacggggcctgaacgtgtcgtcgtcgcagtcggctcgagcacgggtgtatccgcagcgacttggacgacggaagcgtgagcctcgaaacacgggactgtcacagcctgtttatactcgtgtgctgtgcgtgtgtagacacactgactgccgttacgcagatcatcagctatctctgtatatatatttttagggttcttttccattttgataaatgctccaaaacgactctctgtctttcttccgcatcactgcgcactagcgaaagtgccgaatagtcccaaacgccacaccgaccgattgttgcgaatcgaaggactgcaccacacgctatacgcagatgatattacgatctggacgacaacgggccgcgatggagcgatcgagcaacgtttacagcaggccatccagtgcgtggaaaactacctggtgggcacgggacccacctgcttggccgaaaaatccgaattgctgctatatagaccgatcagaaaggggcgcccacctaaaggctacgcccccccccccccggaaaaggaagagatccaattaacggcatcaaacggcctacccatcccgatggtagacaagattcgggtactaggaatgatgattgaacacaagggcggcaatggcgaagcacttcgcaagatagcagcaaaggccaccagcacgatgcagctcatccgacgcatcaccaacaaacacgcgggcatgcgcgaaggtaacgtcatgcgacttatacaagccttcgttatttctcaaataacgtacacggcagcgtgtcacaactggacggttgcagagagaaacaagctcaacgcgctcatacgcaaggcgtacaaatgtgcgttgggacttgcgcccggaggtagcaccaccaagctcctagaactaggcttgcacaacacgctcgagaaactcgtggaggcgcaacaagtgtcccaactcgagcgcctatccaagacccgcttgggcaggcacgtgctcgaaaagctcggcattacataccacacgcagcacggtatcaaagtggaaatgccaagaaccatgcgcgagcaactttacttgcccccattgcctcgcaacatgcacccccaacaccacacggggagacgtaaagccagggcacaacacatgaacaaaagttactccaacgacaaggaggcagtcttcactgacgcagcccgttatcgagacaggaagagtttcgtggcggcagttactagccaccgaggtaaccccctcacaagcgtcaccgtgaacacgacatatgccgaagaggcagaggaagcggccatagcactggcccttacacaaaccaaggctacatacgtgatctgcgactcgcaaactgcaattcgcaattttcaaatgggcgcatatcgcaagaggcatatcacatactctagcgacatcccatacaccagggagaggccgacgtcgataaccgaaggcacttgctttggatcccggcacacactggactgagcaccccaaacgaagcggctcaccgcgttgctcgaggcctcactcaccaagcatcatcggaggaagagcccccgcggggtactgcaaacgtctgggcgtgggaggatcgtttgaccaggttccacgacatcacgacacactaccagttacagagacgcgtatacccattccctcacgctaggttagacagggcgcaagcagtacactacaggcaattacaaactgattcttacataaacccaagactcatgcacgccatgtatccagacatgtacactacaaacagatgcacatcctgtggcgaggttgccacacttaatcacatgttatgggaatgtcaggacataacaaacaattcgggcagtgccgacacctgcgtctcttccaccgccagcctccgctcgcgttggaagaccgcactgctcagctcgaacctgacagtacagctctgggccgtccagcgagccgaggaagccgcttcgagacaaggtctcggaaccacgtccgcggcgggtgcccagacccactaaaaatacgccggactcaaatcttatcgatttgataataaagcttacgttcttcttttagattttggtactacagagtaaaactaaaaagggaagaagaagcagaagcagaagaagagcatagcttcagtaaaatcttcgatgctcatcaaatgatttcgcagtgacaacagccaagcaccacccggaattatacaccatcggattcagctcgtcaccgggaacccgaagataccaaattctgaggtgggtggccgttgtacgagattttacggccgaaaactacctcgcgcctgctgcctgctattcccgccattgctccgagctgcctcgagccgcctcacgagacccagggtctcggcgtattcttggactacacgttcaggcgaacgggaaggcgaactacagtatatctctcttgtgccggcagaccaaacagactttggccatgattcggtgggtctccaataggcgctcaggtctacgggaacgggacctactgcgcctggtggaggcctgtgtgatcagtcgcattacttaccaccttcccttccacagacttccgcagtcggagcagatacgggtcgacacaatgctgcgaaaggcgaccaagctcgcccacggcctcccacactgcaccgccacgaaacgtctgctagccctagggacgcataacactctcggtgagttattggaagctcagtgggccagtcaaagacaacgtcttttgctcacacccactgggcggcacctgctctcgtgattgggacatccagttttacacaattatgatgaagacatcgccatcactattccgacttgggtccgtaccgccttaaaggtgcacccactaccacgaaacatgcatcctgagcatgacgcgggacgccggcgcgcctgtgtacggtacctggtgcgcatgctcggtgacatccctgagacaaataccctatacacggatgctgctcggtgccacaacgggtattccgcggtagtgctggatggcgctgaaacatttattacagccacctgcttacggaattctgcacctggacacggagaagtccttggagtagcgcttgctgtgcgacacgctctccagattcctggggaggtgtatatccgaaccgattcccagcagacatgccgcgcctttttgacgggacgcggcttctcaaaggcggctctccacatcctacaccagtcaccaaacacagacccatctgccccacagcgcatccacttgctctggactcctggccatgcctcactgccgggtaatgaccgcgcacacacggtcgctcgagaaattaccctccgagctgcccggcatgacgagggtcggagtccagatcaggcgggctccccactcacatacagagacgtattaatatactatacacgagctagacacaccatgggtccgccgccgctgtcgttctcgcgaaaggaagaggtggcactccgccaactccaaacaaacacatttcccaatctcctctccctacataaattttaccctgaccgctacgcagactcttgtccgggctgtagaagctcccccacggcgttccatgtcaccgtggagtgcaccgcaaaattattccctcccctgccagtcatcttgcacccctttcgcaccaaagagctgtgggaggatgccctccgcgacggacctcccgaggtacgccgggccctagttcaacgggcccgtgctgtcgctgagatcgttctagagaccccggactaggggtccctcccacactcttactaccttttctttttgcaataaaatgtttactctctctctctcggcgctcgcgcccaagaggcaataatcgtcagcgatggatgatcagcaggatgaggaaggcacccgacgggaggacgacgtagacaacggatggaaagaagttagatacaggaaacgtgcaaaggaggggaggcagcatatccgtgctagccctagccctacccgaacgccaagaaggcatggcgcgcaacttatatccaagataaacagggccagcagaatgccaagactgcctacaggagactacaagatagtcatcaggccaaggggaggactgcagatatcccagctaagctcaacggagctagacaaagctgtgtacgaagcagccgagatccgttatgaagaacgagatatggacacgatctgcccgaataacttccagaacatcttggtcgtcagcaccccaaatcaagagcatgcagacaaataccaaggaatcaagcacatcaaggccaatgacaaggtttatgaggtgagagcttacgagacggcaccggaaatcaccactaacggagtaatcaaaggtgtcccattggaagaaaccccgcgagatatcaccgcggcagttatcacacccagaaatcctacggcgatcgcagctaaacgtctcggaaacaccacaacggtcatagtccttttcgacggctacagagttccgttatacgtcctataccaaggagtgctcacgcgatgttctctatacagaaagcaaatggacttttgcagacagtgcaacagacttggacacaggagcgacgtgttcccgaggccaaacgacaaactatgtgcgggatgtggaacgcccaacccaagtgaggaccacaagtgtcagccaagatgtcagctatgcggcatggatcatcccacggccgacaaagcctgtcaggccaagttcaaaaagccctacattgtcaagcaacgccaatggccccaacaaatgcagcagaaacagcaggaagagcatctccccaccaccgggccgaccgatcgcggcagacccagatccaggaggagggcaacgcctgggtccagatcccgatctgggtcccgcacgacgctaagaggtcgcaccccccagtctaccggaccgaacctgagaggaggccggactccatcgcgctccagatcccggtccagaccaaggggcggccacggccatcgaggcgatccgccactcgcggtgagctggtcagacgcggttaaagggacgcgccccgggtcttcgggggagactgcacataatttcaatgaaattgccgagatcaaaaaataaaacgctcagcttagagaattaatatcgcaactcactagagaaattcaaagccttaaaagctgtgctcaaagaactgccagtcacacacgttccgcgggcctggagagacccgaggaaatcccatataatcgaatggaagaggacagcacccctccgccactgaaaagaaaagctcaggcgtctagtgacaaaaccgctacgcaaaattcaaacctgaatcaaacattctccgaaatacagaaggcagttaaagaacaggcagaggcaaccaacaacctttcgcttgcaatcaatcaccatgatgatgaatagactagataaactggaggctaacgttgccagtctcaaccctagggcatctccggcgcctccagccaacaccctggcaatcagcaccgtgggcaattcacaattaccgcagggcaccacaacagcggctgtcccaactaatgtcatgagacctgcctccttccatccccctccctcctcaatacccaaatcaaaataggggcgtacatgataaagtcttaataccgaaaccaaaataggtaagtacaggaaaaaagatttaattatttggcagtggaattgtagcagctatgaggggaagagagcagtactgcaacaacaccttaggaacaaaaccaaaccagaaattctaattctgcaggaaacgcacggtttagctaagctatcgggatagaaggcgatcggccccacgaccggggataatggaacactaaccaccctggtaaggaagggattcgtagcaatccgccacgacacccagatcacagaaatcgagcacatactcgtagaacttccccctagaagaaaaaaacttcctagcacgttcatcctaaatttgtatagcaatccttcgcacatacgacaacgcttcctttctctccttaagaaggcagtagtaatagagggagcaaacaccctcgtcattggaggagactttaatgccccacacagcgcatggggatacggatacacacgagccaaaggcaaaatgctatggcaggatattcaagaaaccgatttaactctcataaccgatcccgactcccccacgcgtatagggactggtctcgcgagggacacaactccagatttaacattagttcgcaaggcggggtccgccaaatggaaaaacacatttgaagatttggggagcgatcgtatagtagaaaccaaaattgaagaggcggtagacgcagtactcaatagacgacaggttaaatagacggactgggataagtttcgaaaagtcagagatgccaaaaaacaagcttccatcaagaatattgcgcaatgggtcaaagacgttatacaagacgtcaacgaggctacgcaaacgattacatcagaaccccctaagaaaagattgatagccgtctcgcgcacatgtgtgaggccaaacaatcactacagaacagatggcaggggcagcggcacaataggagcttgcgcaagcgtatagccaagctcaacaagcagattgaagaacattgtcagcagctaagcaaacaacaatggaacgaggtttgcaatgcttttgatgggccaatgcacgcaggtcagacatggcgcatgctcaaacacctgctcgacccagataacaccaaatcggaacatactcaaaccttgcgtaagctgatgcaccagtataaaggcagcgagggggactttatcgccgaagctagcaacatatatatccccataaaccccgtcatagagcacgggcaatataccggggacacaaacaagctcgtgaacgaggagttcaccgtagctgaaattagggcagcgctaaagaagctaaacaccaaatccgcaccgagaccggacgggatcaccaacagaactctccggaacctagacgaccaagcaatagagaacatcacgcaatatataaaggaatgttgggccgaaggcgtcatcccagcacaatggaaagatgctaaagtaatccttatccacaagcccggaaaacaacccgatctgtcgaacttacgccccatttcactcacgtcctgcgctggaaagctgatggaacacgctttcttcaatagaatcaataactatcttgaggagaaggaaatttacccagactccatgctggggatccgctcccagctatccacacaggacgccatgctgcaaattaaacagcagatcctagacaacaaaacaagatcgactagggcgatactaggattagacctcaaaaaagccttcgacaaagcagcgcatgcagctatattaaatcagataagccaattaagcttaggatcgagagcatatagttatgtcaaggacttcctaacggacagaacggcatcccttgtaataggagaactcagatctgaggagagacacatgggtagcgctggcaccccgcagggttcagtcatatcgcccatgctgttcaatctaataatgataggactcccgcaacggctcaactctgtacatggaatacatcactccttgtatgcagatgatatcaccatctgggtgtctgaaggtagcgacggagagatagagcagagactacagaaggccgtcgacacgatcgaggagtatctcgaaggtactggcctcgagtgctcgccggataaatccgaactcctcctctattgacccacgctcaaaggcagaccacccaacggctacaaccgcaaccgagcctacgaagaaatccaaattctcaccaaaaacggcaggactatccccatagtggaacagattagaatcctacgactcatcatcgaatccaagggcactaacggagaagccgtcaagaggctagtaactaaagtcaccaacgcaataagggtaatcaagagagtcacaaacaaacaccagggaatgaaagaagctaacgtcgtctaacttatatattccttcgccataagtcacattatatacgtggcggcatacctcaattggtattcagccgaaaaagctaagatcaacgcactcatacgaaaggcgtacaagcaagctctaggccttccagatagcaccagcaccgagcgactacttcaactgggtgtacacaacacgttagaggagctcatagaggctcaaccaattgctcagttggagagactagccggttcgcgcacgggcaggaatatcctcagcaaattagggataacctatcaccatcaacaaggatctaaagtgtcggttcccaaggtaatcaggcaaaagatccaggtccccattctgcctaaaaatatgcaccccgaacttgatcagggaaggagggagagcagagctaaagctctactcaaggcatacggtagagtcaaggaggcgttgttcgtgacgcagcggagtacacgagtcacgaatccaacgtcgcagtagtaataaactccgaccacgagtgcataagcgcatgctcgatacgctctaataatagtgaaattgcagaagaagtagctatcgctcaggccttcatttcccccaaatatagatacgtcatcagcgactcgcagtcagccatcagaaactatgcgcgaggaagaatatcgcccgaggccgctaacatactccacgggaaagcacagttaatatcatcagaggaattcgaagacagatacatcatttggttcccagcccacacctcctgtgagtccctagctcccaaccttaagaggaagcccaccgcgtcgcgtgaggtctcatttaccgcgctcgcgaagaagcttcctccgaaggaacgggaggggagacctggaaggtgaaggacagaatgttcagattctgcgacgtcacccgcttctaccaaaagtcgaggtgcatattcccacctcctagctccaaattagacagatctcaggcggttgactggaggcgacttcaaactagaaccttccccaacccggtgcacctacatcgcatctaccccgaactatacccaggtgatttgtgcaaattatgtaggacagaacacgccaccctagaacacattctatgggattgcgcac

SEQ ID NO: 110 - DNA, 20504 bp, unidentified
  variation 1109..1208: note = n is any nucleotide
  source 1..20504: mol_type = other DNA
aaccatttcatctacaaaaccacaatcatccaataccttaccaaaactattaaaactcaaaccatcagcaacaacaaaatcattgatattaccaacatcttctttatcagcaccatcaccaatctctaattttttatcagcaccatcaccaacctctaatccatcaccatctacaacatctacaacaacaatatccactaccgatagtagccgtagtagaattgaaacatacaatcatgtcgacaagcgaccaagaacgacgaattatattttccagggaggtagattcgtcaaggaaagagacgaatatagccttcagtccaataacaactccacggctttagaaatggaaatggatatagattatccttcaacaacaacaacaacaacaacgacaacaacaacaacaacaactactacaacaactcctaataataataatattaataataaatatatatttggaatcgattgcggaagatcatcacatgtatccatcgatgaacacggtaaaactcactcattctctgtccatgaacattatcttaacttaagaagtcgtttcaactcggaagctcaaaagaaaatgttgggtccagccatgttaaagtttgaaagtctaattccacctagtaagagtaagtaaactatcaccttttatttttaatatagattgatattaatttattatattatttattattttttctttagatatcaatgatatctgtttggatagatcactgattagtaacaggattagttatcttagattacacccaacaacaacaaaaaactatgtcaacattagattagatgagtacaacctaataatgaagaagaaatactactacgataagcgtgaatcctacaattcaatggtggacaaactggttccaagtcaaaatagtatagtctttattggttctgccaagttcagccacaacagtcgtgggcaatcttctttcatttcttcagccactctctacaagtgggtgaagaaaagaaacataaagcattgtggatcaatgaatgctacacctcaaaagtaaagtacacttaaattgtcacaaattataatatattttttaatatttaaataataatcnnnnnnnnnnnnnnnnnnnnnnnnnnnnnnnnnnnnnnnnnnnnnnnnnnnnnnnnnnnnnnnnnnnnnnnnnnnnnnnnnnnnnnnnnnnnnnnnnnnntactgatctattatctaaaaactggaaacgatgatactctgtaaaaccaggaaagatctttatttctttctgtttcaattcctttgggttatgaatttcgactgttactttgatggtaacagcctccttctctgattcagaagtcaatttgtatgttctttgatagttgttgttgtcagtggtactcttgattgcattgataacatcttgatctgtatagattgaatctttgaaactcgacttgtctgctatcgctctagaaaccattgaaaaatgttgatcgcattcactctttccgtgatagggtgcaaaagtattcaattcgacgagatactttcttttggttttgtttggagtgtttggatcagctacttgcaactttgacaatgtatgcatatatgaaagtatttcatttgacttgaagtgtctagcattatcacaccaaaatgtaattttgttgatatttagactggtgaataatggatcattgattaatttgtcgagacatgaaattgcaaatgtcgaacagtgattaagtacttgtgaaagacagtcatagtagtgaatcttcagcttgtcaccttgcttatagaagaggaccattccaaagaaggtacgagcaggttgttggtaaaattcatggcttacttgcactttggatttacctaatgatatattctctttaaaatcacagagaataatacactctcctacctttaactcatttttctaaataaaaaaaaaaaaaaattttcattaataaatcattagctaaatgtattaataaaattataattacacatgtcaaataatcattctttctttgctgaacaaacatcttgtgaatagtcaagatttcaaacagtttatgatcttgatctgaaagttgcccaaacttaattcgttttgactcgagagcctgatactgaacacacattggacacatgtcggttcgattcttcatttctctgacatactctggtacgaaactgtaaaatgcacttctacccatgagtggatacttgacttgatcaacttcactcttcttgaggtaatctgtaaagcaggtatttatgtttcctaaagcaaggttcttgattggcaccaactcgaaagctcgtttaccatctgcgtcgagttctttgctgtacaacctcatgtttttacttgattcttcagttatatctttcatattgaagtaaccttcgacggctgtccttagcatcgtggttctttgtcttcttgtcatttgtccattgtgtgtaaatttagatctccaattgctgatctcttctgcattaatcagtctacctgcaccatacttgtgtacgtgttgaattgcacgattccacgcattattatctattgtgattccaaactctctgatttccttagaagtgtaaaaaggaactaaacttgataacaatctagattgggaatattagtatcaatgatatacaaaatcgcgagcattacaaaacacttaccttgttttttcatatccatctctatctgtatattggccactctgaagtgatgaaataacatatgacaacgcaacagcatgtgtggttgctccaggtatctcttcatatatctccttatatcgctttctgaattcttctgttgcagctatactaccatctttctttaattcttcaagaacctgaatatatttatagttaaaatatgaacaataatcattcaaaacaacagtttatgatatgtatagtagtcaatagtgtacctgctttccagtggtattctttgttaaccaatctttcattaaatgtgtctgttgatcaatcgttactttgttatgtttttttggtgatgctattacatttactgaagttgttattaaatttaaaactttacttttattaccagacctctctgataatttactatagtccttataacgattactcttgactggtttagtgtttggatcactaactgattttattgaattcaacactccttgtgtataattattgaaagagggagccaatgatcgactattattactcttattttgttgtgtagttaatctgcttgccattttaaaataaaacttaattaaaataacgaatcaaaaatcaaatataaataattaaaaagaatcactaactttaaattttttttttttttaaaaaaagcaaaacacaaaaaagcatagccacatgataataagtattagtttgatgcacctctttaacaatatttctattaatgattaaatctatagattgttttattttttctttattattaaattttaatatatatattgtgttttgttttttaaataactaacttttgatccatgtataaccacattaccaacagtctacctgtttgtagaataccaaagaggttacgaggggtcataatgttcacgaattgattgaacattatattttctcgatatattttctttgacaatcgaaacaatgttgaattgctctaagcattattagttagctaaaataaaaccattggttttcaccatatcttgacaataattaaaaggttcacgtttctcagctgctcttctcctatagaattctctgaatgatgatgatggtttaaccagtcagttaatagttgtttaaaagtgaaaaaataaaataaatctatacctttataaatattacatccactatcctttttagccaatctatgattacatgtgcttgtttatatgtttattttactttttagttgagcaatagaactaattctgttattaaactcaaactttgtaattgtttctgttattgaaacgcatgctaatcggtcattgtccagtaattaacctttatttactaatttactacatgtatatcttggtgataaatattcaaataataattaaattataactatattttaaaagaatgaattaagatgtctgttttcttttgtttttattgcaaaaaaaaaaccaaaccaaaatataattaaaaaaaaatattattttcaaattcaacattttttttgcaaaacttagttttcatatgatccaaacacaaagtttggaagaaaattataaaaatatcccgatttagaatgtttgctaaatatattggtataatcataccaatcatattagatattagaaaaagattcttttttttttcttgatcctcaattctttgtaaaaaacttttggaattaagttttcaacctttctttgttaatacggagagaatttgcctcaatacaacaaaactatgcttttttgttttgatcaaaaccaaattttttcattttaatttttttactttacaaccttcaaatttaacaacaaatacaatcttcaaatttatataatagttattatttcttttatttttaaaatattattttttatatatttatctatttttattatacttattagatttctttttatttgtttacattttactcttacttatttttttgtttagttttatgaaaaaccttttttttaataattttttattatttttttatataatatttattgtttgtttaaatatgaaatatgtatattccaataatcaacatctatctgaaaatgagatcaaatcggaaactatcgtttatccgtataatcatttatatagaaatgtcaataataataataatcatctccaaaaaatttttattcaattatcgcaaattagtggattactttcctattgtttttcattaatatatcacgacattgtaaataaaatcgattttgatatgaaaatgtttagtcaaacatttaaaaaatcggatatcccagaggaatgggtggatattaggaaagatgaagcgagcattagtaaatttagattgctttttgcaaaaagtaaaatttcacacaatactgacctttgtgaggtgattcttttgcagttcctctctgacagtaaattgtatgatttgaaagataaggaaaaaaaagtaagatttaaaattataaattattcttatttctataaactaatcaattttattatttactctaatttagattattaaagagttaaaagaaagtgaaattgctaaagataaattcattttgaaaccagaagttcaaaagttagttgacaagtaagtttgtttttgtttttcgtattttttaaacaattaaattaataagaaattttttttttttttaaaaagattttttaattttgtagttgttctaccattactgagagacgaggagaatgagaattacaagtttctaagaaaactttatcaagatgtttatctggcatttctcaaggaacatggtttgggaaagaacagacttggaagtttgaatagagactggttcaacgagatggtcaaccaaatagtacgagaccacatgaagaatcaatccaatttgaatctgttgaatatcgaaaggataagtaaacacattatggagctgaatggttttggtccgatcgtaacatccatcaagaagtaccttcttgcaaagccagaggaaaccgtagactcggccttgagagagccttcaattttaatatggttacgacaacatgacgccacaatcaccaaagaatcgttcgaccgattcaaatctttcaaaaatgattttgaaacatacttggtgccagtgacaaaatctagtgaaacgaattgtacgagtgcattggaattcattcaatctattctgaatcatccaactattatttgtatgtatactttaattttatttaaaattttatttattatttttatttattttctaatttatataattttataaatcactttagtgcataatcaaagagtacttcaaaatatggaggagaagaagaagaagaaagagaaagagaaagagaaagagaaagagaaagagaaagagaaagaggaagaggaggagaagaagaatcaacacaataaagtcaattggaatcaacacacaattaatcaatttcaaaatattgaaaaagaatttggaaaatattacaatgaagacaattataaaactgaatctcaagcatggatcaactcaatcaaacaaccaacttcaccaattccactcaaaaataataattcgcaatggataaaagccaatgacaactacaacaaactaatcatgataaatgaatttataccaaagtttaaattggcaccacgcaactttattttatctacaaagtttctccaacagtttcttctacaattctataacggttccgatttcaatcgagaaggaagttatctggatcatctttcattattaatcaacataccggaacagttcaaacaaaatttttatacgtttaaacatcctcttaccgtttgtcaattcaatttggatcgtgtatcacattgtggacacgtgccaccagtagattcagtcgaccacaccaatgcacacacaatatgtatgtttgcagcatccaacaatttaactctaactgtcccgaagcaaaagaaagttggtgctatgctttgccctgagcactctacattctcgaagaagtgcaagctaagtaaatgtgggagccgctgcatttctaaattcaaggagtcggaatggcgtatccagagtatacgatgtggatcactggattccgaacctcatattgaaaagaagaaccaatggattagagacctatcaaagccaaattcaatcatagaggttacgtctcaaaaacaaacgtctatcaattggacatcaaccaacgcttcaaccgcctctgtgaaacccaaccaagaacatttcaattcaccattttttgttggctgtgatataaactatcaaggaatggaatcaattccaccgaattgtgatataggtgtcatattcagcgatccaaccagtaaatggcatgttggacttaccgcagatgacactgatttcaattcatcttttaaaaagctcggtaaaattattaatacggtgtttaaagataaaaaggtacttccaaaactctttataaccaatagttactcctctacaaattattcaccttttggaattccggagcaatcactacctcatatattggcatggttggatcagataattgaagggaaccacaaagtgattatattggcagattgggaatctcagagcttcatcttacatcttttctcgggcaagccaattcaaaattcactctataacatctcaaatcagaactctggtaatatcgaatcctacatcctttaccactctggacgaccaacaacattgttcatatttgccaaccatccgaccccaggagttatgaagcctgagttggaattggcaagcagactattggcgaagtatgatggagattccaaacatttcatactagatccagccaaggaaaagaaactgaattttaaaaccaaaccatcggatgctaccaacacagtcagttacgattatgatggtaatattaattagaatctattgattttaggatgattttatattaatattattttatcaaaactatatataggaccgactgtatctttgaatggaatcactttctccattacgtataagaaaccaaagacacgagaagatgatgaaagtattcatccctccaaacagccgtatcattcatcgcttaacgtggatcttaaagaattccaatacattcaagatatggtaaaggagtacaaatctccaccaccaccaccaccaccctcaacaactaaaacaacaaccaccacctcaacaacatctttatcaccaccaataacttctccaagtgcagtttcacctttaattccaaccattccaacattatcatcatcatcatccaagccaatacaattcaactataacaaattgtcggctgatacatcagcaacaagtaataataataatacatatgataaagatttcaaaatggatattgattctcaatctactttggcacatgtgtttccttcacccaagacatcaatggcatcatcttcacaatctagcactaccattcattcaacagcatccactacaaacagtgacagcagtactcattattacaatgatagtgatgaagaattcaatttattggattactaccagtattgtcttgagaataaattggaagatcaggcttttacaacaccatcaaagtcaacactacaaaagaattgtgagagttttttgccagatatatcctttgaactggagaggtcgtctttttccaatagtggctctctctatattccaccaccaccacctattcccgagaaaacttctaaatttgcatttgtaattcccaattcatcatcatcatcaacaaaatcattgatattaccaacatcctcattgtcagcaccatcatcatctaatccctcaccatcaacatctaatcccccaccatctacaacatcaccaacaacaaccatttcatctacaaaaccacaatcatccaataccttaccaaaactattaaaactcaaaccatcagcaacaacaaaatcattgatattaccaacatcttctttatcagcaccatcaccaatctctaattctttatcagcaccatcatcatcttctaattctttatcagcaccatcaccaacctctaattttttatcagcaccatcatcatcttctaattctttatcagcaccatcatcatctaatccctcaccatcaacatctaatcccccaccatctacaacatcaccaacaacaaccatttcatctacaaaaccacaatcatccaataccttaccaaaactattaaaactcaaaccatcagcaacaacgaaatcattgatattaccaacatcttctttatcagcaccatcaccatcctctaattttttatcagcaccatcaccaacctctaatccatcaccatctacaacatctacaacaacaacatccactaccgatagtagccgtagtagaattgaaacatacaatcatgtcgacaagcgaccaagaacgacgaattatattttccaggggaggtagattcgtcaaggaaagagacgaatatagccttcagtccaataacaactccacggctttagaaatggaaatggatatagattatccttcaacaacaacaacaacaacaacgacaacaacaacaacaactactactacaacaactcctaataataataatattaataataaatatatatttggaatcgattgcggaagatcatcacatgtatccatcgatgaacacggtaaaactcactcattctctgtccatgaacattatcttaacttaagaagtcgtttcaactcggaagctcaaaagaaaatgttgggtccagccatgttaaagtttgaaagtctaattccacctagtaagagtaagtaaactatcaccttttatttttaatatagattgatattaatttattatattatttattattttttctttagatatcaatgatatctgtttggatagatcactgattagtaacaggattagttatcttagattacacccaacaacaacaaaaaactatgtcaacattagattagatgagtacaacctaataatgaagaagaataactactacaataagcgtaaatcctacaattcaatggtggacaaactggttccaatcaaaaatagtatagtctttattggttctgccaagttcagccacaacagtcgtggccaatcttctttcatttcttcagccactctctacaagtgggtgaagaaaaaaaaacataaagcattgtggatcaatgaatgctacacctcaaaagtaagtacaacttaaattgtcacaaattataaatatattttttaataattaaataattaatcttttttttttttatatttataatataggttcataatgcatgttggaacaagacggaaaaggaaattcttgctaaacttaacaacaaagttagcaatatgaaagatcctccgccatgtgctctttcaagtggaccatactccaaatcagttagcatcgatagaaatcaagtagctgagtgtcacaagcaactatcaacactacaccagacagtcacaggatacatagatggtacgaataaagtcaatagttctactaataaaagtaatgaacgatttgactatatgaaacaccactctttgtattccaatcaaatgtctggaaacaatgtaaatgttgatggcttggctaaggatcatccgatcctgaaagtattccaagagaaaaaatggaaaaggccactctgtcgctgctgtggtcacttctaccaccgggataagaacgcttctagaaacatcttacttcttgggttactcagtgttcgatatcaattccgaccagtcgtgttccaatacatcaaatttattaacaaatagaattttacattctaacaacaagtaagttaattatttttttttagaaaaaatttttgacactaaccttcaattaaattttttttcacatttttttttcataatttctctgtcattcaaaaaatagtttcatattggaagagataaaataacaattttattatcccctaaagtgtgctaaattcgcgtaactaacaaaagttcattcttgggatttttcccaaaccaaatgttgtgtaaaaaaattaaaaaaaacgttatttctagtcaaaaaaaattgagtatttattaaatgtgttttaaattattaaatttgaataatggattgtggaaatacatattgcaatctttgtgaagagcgatgttgtggcaaaagcatttttgtttggttcttttttctttatagttcgtgttgacgttatttaaacagtaaaaacaatactcttgtcctccttcaatgtctattagatctggtgtgacaatggtgtatcttgtgtttctttcaatgcttgggtttttgagtagaattttgttaaccacttccaaaagatagtttttgaatcttagcgaattctccttttctgacgttgaggagctggtgcaattatgttctaaagattggaatgccacaaatgaattgtatagaattgcatagaaaatatcatttaatacgactcttgaatatgtgcgtgcacgatggatatttcttaacggattgatgatcatctttgttgaatctacataattgtggcagttattatacacccagacgactcttggtgttgttaactgttttgttgtgtaggttacttctccttttactgtttttttagtcctagaaactctcctcaattcatgtgttttatcttggcagattggttttggaatgttggtaaagaaaaatactgttttatctttcttggcctgccatgctattgctgtgtgaaacttattggaaccaaatgacatctctccttcagttgaaaagtcatttttctttcgattgcctccttttcttgacgggatgatttgatccataacctccttgcacttattcttagcaactgagacaatgaatgaataacctttgctttggaggtgcttaatattgtccatactgccaagaataccagcatcaattataatacatgtaccaaagttaacaggacaacctaaatgtttatccagtgcctcttcagttctcttgaggatctcttggtttaaatttactggaatgttctgagacttaatgatgttctttacatagtgctccaattcgaaatggtaaatatatgtaaaagagtccaccagtttccataatatgttgccaacagagtctgctttaccagctatgatctttttgcttccacccttgccagtccacttgtacaagtcatcgtcaaaagaaaaagtatctcctggggtccaattagctttgaatatatcatttacagcatccacaattggttggaaatcggtacttgtcaactttccatctttgtcaatggttccaaagcctttatagtgcaaacaacgatgaatagccttgaatttagagaatgatagaatattgaatactgaatggttgtaaaatgagatgttatcatcttttttccacaactcctccatattcggggtcctaacgaggccagcataaatgaatatagcaaggtattgcttaatatcatttaaactgaagtaggtgtagcgtgtataccatggaggttgctttctgtttctcagagctaccaatttataatgttcttgatattcattagttgatatgtgtagctgtgatagaaactctttaaagtaggtatcaaaaacaatttctattctttcgtggagagaaagggtattgtagttcgcgggaaccttaaacttgacaccttggctattgctagtcttcggaaatggattattcttgaggaaatcgatgttctccatttgttctggtgtaaatctcattccattgggcaagtattcaatattttgctgatagacagagccatcgccatcattacttggcactgcagtggagccaccatcaccatcaccaccatcactaccatcttcttcttcttctttctcctcttcttcttcaccaatgtattcttcgaactccatatccatcaaatgagaatagctctcctcttggtaaactacctcttcttggtttataaattctctaagtataattctacttgatttatttatgtcaaagttctggaatgtcataggttcgggaacgagtttaagtagtttaaataatcgatccaatgccactatatcattccatccatctctgacaaaactgatgatttcgtttagtggtatatcatattttctcacccagtttccaaagttgggatcaaaataaacattgtgatctatctttcctgttgacacatctttgttatgctgtaaagtaattataatatctttaaaacattaacaattttgatagagatttattaattaattgataaattaccttttacttcaacaagtttctgttttttattactactttgattcttttgactatttgattttttagccacagcaactccacctaaaaatgcaattaaaacaagtccaaatataagatataaatcggttatcgtaaaaccattatgattataagtgtagttcattgtgaaaaaaggtcaaaaaaagaacagaaatgatgatttggtaaaaaaaaaacaaatttttgtgttcgcgtgttgaaagatcaaaaatcaaaaaaaaattctcaaatttgtttcaaaagggttgatttaaaaaaattcaatttttttttttatttttccaactggtttcttgacggcaactgtgtctgggataaaaacacggtacacacactttaggggttattggtgaagcaattattttttgaaatttacagaatatccaccagagtttggatctttaatgaattgaaagttatctgtgctcaatccaaatttaccaagaaaagtattaccaagatcttttagtttcgacatcatctcttcacgttcacgatcctctttggctttgattatgggtggtagacgttgtgctgcctgtagagcgggttggaatcgtgggtcgatctccaagcatgctttgtagtcgctgagtgcatccgtcagtttctctgttgcttcgtatgcttgtgcacgacggtgtctcgacttcatttgtatggtattgctaggttgtaactcgagtgattcgctgcagtccgacacaaccaaatcatattgttttaaagccagatgtgatgccgccctattgcaatggtagactgctacctcttcattgcaaagcgaacgactctcttgatgatcttcatcttgatcatcgacaatctctacaatcttctttggttttgttagcaactctattgcttttgtatagatatcgatcgcttctttatattcagttgcaccatacaacatatttccttgtgctttcaaattgtttgctttctctatatcctctttatttgctttatatatctttttctctttgattatctctttcttttcatctttacttgtatttttattatcattatctttattttgattatcatttttttgatcttgactacctatatcatttgtatcattatctgtattacaatttgtatttactttattattatctatatctgactataatgaaaaaaagatagtaagtaaatatttaaaaattgaatttataaaaataaatatcattatttaccatctttattctaatataatatatattatgtttaaataaaattgaaaaactgattaattaaaaaaaaaataagcattaatcaaattaaatactaacacgattataaaaaaaaagataaatctttttttttttttttttttgttgttagattgattttaaaaaaaaagagtcagtgtgattgtattcagacaatcatctaattaatatgagtagtatcgatgaaatagatatctattctgatttagcgggtacttcaaatgtatctttgtcatatgaacaattggaagagaaacttgatcaattacagtcagagtttgataaacttaaacaagattctctaaattcaaatcaattattaaatacaactaaacaacaggtaactagctatcaatctattaataatatttaataaacaagaataactttattaacctttttttttgttcaaaaaagttacaacaaacaacagtacaaagagataatcttcaaaaaataaatgaaattctaatgaagaatatctcatcactctacaaaacagcgttagcagagtcacagagaaaagatagagaaatagaatcactcagagagcaacttgcaaacaacaacagtgcaagaaaacaaccatcattaccaaaaatcaacatcaagataatgaatggaaagtagtacttttctttatttataatcattaaaagatatctaaaatgtacataaatacaaagtaaaattaaaaattaatcttattgttgttttttattttattttatttttaaaagtgaaagtggtatacaatatcatcaaatcgtcataatactttattattataatgttgttattattattatgatttgattatttttatgttattattattgttgttgttatataaagttgtcgaatgatatgctatgttgatttttttaatttaatttgatgtcggctggagcgttgtagaagaaaccagcgttaaccaattcctttacgctactctccaagacgataaccgatttgaaacctttgctttgcaatttcaaagcggcttcacatgcaactgggtaacctttctcctttggaccgagtaagagcaccatcgatgacttgtcgagttgctccgatgatttgtcgaggtgttcgactgggtgactgactgaaccgacaaccgactctgcagcaaactcggcggcaggacggatatcgagcaaatagaaatcgaatcccatcattgcgatacggtggagaccggcagtggccagacgtgggatatgtgcatactgtgggaacgatggtgatttctgcttgtttggacgacgacctctctgtggtgatggtctggcaaccgatgccttgtatacatcctctttggttgcagtggtggtggtggtagtcgatgttgctgttgaatatgacttgattgcactgtagttgttacatttcaacagagatgttggaacaacaactgaattaattgtactgttcaacaaacaattgctatatgatgttctatttaatctaacctataattatattaatgaaaatcattaattttgttgttcaacctatgagcactcaatcaatcaaccaatcacaatcaaatttccaaaaaaaaaaaaaaaaagaggtagtaaatatctattccatctcttgttttaaaatgaaatgaatcaaactgtggtgcatccatttcaatatgtatctattgtttaacattaatattgtctacattttgttgtgtgatttaagattatattattttattgtttattggatatttctgctataataatgttttaatgtgttctatttgtctgtttaagttctctcactaatcaatagttgatttgagattactagtgataatgatgaattcttgaacgtttgctgattgactgattgattgcctgattgattgattgactatattaaaactaaacataccaattgtctaccaaacattttgattattattattaaagttattaaattatataaaaattaaaaagagatgctaatctgatggtatgagtaacaatgatcaaagtcgaatctcattaaaaaaaaaaaaaaaaattaaaaattaaaaattattttttgaaaaaaaaattgtggttttaaaaaacatcacaaacaaataataggtttaaacaccaacttatacaatcacatccaacgtacaccttataaagaaaatcaaatagagattaactttagtagttatctctcattgttattttaattttatttttttgtttttgttttcataacaaattagtttttttttttttttttttggtcaacaaatacattttttttttcaactattttataaaactaaagtacgagggaatcgagtcgatcgattcacattatatatatatatatacaagttcaaaataatatcatatagcataatattcgactattcttattattttaattatatagtatcgatatggatgcattggcatctctgagattgaaggttttgtcttcaaagaagaaaaagaatgatgacgataaagaagatggtgaaatagatgataatactcctttacagcagcaccagcagcaccagcagcaccagcagcaacatcagcaacatcagcaacatcagcaccagcaatttagaaataataataataataataataataataataataataataataataataataataataataataataataataataataatagcaatacatcatttcatccttttcatggtggtggtatgccaccactgccacctcccccacctcctcctttaaatcaatcaaacaacaatattcatagtcatcataatttaaatcatagccataatcatctatttgtaagtttctatgcatcgctagaacaatagtctatcatctccctctagttactaatgataaattgatttttagatacaagatagtatcatcgataaaggacccgttgatatggatttaacgaatgaatctgatatcaatatgttacatcatattcaacaacaacacataatgcaacaacaacaacagcaacaatcaaatcaattctttaatcaaggatttccacagaatatgttgtttaaacaatcaaactttgttacaccactgcctattccaccacctcctttcatcccaccaccactgccatctttccaacctggcaatggaatgtcttcacagtttatttcaccaacaatggtcgacaatttaaatatacagcaacaaattcaacaacaacaacagcaacatcaacatatgaatggttacctaaatggatcgagcaataatattaatagcaataataatatgaatatgaacaacagtaacaatggtatgaatcaagtcgaaaacttacaattacaacagttgttgcaacgacaacaacaattacatttattacagcagattcaacagcagcagcaacaacaacaacaacaacaacaacaacaacaacaacaacaacaacaacaacaacaacaacaacaacaacagcaacaacagcaacaacagcaacaacaacaacagcaacaacagcaacaacagcaaaatcaacaactagttggtgttacaccaaagaaacaaaaattagataacaagcgtgatttaccatcaccaccttctacattgtcggtgtcagctacttctccttcttctgttactccacctacagtttcaactccaccaataacgacgatcacctctgtaaacatgacaaagaaaaaggtaaagaaatcgataaagggatcatctggttctgtaccacctgtattgaacaagacatcagttatcagtacaaacagtattacacaacacagcaagaatatacctagtatgattatcaatgttggtgaggaagatactgacgatgataacgacgacctcaatcatcgacctcaatccaatcaacaaacaaacaatagcatcagcaccgccgatctgcttgaaaatgatgttagcaactatgaggttgaagccgcccaaacaggtcattttgatattgccaccgacgacttggtggacagcctcgctatggcaaagaagaaagagtacaccagcgagatggaggatctgaaacgacagatcgctgccaaggaagaagctctattgcgaaagaagttggaggagagaaagaaatcaaagttatccaccaccaatacaccatcgatgtcatcagtcgccaccgagccaagcgggttgtcgccaatgaatacagcaccaaccaacgcatctgccacccttatgctctcgtcagacgacggttctcagtcctatgacaatcacaacaacaacaacaaccacacaaccaatatagctagcgataacaacatcaataataacagcagcagcaacgatgcaccctttgagagtatagacaacagtcctctgacgaacgacgcattggccgaagaaaagtctgctatgaaaaagttaacaaccgatcttgttgaaaccaatcgaatgatggtcaagagtgaaggtgagatattcagaatcgaactagagttggccggtgtcgagtgtcaccgtaaggagttggagataaagatcaaccaactcaagcagacactcgagatttaccaagctgacttggagtcaacagagaaacaagctgaggaattccaatccaaattggaatcactacgatcaacttctactctgttactcaaagcatacaacaacaagattaagacaatcaatcaaaagaaacgtaaattcgatgaactaagagaatcattcacaatggatccatttttattgtccgtagtagacagaacaaccaactcaatcatcctaactccacacaatcagaaaataatagacgaaatttcaaccaccccaattttatcacattcaagattatctagatttaccaacaacaacaacaataataataataataataataataataataataataataataataataataataatcatcaatctttaataacttcaacttctctaccctccaatacaacaacaactacatcaaccacaacaactacttcaaataataataatgatattaatagtccagagttaaatattgtaagtagaacagctgatgatagtaatagtttgacaaatgtttctagacctaaacgtgttatctcggtggtaatgaatccatctataaagaaatctagtaatgttatagatttattacttcagggcaaaacattggatcaatttatcgatagaatgataaagtatagtgaaatcatagtgctgcctaaagtaccagctggtagcggtgaggctgattcaatggacatagacaatgcactcacagtttatgttgccgagcagccaacctctgtttggtgtagcaatgatggttccacagatttacacaaacccattatgaagagtatactgcatggtgtagttcccgaaaagttagagaccatcttgaatccgatgaccatcaccaatacctacgtcggaaacaagccaatgcccaaagggaaataccagtcgcctcttatgtgtctccgatcctaccgattctcccatacctacaccaagttttgtccatttacactgacctcctctatgtactcgtccaagttgaatccaaagaagaaactctgcatgtatgaacttgatggtgtctgccgtgatcctaaatgtacattccaacatcaacgtgattattcaatgtccagtaagtaactctgaaaagatgagacattatcaactgatcaactaaccctatctatctatttctagataaggaaattattgaggatattatttcctatgccaacgataaggtagtagctgttcgaaaggaatgtatgatgttgttggatcaaaagaaagaggattcattccctcaatcattgaagaaagcattttttaatgtgatcacagagaacaaacaactcattcttcaagttggaccatcacgtcagaaggtattggatcaaagaaatcaacagttcttgtctgaatcgattgccaagagtaaaaagaaaaagaaggaagctgtcgtttatcaaccaatcaatcgtttgcctcaggttcgcactgttgtcagttcaacggtagtagaaaaaccagagacagaagacttcctcaacattgagaaatatgttgagattgtcagacgtgagaagcacaacacttctaattcacataaagatgaaatgagtgatgatgaagcaccgcctccctccgttccgctcagctcaacaactcgatcgatcaccactggcgatgacaaatcagctgaagagcctgtcgattcacat

SEQ ID NO: 111 - DNA, 20504 bp, unidentified
  misc_feature 1..20504: note = Fanzor polypeptide
  source 1..20504: mol_type = other DNA
ttgattgttctgttgattgcactgtagtgttgtgttgaataggagtatggagtggtgtttgggttggagtttggattggtgattgagatggagtttggattggtgtttgggattgtgttggaattggtgtttggattggtgtttgggatggtgtttgaattggtgtttgggatggggattggattggtgtttgactatttacatgagttgatttgtgatgtttttgattgtccattgattcttgattattatcttcttctcttattcttttttttgttgaattgttattattattattgttattgttatttatttggttatttatttggttatttatttttttatgttgactattattgtcacaatcatcctctctttcttttcttttaccactataaatcaagctcgatccgatatcatgatcatcgtcaccaaaatcaatcgattcgatatcaaacaatggtttactttgggtattttgtgtattattatgtgtattattatgtgtattatgtgtattattctgtgtattattctgtgtattaatttgtttattattttgtgtactattttgtatattatcttgtgtattattctgtgtattattttgtgaattagtctgttttgttttctttgttcctctgtagcctcttcttcttttgtttgtaccagagagtgtttggtctggtgtagttgtggtagctggttttggtgaagattgagatgaagtagaagcagcttgtgaatttgaaagtgttggttgagatggtgactgaggtgacgaaacaatttgttgtgttcttgaaggtgtgggttgtggagctaatttagatgttacattggcataagtatttataatatcgctcatctcttttgccttttccttatttgattcgtctacattcttggcaatctcattcatttctatcatggtgtttagataggtggtatgtgccttatctcgagctggtttccaagactgtgcctcctccttggtggtcgattcgtagcctctggaaattgtagtctctttaccaacttgacttttcatagcagaatatttgtagatagtcatttttgtcaacttcatttccacccatgaatttaatgtaatgtttattggcacgcatcttttttttataaaaaaatattgattaataattgttttgaatacaaattatataattgattaacttactgatctattatctaaaaactggaaacgatgatactctgtaaaaccaggaaagatctttatttctttctgtttcaattcctttgggttatgaatttcgactgttactttgatggtaacagcctccttctctgattcagaagtcaatttgtatgttctttgatagttgttgttgtcagtggtactcttgattgcattgataacatcttgatctgtatagattgaatctttgaaactcgacttgtctgctatcgctctagaaaccattgaaaaatgttgatcgcattcactctttccgtgatagggtgcaaaagtattcaattcgacgagatactttcttttggttttgtttggagtgtttggatcagctacttgcaactttgacaatgtatgcatatatgaaagtatttcatttgacttgaagtgtctagcattatcacaccaaaatgtaattttgttgatatttagactggtgaataatggatcattgattaatttgtcgagacatgaaattgcaaatgtcgaacagtgattaagtacttgtgaaagacagtcatagtagtgaatcttcagcttgtcaccttgcttatagaagaggaccattccaaagaaggtacgagcaggttgttggtaaaattcatggcttacttgcactttggatttacctaatgatatattctctttaaaatcacagagaataatacactctcctgactttaactcatttttctaaataaaaaaaaaaaaaaatttcattaataaatcattaactaaatgtattaataaaattataattacacatgtcaaataatcattctttctttgctgaacaaacatcttgtgaatagtcaagatttcaaacagtttatgatcttgatctgaaagttgcccaaacttaattcgttttgactcgagagcctgatactgaacacacattggacacatgtcggttcgattcttcatttctctgacataatctggtacgaaactgtaaaatgcacttctacccatgagtggatacttgacttgatcaacttcactcttcttgaggtaatctgtaaagcaggtatttatgtttcctaaagcaaggttcttgattggcaccaactcgaaagctcgtttaccatctgcgtcgagttctttgctgtacaacctcatgtttttacttgattcttcagttatatctttcatattgaagtaaccttcgacggctgtccttagcatcgtggttctttgttttcttgtcatttgtccattgtgtgtaaatttagatctccaattgctgatctcttctgcattaatcagtctacctgcaccatacttatgtacgtgttgaattgcacgattccacgcattattatctattgtgattccaaactctctgatttccttagaagtgtaaaaaggaactaaacttgataacaatctagattgggtatattagtatcaatgatatacaaaatcacgagcattacaaaacacttaccttgttttttcaaatccatctctatctgtatattggccactctgaagtgatgcaataacatatgacaacgcaacagcatgtgtggttgctccaggtatctcttcatatatctccttatatcgctttctgaatttttctgttgtagtaatactaccatctttctttaattcttcaagaacctgaatatatttatagttaaaatattaacaataatcattcaaaacaacagtttatgatatgtatagttgtcaatagtgtacctgctttccagtggtattctttgttaaccaatctttcattaaatgtgtctgttgatcattcgttactttgttatgtttttttggtgatgctattacatttactgaagttgttattaaatttaaaactttacttttattaccagacctctctgataatttactatagtccttataacgattactcttgactggtttagtgtttggatcactaactgattttattgaattcaacactccttgtgtataattattgaaagagggagccaatgatcgactattattactcttattttgttgtgtagttaatctgcttgccattttaaaataaaacttaattaaaataacgaatcaaaaatcaaatataaataattaaaaagaatcactaactttaaattttttttttttttaaaaaaagcaaaacacaaaaaagcatagccacatgataataagtattagtttgatgcacctcttcaacaatatttctattaatgattaaatctatagattgttttattttttctttattattaaattttaatatatatattgtgttttgttttttaaataactaacttttgatccatgtataaccacattaccaacagtctacctgtttgtagaataataccaaagaggttacgaggggtcataatgttcacgaattgattgaacattatattttctcgatatattttctttgacaatcgaaacaatgttgaattgctctaagcattattagttagctaaaataaaaccattggttttcaccatatcttgacaataattaaaaggttcacgtttctcagctgctcttctcctatagaattctctgaatgatgatgatggtttaaccagtcagttaatagttgtttaaaagtgaaaaaataaaataaatctatacctttataaatattacatccactatcctttttagccaatctatgattacatgtgcttgtttatatgtttattttactttttagttgagcaatagaactaattctgttattaaactcaaactttgtaattgtttctgttattgaaacgcatgctaatcggtcattgtccagtaattaacctttatttactaatttactacatgtatatcttggtgataaatattcaaataataattaaattataactatattttaaaagaatgaattaagatgtctgttttcttttgtttttattgcaaaaaaaaaaccaaaccaaaatataattaaaaaaaaatattattttcaaattcaacattttttttgcaaaacttagttttcatatgatccaaacacaaagtttggaagaaaattataaaaatatcccgatttagaatgtttgctaaatatattggtataatcataccaatcatattagatattagaaaaagattcttttttttttcttgatcctcaattctttgtaaaaaacttttggaattaagttttcaacctttctttgttaatacggagagaatttgcctcaatacaacaaaactatgcttttttgttttgatcaaaaccaaattttttcattttaatttttttactttacaaccttcaaatttaacaacaaatacaatcttcaaatttatataatagttattatttcttttatttttaaaatattattttttatatatttatctatttttattatacttattagatttctttttatttgtttacattttactcttacttatttttttgtttagttttatgaaaaaccttttttttaataattttttattatttttttatataatatttattgtttgtttaaatatgaaatatgaatattccaataatcaacatctatctgaaaatgagatcaaaacggaaacaatcgtttatccgtataatcatttatatagaaatgtcaataataataataatcatctccaaaaaatttttattcaattatcgcaaattagtggattactttcctattgtttttcattaatatatcacgacattgtaaataaaatcgattttgatatgaaaatgtttagtcaaacatttaaaaaatcggatatcccagaggaatgggtggatattaggaaagatgaagcgagcattagtaaatttagattgctttttgcaaaaagtaaaatttcacacaatactgacctttgtgaggtgattcttttgcagttcttctctgacagtaaattgtatgatttgaaagataaggaaaaaaaagtaagatttaaaattttaaattattcttatttctataaactaatcaatttttattatttactctaatttagattattaaagagttaaaagaaagtgaaattgctaaagataaattcattttgaaaccagaagttcaaaagttagttgacaagtaagtttgtttttgtttttcgtattttttaaacaattaaattaataagaaattttttttttttttttaaaaagattttttaattttgtagttgttctaccattactgagagacgaggagaatgagaattacaagtttctaagaaaactttatcaagatgtttatctggcatttctcaaggaacatggtttgggaaagaacagacttggaagtttgaatagagactggttcaacgagatggtcaaccaaatagtacgagaccacatgaagaatcaatccaatttgaatctgttgaatatcgaaaggataagtaaacacattatggagctgaatggttttggtccgatcgtaacatccatcaagaagtaccttcttgcaaagccagaggaaaccgtagactcggccttgagagagccttcaattttaatatggttacgacaacatgacgccacaatcaccaaagaatcgttcgaccgattcaaatctttcaaaaatgattttgaaacatacttggtgccagtgacaaaatctagtgaaacgaattgtacgagtgcattggaattcattcaatctattctgaatcatccaactattatttgtatgtatactttaattttatttaaaattttatttattatttttatttattttctaatttatataattttataaatcactttagtgcacaatcaaagagtacttcaaaatatggaggagaagaagaagaagaaagagaaagagaaagagaaagagaaagagaaagagaaagagaaagagaaagagaaagaggaagaggaggagaagaagaatcaacacaataaagtcaattggaatcaacacacaattaatcaatttcaaaatattgaaaaagaatttggaaaatatcacaatgaagacaattataaaactgaatctcaagcatggatcaactcaatcaaacaaccaacttcaccaattccactcaaaaataataattcgcgatggataaaagccaatgacaactacaacaaactaatcataataaatgaatttataccaaagtttaaattggcaccacgcaactttattttatctacaaagtttctccaacagtttcttcaacaattctataacggttccgatttcaatcaagaaggaagttatctggatcatctgtcattgttaatcaacataccggaacagttcaaacaaaatttttatacgtttaaacatcctcttaccgtttgtcaattcaatttggatcgtgtatcacattgtggacacgtgccaccagtagattcagtcgaccacaccaatgcacacacaatatgtatgtttgcagcatccaacaatttaactctaactgtcccgaagcaaaagaaagttggtgctatgctttgccctgagcactctacactctctaagaagtgcaagctaagtaaatgtgggagccgctgcatttctaaattcaaggagtcggaatggcgtatccagagtatacgatgtggatcactggattccgaacctcatattgaaaagaagaaccaatggattagagacctatcaaagccaaattcaatcatagaggttacgtctcaaaaacaaacgtctatcatttggacatcaaccaacgcttcaaccgcctctgtgaaacccaaccaagaacatttcaattcaccattttttgttggctgtgatataaactatcaaggaatggaatcaattccaccgaattgtgatataggtgtcatattcagcgatccaaccagtaaatggcatgttggacttaccgcagatgacactgatttcaatccatcttttaaaaagctcggtaaaattattaatacggtgtttaaagataaaaaggtgcttccaaaactctttataaccaatagttactcctctacaaattattcaccttttggaattccggagcaatcactacctcatatattggcatggttggatcagataattgaagggaaccacaaagtgattatattggcagattgggaatctcagagcttcatcttacatcttttctcgggcaagccaattcaaaattcactctataacatctcaaatcagaactctggtaatatcgaatcctacatcctttaccactctggacgaccaacaacattgttcatatttgccaaccatccgaccccaggagttatgaagcctgagttggaattggcaagcagactattggcgcagtatgatggagattccaaacatttcatactagatccagccaaggaaaagaaactgaattttaaaaccaaaccatcggatgctaccaacacagtcagttacgattatgatggtaatattaattagaatctattgattttaggatgattttatattaatattattttatcaaaactatatataggaccgactgtatctttgaatggaatcactttctccattacgtataagaaaccaaagacacgagaagatgatgaaagtattcatccctccaaacagccgtatcattcatcgcttaacgtggatcttaaagaattccaatacattcaagatatggtaaaggagtacaaatctccaccaccaccaccaccctcaacaactaaaacaacaaccaccacctcaacaacatctttatcaccaccaataacttctccaagtgcagtttcacctttaattccaaccattccaacattatcatcatcatcatccaagccaatacaattcaactataacaaattgtcggctgatacatcagcaacaagtaataataataatacatatgataaagatttcaaaatggatattgattctcaatctactttggcacatgtgtttccttcacccaagtcatcaatggcatcatcttcacaatctagcactaccattcattcaacagcatccactacaaacagtgacagcagtactcattattacaatgatagtgatgaagaattcaatttattggattactaccagtattgtcttgagaataaattggaagatcaggcttttacaacaccatcaaagtcaacactacaaaagaattgtgagagttttttgccagatatatcctttgaactggagaggtcgtctttttccaatagtggctctctctatattccaccaccaccacctattcccgagaaaacttctaaatttgcattttgtattcccaattcatcatcatcatcaacaaaatcattgatattacccacatcctcattgtcagcaccatcatcatctaatcccccaccatctacaacatcacccccaccatctacaacatcaccaacaacaaccatttcatctacaaaaccacaatcatccaataccttaccaaaactattaaaactcaaaccatcagcaacaacaaaatcattgatattaccaacatcttctttatcagcaccatcaccaatctctaattctttatcagcaccatcatcatcttctaattctttatcagcaccatcaccaacctctaattttttatcagcaccatcatcatcttctaattctttatcagcaccatcatcatctaatccctcaccatcaacatctaatcccccaccatctacaacatcaccaacaacaaccatttcatctacaaaaccacaatcatccaataccttaccaaaactattaaaactcaaaccatcagcaacaacaaaatcattgatattaccaacatcttctttatcagcaccatcaccaatctctaattttttatcagcaccatcaccaacctctaatccatcaccatctacaacatctacaacaacaatatccactaccgatagtagccgtagtagaattgaaacatacaatcatgtcgacaagcgaccaagaacgacgaattatattttccagggaggtagattcgtcaaggaaagagacgaatatagccttcagtccaataacaactccacggctttagaaatggaaatggatatagattatccttcaacaacaacaacaacaacaacgacaacaacaacaacaacaactactacaacaactcctaataataataatattaataataaatatatatttggaatcgattgcggaagatcatcacatgtatccatcgatgaacacggtaaaactcactcattctctgtccatgaacattatcttaacttaagaagtcgtttcaactcggaagctcaaaagaaaatgttgggtccagccatgttaaagtttgaaagtctaattccacctagtaagagtaagtaaactatcaccttttatttttaatatagattgatattaatttattatattatttattattttttctttagatatcaatgatatctgtttggatagatcactgattagtaacaggattagttatcttagattacacccaacaacaacaaaaaactatgtcaacattagattagatgagtacaacctaataatgaagaagaataactactacaataagcgtaaatcctacaattcaatggtggacaaactggttccaatcaaaaatagtatagtctttattggttctgccaagttcagccacaacagtcgtggccaatcttctttcatttcttcagccactctctacaagtgggtgaagaaaaaaaaacataaagcattgtggatcaatgaatgctacacctcaaaagtaagtacaacttaaattgtcacaaattataaatatattttttaataattaaataattaatcttttttttttttatatttataatataggttcataatgcatgttggaacaagacggaaaaggaaattcttgctaaacttaacaacaaagttagcaatatgaaagatcctccgccatgtgctctttcaagtggaccatactccaaatcagttagcatcgatagaaatcaagtagctgagtgtcacaagcaactatcaacactacaccagacagtcacaggatacatagatggtacgaataaagtcaatagttctactaataaaagtaatgaacgatttgactatatgaaacaccactctttgtattccaatcaaatgtctggaaacaatgtaaatgttgatggcttggctaaggatcatccgatcctgaaagtattccaagagaaaaaatggaaaaggccactctgtcgctgctgtggtcacttctaccaccgggataagaacgctgctagaaacatcttacttcttgggttactcagtgttcgatatcaattccgaccagtcgtgttccaatacatcaaatttattaacaaatagaattttacattctaacaacaagtaagttaattatttttttttagaaaaaatttttgacactaaccttcaattaaattttttttcacatttttttttcataatttctctgtcattcaaaaaatagtttcatatctcacttaaactaaaatgggtatagggaactttgtcaatttctcctccctgtcactttttgtgtttttataaattttaaaaaatttaaaaatttttaatattttaaaaataaaagaattagttgattttattataaaaaatttaacgaagaggactttcactgatattgcgattagtaagccatacacatattgaaaaaacctgtatatgtttttcaaaatctgctctgaaagtttgagatacgattttaaaaatttttaatctactaaagaaattctccacaattgctctgtttgaacagatgtacaaattccagagtttttcttctttagataggtcacctgtatctttgcatgaagttaaaatataaccattatattcttctccaacataccctaaatcggcaataatagcttcggtatcttcaagctcttctataatacctgaatcagcaaggattgaataatcatgtttactacccatacacggaccatacactctatatgctaaaccatcttggagaccaattgccacctcgtatttaaaaccatgtgtggcatgttttttactatagagtaacttattgtctggatcatgatagtctggagctgggacagggcacaaagttgtatccaatgctaaatacgcataaacattgtcattgagagtctctgttttattctttttaaatcttcttgagttcgaagaaaggtgctaaattttaaaattgttgtatatacatttactttgaatttatcaatcgagaattgcttaccaaaagatcttttgatattaggttgttcaattttttcgaaacataccaaatcttgtctctaatgtgtttttcacttcgatgaaacttggaacaaaatttcgatattggtatattatttcggaagtaatacagcatccataataaccaatccattttgacgccatgaggactaagcatttcaaaaagaatattggctgtttcgggtgaacatccataatctgatctgaaatgaacttcactatctttatatataaacttctctgaataattcattctctgtttatcagataaacaataaatataataaattaatatttgtttaatgtagcagagtataatagaattatgtgtgttttgagtaaaatgtggtataataatatttgatttattcaccttttataataatttattttaattcaccaatttgttagggtgttttatgtgtggtttaactcattttacagaataaaaaaatttcaaaaatgggaacaaattaatacctacggtggaggataccagatttagagtttctaacaaatgttagcacctatttcccaacattttatattgagtttcatataaaatctagggaaaaggttaggaactaatacttttgatatatctttttcaatctttgagcaatcgaattttaaatttataaaacatcattttcatttcatttcaaatgttttttttttttcctaacattctttagaaacttttaaagtttatagtataatttagtatgggtactttttcatctgaagaaattacaataataaaaaacggtatagaaaataaattatcagataaagtaataatagataaaataaataaaatatcctcaaaaaatcatcatcagtcaacaatagaaaaaaaaataaaagaaatgaagagagcagcaaagaaaactaagggtagtaccgctcttaagaaagtcaaaagttctttagacaagagagataatgatattgatctagaagaggattcagatgaatactcagatgaagaagattatccagtaccaaagaaagaattaaagagtaaatgatattctttgaattttaaaaaggaaataacttacaatattttttaaaacaggacgtcaacctcttattgtacccaccttacctacctaccaacctctagtccctgctaaagagaataaaagtttaatggataattggattcaggattcaaagcaagatttcgaaagctataaggtttttgcccaaccaaaacacataggaaccccattagttattgattgcccaagagctgtgttagtgctctacccagaaataacacaaaaagataagtcattagtggaaccagttagcttcaatattctgtcgtctaacattctagtgataagatggcaacaaatgccaatggagaacttacaacatataattaatattaactccaatgcacttgacattaaaaatactatttatgaagaaaaagtatggtatttattaacaattatatcaaaaataacaatttttctaatgcaatattcttatttaatacaatcttagattcaactcccatttttagaaactggatacatttactcagatcctagaagagtagaacatgactgttttatcaacggattgttctcaaaacaaaaacaaatgaggtgagtcctggaaatccacaacaagcaatcatggcgatgatggctcagtttctcccacaattaaccggtcaagctgtaccacagcaacctcttcaacaacctcctcaacaacctcctcaacaacctcctcaacatatagatgatcaagaagaagaggtattaagaaacaataatgcaactagaggaagaggaggaagaggaggaagaggaggaagaagatccacctcgaggcggaggtagaaggtgaactaagtattaatacaataaaatttgttaatttattactttttaaaatattcatacaattgtaaaagttccctaaacccaatgtgtataggaattagtaagatataaaactatttgttcccaagccatcaaagatctttttgatcattctattattttttgtagaaaagtacacttgcaagttttgattaatcaaacagtttattttaagatcctctttatatgacgtattagaaaaaacacatcatcaatcaagtgacatcctatgttattgagacttaaacaaaagtttacaaattctttgattctgttaatcttttcaacaatttaaacagattaataatgagaaaattaaaagattaggaacattactgttatcgccgaagatcttattatcaaaaagaatgatggaacagtttggtaatttacgactaatctattttttttaattaatttttttagtataaatcaaaggtttgtgaatgtgtgtttaatcatttaaattgttgatagaaaagttaaaaataattatttagatttgtataaaatagaattaatcaaaatgagtgttatcaagttacctattcctccattcgacgatgttacagcacgtgaaaaagtaagattggccgaagatgcatggaattcacgtgatccgacaagagtatcacaagcctacaccgttgacaccaagtggagaaatagatcagagtttatcaatggcagagaacaggtagttgaatttctcactagaaaatggcagaaggaacaagagtatcgactgatcaaagagctgtgggcatacaaggacagccgcattgcagtgcgctttgcatacgagtggagagatcatagcggtcaatggtggcgttcctacggcaatgagaattgggagttctcacccgaaggtttgatgcaagtgcgttacgcttgcatcaacgatcttgccatcaccgaacaacaacgactctaccattggtcacaaggaagaagacctgatgatcataaatcattatctgaattaggattataaataaataagtaaataagtaaataaaagtgtatatgtagatattgatattataattgttttgttttgtttgtttttattaaataaatcttaattattcaatctaaatccattctattattgttgttgttgttgttatttgagttatcactgagttgtttcattataaaagatacagtgtcaaagagttgaaggaattcctctgatccatcaacaagatttctatcgacatcaccaatcttcatggcaataagtgctttttgtttatcggaaaatgatttatgatttgtgacttggtcgaatatctgtacgagtatttgtgatgccggatagccttttgtaaccaactgttgtagattcgattgtagtttatcatatgaattcgatttacatgtattgattaatgtttctattaattttggtggtacagtctgttataacaagaattaacatgaacaataacatagatgtgagatgtgttagtttaactaaagataaagacatctaataataataataataataataataatcaattgataattataacttacacccgatatattataaatgttatctggtgtcaattctcttgaaccgtagaatctataggatgattggaggtaggtgattgcctttctgagatcaccgtcggatacggcgtgaatcgcttggtagacctcgtctttgacgggtggcatcgattccgacgaggcaatgtagcgcagacgttcaatcatggcggtgtcattcagtgatttgaaacggaatttggcgcaacgcgaagagagtggctcgataatacgtgttatatagttgcacagcagacagaaacgtgttgtcttactggtgtactcgatgatacgacgcagtgcagcctgtgcatcgtgtgtcatactgtcggcttcgtccagtacgatcaacttgaaggcagccgctggcttaccgttggtcagtgtattgttctggctgacagagaaactagcaaagttcttaatctttgtacgaacgacttcaatgccacgctcatcggaggcattcaactccaacactctgtctttatacaactctggaccaaacagatccattgcaactgccaatatagtagatgttttacctgtacctggtggaccataaaataataaatgtggtaactatatataacaattgtacagttaatcaagtttagttatctaacaatttgtatatatatgtgaattattaattacatttcctgtttctaatgatctttttaatgctttaacaacttcatcttgatgtgatacttcatcgactgttttaggtctactataatgtttgttttcgaataaaataagttagtttgatgagcttttacttgttaacaatattgaatattacttactatttattaacccatggttctacaggtctatatggtgtgttttgatttgttgattttgacatagttattgttaacttataatataataaatgtgatctttaaatttaattaaaaaaaaaagatggtatgcttatcaagttgtttggcgcctctttttcaaatttttaaaaaataacacagttcgaatatactaagaaaaataaataaagactgatcttgttgattgcaatgaatgactgtttttattgtcaatcaatcaatctcaatcaattagatatatacatatattaattatcattataatgtttaattatttttaaatattaatacaaagtaaaatcaataatggatcaaatattaaaagttttggatttatcgattggtagtagtggaaagggtggtaagcaacagcagcaagcaatgttggcagaggttgagaagcatttcactacactgattaagctactgaaggattcggtagacaaggatgaaccgattccatttctaaagaatgcttccaatgtcagttcattcctcaaggtattcaactactacatctcgtcatcgaacaaccagcaaggcaatgataagctggccatcagttcactacgttcactcggctacttcctattctcacagtctatagtttcgttattgttagacaatcaaattcgagagatttcaacattactggaaaacaccatacaaattacaaagaaaaaggtaatttatttcaactctataatcttaaatttagttagtaataggttgttaatttattttttaaaaaaaatgatagaatatatgtaattatgcaatttggtgtttatcatcacaatcattacctaaaggaccaatcacctcaaagctggcacagacttattgtacgatcttggaaactacaccattcggatcgaaaaccattgaacatgagattattgtatcatttacaaagatcaaccaacagaatccagatttatttgtaccgtcctatcatatctggatacctatactcttgaataaattgttgaatacagatgtcagcataataaaagatagcatagagattgcgtaggtaaatcataaagttgatgtttatgttatttcaaacttactaatattatttgaattttactcttttctagatgctctgaaaaaatagaggacattttaaagtcattgatttcatcaaactccactatcaatcagaatgagcaattaagaaaagcattggtggatggacatgctgaagcaatcgaaaagatgaacaatctgtacgaatcatcaaatcatttgtttgccattagagtatggggatattatgtttatttcttgggcgaaggtttatttacaaatggatcggtaattaactctcttttgaaattaccagaagtaagtaattatataattaaaaaaaaaaagcattatcaattttattaatttttcataatttagaaaacatttgtacataccaatgaagaaattagattccagacattccaatcgtggagatatttaattgatagtgtccagaatgagtcattattgatgccaaagagattgctattaattacaagaccaatcactgctggatttaagcagactgaagttgatcagtcctgttttctgacatggatacatcttctctctgtgattggatcgactaatattgtcaatttattcccatatatattctcaccaattgtaccattggcactagaggacgccaatttctccaattattgctataccattatttgtaagttaaaataataatatcaaattaaaatatttatttatttttttatttaaaatatatattacaggcgcattgttttcaaaggagaattcaagttttaataataaattaaaagttgattttcaaataagtttgaaatcgatgccagagttgagcggacaatggttattggcaaacataaaggtaatcattcaggttctacagtatttccgtgtcgatcacagtggaaagagtttgagttcagaaacacaaaagctgaatgattcaatcaccattgaggatgcagatctactccagaccaatcaactgcgtgagagaatcgagatttggagttcaatgctcgagagagttgcattggtcgataccaaagattgtaattcagtagccctcacccaattggttttgaaatcaatggaagcgatttcaaacagtgctattgaatttaccttggctcaccacaatgaaaccaccaacgaattcattattcatttcatcaagagtgtacataatatagtcattcgaatacttcctaaatcaatcttatattctcaggaatataaaactcaaaagttaccggatagagatgatagtataatgattccatatggtatgttttttttattctatttttttttcaattttgtttacttattaaattatcaatttataactgtagatttcattttagtaaatttaatagaagttggattaattgacaaattaaatattggtttatcattgcttcctattattaatgaaataatacaattttcatgttcaaattctcctgatattgtaagtaatattattttatgaatccaacatatattaattatattaattattatatagtcgtctaaaataaattcaattttagatatattttatccagttttaataaagaaagagttggacattaaagatttaaagtttattattcaattttgggttcaaaattgtatgtacaattttatttaaatttagatttttagataattacaattctaactaatatatatgatagcatctattgtacagaattttatagatagatcacaacagatctcatcgaattccattggaagttctaaatccatcaatattaaatcgattttattatggccattgaaggttgtgtcactctgcgataattgggatactagtaaacaaaaagaagacgatggtgatagtgagttgtctataatttgtgatagtttggttcaaagttggaaatcactattacaatcattccaccgatacagctccatacgaacttcatcgaatcctctggtcgagcaaatcattgacggcattgaatcatcaaccaattggaaacacccatcgaaccttgagatttacgttggcgtagtttcaactcttctctcaattttagatcctacttcatcaacatcatcctcttcctcaaagaaaaagaatgaccaaatggaggcattgtaagttttattacattcacctaattaattagtaagccatcacaaataattaatatttcaaatctctttaaagtttcacacatatattttcatttataaacaagatattcatgttggtcgatggcaataaatatttaccagtattactgagtccgttggtttcctttgtaaagaaaattcagagttcatcactcttaatattatttatcaatgaaatgtcgtccacctaccacattatattaaagtgtattcaatccgaattgaacacctcttcgtcacaacaacaaaaagagcatctggccagtttcaaaaagatatgcaaccaatcatggcactcactactcgacgtttccagtaaagctgtaggtacaaaccacgagcaaggagaccagctactccttgcaatcggtgaacttctcaacacagcattcttgtccaagcaaacacttgtcacagagaaaacattggatttctggaattccacttttggcgatcgtaaacatctcaattactcctccacactttggactacactgagtgccgtcaagcgaaaagttgacattaaacttccaccaagagagaatccgcccgatctagacgatagtttcgacgacaattcaaaccgtatcataccagcagccacactcggatcctttcaaggttcgttacaattgttaccggaaattaagatggcaccaacagattttcaatttgatagagatcatattatgaaaaagaataacaaagataataataataataataaccaaagtaataataagaataataacaaagttaatggaaaagaaaaagaaaaagaaaaagaacaacctcttaaaaggaagaaactttcaccggatcaaaaacaacatgaggagatagatcaaaatgaaaccaaagagattttgtttgtgttggattcaccagttcaagcttcgaaaaagagttcacctcagaatagcagcgccaatagtacaccaaatttacaaatagcattgtgtgatgatagcacaatggagatggacaacatcaatcatcaacactccaacgactatcaaaaggaagagtacatcaagactcaattgactatgatgtcgactctgaactttgaaaactttagcaaccaatcactcttggaatatcaaggacttgcattgttaattgcaaatgaaatcaatggtaccttacagaaaagactcgcaaaataataataaataaagttgaaaatgaaaagagtgttttaatattaaaactatttatataaaatgacatttctttatttgctgttttttttttccagaagaattaaacatattgatattcaaataagactgatccacaatcatatctttcaagtggatcattggataagaatgtataccatctgttgtcttcaattgaatatttgtggttcttatatttgctgccacctaaaaagtagatggcatcggcaccatctaccgctgatttataatatacagcggaaaggaagtgtcgtgttttgaaaggcgacaatgctagattatcgatttgtttggtttctacattgaatcggatgaatcggtgttcatc

SEQ ID NO: 112 - DNA, 20627 bp, Phytophthora sp.
  source 1..20627: mol_type = other DNA
gatcgctgcttttgtgtgtgcactgggtcatttagagtggctcagaatgccctttgggcttaaaaatgcacctatgatctaccaacgaatgctcgacaacgctctgtggggctttgttcagccgaagggtgcctggaagcattatgcgcgtctggtggcagaagctgaagcacgcgaccgtgaactcaccgacgcctcgaccgaacagtcacatgaagagtcgtccgacccggaccagtcgcctacgaagtttgaagcgggacttggactcggatcgaacgaaagctcggtctcggaattaattaacagtcctattgcggacatgttcgcgaatggagagcccgacgagtcttcgttggtgccggttttcgaacggcgttcgtgcgttgacgacatttgctttagcggcgagtctttcgatatatgtctagcgacgctcgatcgactactcgcccggttcgaggaatgtcggatcagcgtgagtttcaccaagagcatttttgcgcagcccaaggtggacttcccgtctcacgaagtgtcccggagtggtattagagtggacccaaagaagttgaaggctatcaccgagctgtccttcccaaggtccaagaagggagtgcaagatttccttggcgctctgaactactacagccgcttcatacaggactttgctgtctacggtgacgcgctataccagctgcgagacgaagacttcgcaccagggggtgacctctctgcagccaagcgaagctttgcggcattgcaacgaaaggtcggtgaggcacctgtcctccgacacttcgaccgtgaccgagaggtccatgtgacgctgtttgcaaatgaatgggcagtgagcaccacgctcatgcaggagcacgatggcctgatgcaccctgtgcgtttctgcggccgagtgctcaaggacgccgagatgaactaccagccggcggaaaaggaggtactggctttgctacagctgttgaaggtgtgttacacccagctggccggtcggaccatacatgtctacacgcggttttcgacgctcgactgggtccacaagtcgaagacactctccggacgtgcaacgcaattttccgtcttactgtctccgtggagtctagtggtgcaacgagtcaaggaaaaggattgcgccttcgcgcagctcttacagtcgacgatcacaagcttcgttgacctcgaagcctcgttggcaccagtgacccctcgagccaaaagctcgccgagtgttcggatggatctgcatttgctttatgcacggttgccacgtacatacagtggctacgtactttcgtttgatggctcggcgaagatcgagaagcatggtggctgtggcaattgcgcctggatactatggcgacttcctgaatggagtgtagtgatcgctgcgagtgcgtatctcgggaccacgactgtaaacctcgctgagtacaccggaatgaacaacggggtctctgccgccctagaacatggggccgaggacttagtcaatgtcggggactcgagactcgcaatccagcaatccctaggggtgatcgcttgccgtaaggagtcgctgatggcacaactgaacaagcacaaggaactgaccgcgagacttcggtccgtgaagtacctacatgctatccgagagttcaatgcagctgcagactctttggcgagcgaaaccttggagaagaaggtgtcgatgacggtgaacagcgaagaccgaaaacgagagttgatggaattaaatcggatccgagaagtgctctatgaaccgtcagccgaagcctctgaagcttctggagaagtcgtaacgcgtcacgtgaactcgatacgtgtgatggatacgcgtgacagtgacagtagtaagatttttttcgattttgtatgggatactgggcatgtagccgcggtaacgaggcaacaagcccgcgcgcgcgcgaaacaagtgcgctttgccgatgaaacttcgggtgatgaaccagaagagggagccgaaggagacgaaggtaataatgtcagcaacgaagagtctaacgaacttccagaccaaccgagacctgacgcaacggtggtccatgaaccgagtgctgacgacatcgacccactagctgtgcaggaagaacggcgcaggcgcattggcacagccaggatgaggagctccggtggtcaaacctcaagacggtgctaaagggagaagaagcgaagcttgcctacaaagctgcacgcgaagcctggaagatggctgacaagttcctgttaagcgaagatggcttgctgtatttccttggtgcgaaccgtcggtggggtcgcgaccgggccgaggagacgacactacgcctagtggtgccaacaacgatggttcaggagatccgacagaactgtcatgactcgttggagggcggccaccaaggtatcgtccgaacctaccaccgagtcaaggctgactactattggattggcttgttcgccgatgtggagaaacacgtacgctcgtgtccagactgtagctcaagcaagagtcgcccgcagctacgtgggtactccccaggcaacattctggccgagcgtccgctacaaattgtctcgatggattttgtgatacccctaccgaagactcggcggggcaataccgcactgctactgtttcagtgtgcgttcactggattcgtcatgggcaaggcgatggcggacacatctgcactctgtgtagcacaagcattcgaagagtgcgtgtaccgaaggttcggagcgccgtctctgatcaggcatgaccgagacccgcgcttcatgagcgaggtcttccaaaccttcgccgagatgatgcagtcgagatctagggctacgttgagctatcggccgcaggctaacggccagcaggaacgctcggtcaagaccgtaatgcaatcggtgcgagtgtacgcggaggacccgctgcaacaagactgggatgaaattgtggagaagttgatctttgcgattaacaactcacagaacgccacgaggaaggacacgcccttttacttggtacacggatgggacgcaaggtccaccctccgagcaatgtcctcatcactgaagcgaggtgtcgggggacagtccgatgcattggcgtggcgccgaggggtcaacaggcaacaggcggttgcgttggaaatggctaaagagtaccaagcagtcgagaaagctcggcgtgcccaaaagcataacgaggctttgagccgagcggaacgtgctgcgcttccaccttccgcgactggtgaaacctcggaaggtgttccgacaggtgcagagggtgagggtgactcaccagaccccgcaccgaagtctctcttccagcctggtgatcgtgcgtggctttacatggaacgcgtcaagccagggttgaccaagaagttggcccatcgatggcatggtccctcccgcatcaaacagaaggttgacgagtatgcgtacgaattggatttgcctgacaagagtggttatcggttctacccggtagtgcatgtgtctcggttgaggcggtgaacgagtttggcgatcgaccgaagactcgactcgccgctgaggttaccgaggagacgcgactagacttcgacgaggagttactcccggaggatagttgggaacccgaccacctggcgggcgagtatgaggttgaagccatcctggatgaccgaattcccctctcgacgagcactgagcgagccgtccaagagttcaaggtgaagtgggtcggctatgacgaaccctcgtgggagcccgcgtcgaatctgtcttgtggcggactgctgtatgactatctacgcgagaaatgacgtgaccgaaggttgcaaatggtccaagtcgctgacgaggactagttgcacccctctcacaatgatgaactgccggcagggctacgcagcctaccccagcagacgaaacatgttactgcgggaagaagattgtatatttgtatgttgaagtggacaagactttacgaagtggagatcacgactggagaaactatggagaacagctgaagaaggacaaacgactactgaattgcatgggcgagctagttatactacgaacgaactgtctgaataccttgatctagctcgacacaaacatgaaggaacgatggagaactggaacgaagtttaggcgcccgaagacgaggcaaccttggccaaaacgcagagacgcgcagccggagaagcgtcggctggcgtcgcagcttgatcagcagcactgggaggcgaacgtggcgcgtcagccagagtcccgctggctggggcctcctcagaagggccctccgtaaccgcgacgcgatcttgaaccgagtcctgcgttgctgttgctgcatcttgagctcctagcgcttgtgtagcttcgaccgaggtctcttgagcatccacggcgcggcgagattcgtcctgaacctcttccgaagactcttcagcaaccggagactcgatctcttcgatcagctcctcgacctcctcctcttccgagatttcgtcttcacccggctgcccggcctcctgcagaccgaaaggaggcccgtgaaagttcgtgaactcacgcacccacggagccgtaacacggcgagggtccagcactgggttgaccgtaatagctgtcgcgacttcacgaacagtcatgccacgcgggacgaagagtggaaccctggggttacacggagcgaaggttgtgttgtacgggtgctcggacggcacatcggtgacgcaccaagtcgaccatcagctgagcgaagtttgcgaagcgtcgttccgaatgttcgcggagctctttgacctcagcctgcacctcgtggtggacgatgtcttcgacagcgtaccactgcgcagaagaacgcggaggaagtccctaagcctcgtgcgcagttgcaggcagcgggtcacccgtgcggcagaagtgtgcagtatttgacgaaggctcgtgcagaggactggagtcgggcgaggacctgaggaccagctgagtacacgcagggtccgacgaagcccagctagcggacggcaaagcgggaggtggcaacgtcggagccactgcactcgaagccgaggtctctccggtgcttgcagccaaagcatggtgcgcgacgaccgaaggtgcggcctggagaccgcccgccaccccgcgtgctcctgcagaggcgggagttggtgacggagcaggtccggcgctgccaccagcaccagacgatggcgctgaagctacagaaactgcagtcgaagcctggagccgtcggggcgccccgcttgctgacgcagaggcgggagttggcaccgccgaggcctccgaggccggctccgacgagtcgatgacctgccccgtggggccacgcaattgagtgtcctgcagcaagatgtagcaagttgaagacggttagacgcgatgaagagatcaaacacagcactcaagcacctcgcacgaagactcacctggacgactggaccgaggtccgggaaggtgaagggcggcgcgctgccaggaccaccggaggactgcatggcgtcggagcgcagaggggcacgaagccaacacggcactcaccacttgggacggctcgggccgagttgggggccgctgtgatatcgagaaatgacctcggccgggcgagttccggccgaggtctaactgccttgagcttgcgagtgatggctgaccgagggctctgattggtcggccacattccccgcgcgttagtgcccagaagattgatagagactacggagtgacaggagggtctcggcgggtcaaaataaaccgcctgccgaggcctccgaagtttcatagtgggtacactttatgcccagtaggagttcggatttaggacgaagtttcgtccggttgtaggatcagctcgaaagctcggtccacgttgatatttgtatagaccttagggattagctataggagaggcctgacagcctctaaaccattaaacagagcagaattcccccccaagctacacaagggtcaagtccgtctacggtaagtcgctaagcttagcatagggtctggatacactcggctgcacggggtatgtctgccggtgagcataaggtgcaatgaccgagtgttcatcctggtaaggccaagagtgagtaggtggccgagtgttgggaggtattagagacctctgtgtgcagttgtacgtttgactgggtgtgaggcaaggaccccccccccccagtgtatttgacttctagccgaggcttcgccccggcgcccctgtaagaggcttcgattggcctggtacccatcctttctgagggaccacagaggtttagtgcgaaagcacgtattacacattgcatcctagccgtggctcgtggctaagggtgctcttatattataacgaagggtaaacctacctgacccgcagcacacagggaggcacattccagcccgtataagggatcggacctggtcttcaggtttattatcccgacaatctatcgccgactcttcggagacggcgtgtgttgttggtagggctcgtcctagagacttcggttgatagggcgaggagtcgtaaactcgtgttttcctagactacataggcgaccagcgccgcctcaatctctggggtgcacttgatgttcgccgcccgagagccgccgcgctgcttcacctccgggctcccgctcatgacgatgcggcgagcagtagtccgggggatgccattgtgcttgacgacaagttcccagtccaccccctgctgatgggcgtcttggacccgcgcgcgagctgcgaggctgtgcttgggctccttaggcatgagccagtcgaggtgagttgaaaagtgacagcactctgagtgctggcgctcgagttctgctctccagtcgttctcgattgctggtgcgtgcacgcggggtctccgcatccagtcgtagtccgtttgaactttagaaattccgctttgacctaaaacttaaagtttaaaatgacatttgaatttccatcgttacaggtatatttgccaaattgaattgcactaagaccaccttgaagtggcaaaggtgtagtacactcacttagttgatgaaacgggtcgatctacttaacagaagaatcgtgagaatgttctggtcgatggcaacatacagttacacatctgtgtgttccagtataatggtacactgatatctttggtagcagcgtggcccacacagtgtgggtacggaagacaagaggcctttggatagcccagaggcgatgttaatagagggttgtcacgctagcggacgggttagggcatctaggagagggtgatagaaggagcgccatgtccatgactggtgttctgggaatgcaccctcaagttcctcattcttcaactccccctgtcaagcaacaatggggaagcgcaagcgcacggacgaagatgtggtcttcatggagtctcgcgtccaggcccgggcctgtctccactaggacataatggagaaaatccagcgatgctgtcaagtcttcaaacagtggtaactggaagcttcacacgtcgccaaccttacgttcttcggtgcctcgagggggggggggggtcccgctgcccaagatcgacggcactttcctcatgtgcaggcatgtccgcagggggcattttgcaaatcatgccccttttggtaatacggggtacacctgggacttttcaaaggggtacccgatcagtattgtatgtctgtgtatacaaaactagaaaggggcactacgaacctgtataagaatgtataggtggtgacctacgctagagtgctcggcttggagggcgacaagcactagacaactgcctacctggacatctcgtctggcatcggctcaaagtattgtcgagattgcgactcaccttccatcgcgtagttgctattcctaccacgatgtaggcccgtcgtacgcttcagcgtgctgtggtcactctccactgcgtgggtctctagcgtcagtatcgagatcttcaacgtggacacgaccgacgccggcatccacggcgccatgccgatctgctgccagtgctagggctactcgaacggctacaactccacctggcgcaacgtcggtcgcggccaccagtactgctgcgagggcgacaatgttatgttcgaccagcgcatgagcacgttgaacgcgtggggcgctgacgcgcgcaccaagatcgctcagcagtccaagcagtccacggccacgtggaagatcgtcaacgcgcactacagcacgcaccaccacttcgtcaagtacaacgtgaagaagtggttcggcctgctgcgcggctcaggcgtgcacatgtggcccaacggccacacacggcgactgtcgctagacatccacctcctcgagaacggcgctggtggcggtttccagaaggattcagccagcggctacccgtcgtacgcggcatgcgtacacaactttgtaacctgctctaggtttccgtacacccaacgctatgacttcagtaacctatgtctacattcgccacgaggcagcagagctatcaccatcacttcactgataaaggttattcatcgtcagaagttagtgggctggaaggtaagcggtaagaacttgttaagcacatcttacggcaacggccctgtgtggtggtctcatttctctgctctccgacggtcgtactgttaaatagcgctatagaattgaatgagcactacttaaggcggttggtcgctttgatcttgtccacattcatagagccgttttccgtgttcctctcgtgtttatactgcatcgttcgcacaaacccacccagagcgagtatcgcgattgcgaaccttgcttcgcgctgtgagcgttgtccaagtagcttaacagacaactatagtaggaaggtttgtatggcggtctatcatgcccatttcagggagtaatctgaagtaggcgaagtaatgacaacgtgccagttctggtgacctatttgctagtacagtcgcatatatgcatgtgctggcgtcctaacttacgctactaggtcgaaaatgtgacgaaacgtacaacatattcccttcatcaccaggatttccttagttaagagggggcactcttggcaactttaaaaggggtatttcgttctttttctgtccacactaccccctccggacatgcctgctcatgtggtgcatcaggggagtgtgcgcggaaggtcttcaagagcgcgatcgcaagtctcaaaagccggaagccgaacgacaacgcgctctgaatcgccccgtcgacccagcggctcgcgagacagtcacgatctaccgcgagatgcgatccgccgttgcagactacatcccccactccagttaccttacagtggacaggggggggtcagtgccatgaccgcggacatggtcggcaacgcggtggtcatggtgcaggagcacttcatgaagcgtctgacggcgtatattcgcctcgagttgtttcgtcggaccggtgcggcaccccgatccgaggtggagcgtcttcgaactgcgtgctttggtcctgatgatggcgactatgcggaagacgaacatgagcttcgagagtggctgggtttccgcccctacaaggacgagctcaagcgaagcatgtctgtgactctgacctgaacttcatgagatccttggccatatcgaggccctacgccgtgagatggcagagttacccgggtcttcaggtggagtcgatctcaatgtgtcaccgcaagacgaagttgctctgggcgacgagcccgaatcggatgaggacttcatccaggagctgcgttcccgaaagggactccgggcattcacgcttttgccagtctcgacctcgtttgtgccgatggacgtggccttcgacggcttcacgttgcaggggttctgcgctcggctttacaacagaacttggtccaaccctgtcgggatccctgtcggagcgcacggggtacttgcaagaccgcaagtcgtcacgcagctggtcgacttttatcttcgcagagcatttgctgtagtttgagaccgagaactgcaagttcgcatatcgcgtcgcgccgaacgggtactcggtttcgatactcttgacaagaccgaagaacgcgattgaggtcgagctcgagcgactcaaagctacacgaacccaagaaatcaatgatcaggcggcgaagcgagcaaggctgcgcaaggctcaaacgcgcaagaaccctcgtggccgtcaatgtacctcgcgctcagaccgccagcaaccgcttcccaacgactggaacattctgccagcggattacgaggccgacaggttggtcgcgattgaccctggaatgcgggccatggctacggcggtgtgtgaagacatcgcaccaatggacgagaccgccatggagcagaggcgtcagcgcaacaggcgtcgcaatcgtcggcgggctgcacgtcgcaaggcactgctacggatcgcccggcggaggaaacggttgtcgaggagaacccgtgctcgaatcaagcgcgcaaagagacaagctcggcgtcctccaacctccccacgcgtgcgtcatgttggtgacgagaccgtcatctccattaagacccgcgagtaccgacatctcgctggcttcaacaaagccatgcactggtttgaagggctgaagtagcgagagcctcggtacgctcaagcaatcaacccggtgccgttctacaaaacggcatcctatgacatttacctggagcgcctacaggtattgctgcatcgcatggactttctacaggagttttcgcggactcacggatttctgaaatggaggttcttccagaagagaacgaaggtgaaggccctggacaccctcgcgtctcgcatcgtacccgttgccagtccgagagggccggtcggctacggcaactggagccggtcgcagggcgtctccagccgcgcaccgggaccagtgaaggcgttaaggaagcactcgctcgcctcgccagtgtcgtgctcgtggacgagttccgcacgagcaagctgtgctctcgatgctatcaacccttgacggaaccctaccttccaacacggaagaacggcagcttcgcagctactatcaagaggaccaagaacgtcttgtgctacttccgcagtcaatgcgagacgttcatctgggaccgtgacgtcaacgctgcgcacaacatcatgacactacccaaggatcgcttcaacggacatcctagacgatcagagtttgcacgcggagtctagatattgcgggatcgtggacgataagggctcgtcgcggtaccaatgtaggtagaatccgatagttttcagaagagcgtcgtacgcttgaggtccgacaaaggaccctctctaatgtaaccttattccccatgcgtcaacgggactcccaacaggtttgccgcatgatatcaaaactgctttgtgaggacacttgtcacggtccagccgtggactgtgggtcatgcgcgagtggcaagagaggaatggagtggaaatgaatgcgctttgctcggctttggcagtcacgcgttcgtgccgagcaatcagattcaacctctttcgtatgactcgccgaaagtgtgtcaatgggtggcttacgcgttttactcgacccgagctcgatcgcgctcctccatgaagcaagtcagaatctgtaacgctcgtctgaatttcaaaatactaatgccgtgcttaccacggggaagctctggattttcttcaacttttgttatttttgtatgtgttgtacacttgatcagtatttttttaatctagctattgcgcaaaaaaggaaaattaagggaaattaagtgcgcattcgagtgttgcaagcaacttggcacctgtggcgcaccaggtactcgcgccgacttctgctttctacaacattcttgaaggatggaaaacacgttgggtgagtagttatcgataaatgttctactaactacaaaatacctacagtttacatactaaatccttgacatccaaatccgatgtgtaagaggaggtagacgctccgtaaacaaaatatttttttaatatacatttagcttcggacgacgttcaatatctataaatccattaggcctgtagtaatttacagatcatgttgtgcaaggcgggttttaaatgttgaagcatcgtactttcgatcgttcattctcgctacaaccttctataacgagtatttcaatgtactataggagagaaactccactagattgggttcgagtatcagttgggttcttaatacaccacgaagatcgaggtccgagttaacggaaaacgtaaatttgtatatcgcttattattgaaatgaccactttaattattagaaagacatacaaataggaggagatatagctccgtgacatacaggtctgaatattttgtagtaagctagttacgtactacaaaaccactttgatgacgtcctggcatgtgcaagtcttcgaaccatggaagcacccaaacgttgcgcagagccggttcacaacgcctttcatgccgttagtgttctccctagcaagcagaacttggaccaaactactttttatctgtcggtacttacggtaattttgcgtaacgtttctaaaaaggcaaacggtattgtgatttgctgttattttgcagaccattttagacgcaaaatatggcaaatcctgctcctaaatatgtgggaaagaagatacacgacctgctaaaattatgcataaatccacctcctcatatatatatcgacttgggagggcctgtcagcagccatgcattggcccagtacaccaccgtccatgatccccagcacatccaccctcttatgcataattgccgtgtgtgtaggtgtttgtgcataaaaaccgacagaattgcagctgcacacccacaattgcactttccaaagtgcaattgtggcgcttttagcgtaattctaggcctccacccatttatgcacctcgatttatcgtaaatctagcaggtggtcgctataaatacagcaaatctcgcctcatattgccaaactctgcaaagcacaataccaaagacaagtgtaattttgaagataaaacgaccggatcctgcttgccgtatttgacaaaatatacatggtgcaaaatgtaaacaaaaatagaaggagtgttttgaagccttgatcatgtgattttcaatgttaagatgtcttttagccagtccgaaatgttaacatgctaaacttaacatcaagtttgctgtttctataaagttatagagtaggcacggtttggttgaggtatacatattggcttaggtacaatagctttgcatattgagctaattatactgagataggaagcaacgttagtgctgctatcgcagaccaaataggattatatccgtggtacatcaagtcaaacgatgacccctcttgacatctaactggtatatttcttgaaaccggtacggctctggtgccgccctgggccctccagggcagattgaaccggtgtaataccgacgacactggtatgaatcagtgcatatattgagcagggtacggatggacgaagagaacgcttggactgtacaatagcactagaggtactcaataagtatttgcattttctacaagctgcaaaacagatctcaaccaaggttcgcatttttaattttgtaaagcattgccggtagacagtttgaactggcaaatatccgggcagatgctgcggctgcgaagcaggcgcaggagatgaccgtagctaataaaaaataatgaaaaataaaaagaagggtttatactaaaattctcctatcccagccttcgcggagccctagtatcagattcgaaaggagatattcaattcgagaagggtacgctatttaccgctatccgttagtttatcgtacttaggtttgggcatcttgcgctagtttgggttttacgtgcaatacgttggagtaagtttaagtcggatttactattaatatccccgttggttgaatacgcagagttcgaatttcgaacttcgaaagccaaacacagcgaagcaatccttctaatgttagatagtgcaaccctctagatgtccaagtcacaccgaaatcacatttggttgcattcgtcgcatccacttgtcagacttttgcccctgacaagtctcggcttgatgggtgatgaaatctaatttctaatcagtttcgaaatatcgtgtatggctccagaagctacgctctacaatgtaataaatgaatgtggttacgtgcgctgttatgatcccaaaataataatcttgcagcatttgaggtgttgctagtttggattgtaaagtaaccaatgatgaccccaggctatgcttcggctagtcatgtcacgctacccactcccatcatgtgcagatactagctagctaacgactaactaggctctgccaccaaaacgccgcgcaaatgttgaagtcgcatacgcctggacagtaccatgtttctcgttaatcgttacatacttcacaatttttgtgcattaaatattaaacgttctccagaatcaagtttcctcaaaataaaggctccgatagattattatgccgttcatcgtctatagttcagtactgcgttagaagttgaatagtacttgtacaggcgcatgcttaagctgggattgtattctcactattgaaggcctcggtatgaccgtacagataaaaccgaagttctcgtgaactcctacgtgtagcaccccatctcttaaatttgtttggtggaggctgtgtgctgtttcgcgcttgcttgttgctttgtagcttgagagtaaatgcaaaactgagattgactagttatgcctcagaatattcgaaccaatcccttcctatgtagtgtttctcctgctactccttgtcgcgcatcttcatcgcgctgtgcgtctccgcgctgcggcaagggtacccgatctgctcccatgcgtctccgcggcgcggcaaccaaagcacgatcggatttttgctgtttccacgctgcggcaaccgcaacggatgtgctctgctgcttctgcactgcgaatcctgacgaatccccacacagcctcccaaggaccccgtcgctaggtgatcagcaagccggagacagaacagcttgcccggttacatgctataggttgttgtaggcaacggaaagacttcatcggcaatcctcgaggtgtagtgagccactttggtcggaacttgatcatcaatggcggtcaatggctcccacgaatcatcttcgtcttggaggccgacgcaagacaccagtagctgccacccaccgcgcgctttgcggtgctccttgatggactccacaccaagaagcattccttggttcccaacctgcgcaagcatcttctcgttcacatcgagactgctgtcgctgtagaatttcagacgcgaaccatgcacttcgaaggtctggttcgtcaccaagtgccagatgacaaacgaatggggccgagtttccatcacctcgaaggttccaactcatctagccagtagtttgttcaccgcaagtctctggtcgatgcgagaccaaagcgcgtagtcaccaaaggtgaagttgcacggcgagtccttggagcgctgcatgttggcgagacgtcgcttctcacgtatgtcgatcacctcacgatgcatcgcagcaaggtcggaacgacggcagtcgagccgtttgtgtggcaactgagtgtcctccgtgatcaagacatgcttcccatccctctccaccacaaccggttcaaacggagtggaccggcgaagacccgtaaacagctctgcaggtgatcgattgcccagcgaggccaccggagtgtggttcaggttgccctgctccagaggttgcagatacatccatgcatgagtgtccagcttgaactccatcaatggtacccacatcacctgcaacaggtggtggttgaccctctccactgtcccgttgatccatggcgagtacgccaccaccagctcctgtagtatttgtagctgtttgcagacttggtcatcattcttgaagtgacttccctcgtcagaaatcagcagcgaaggaacaccgaaccgcttccacaagtccacgagagccgttgctaccatggtgctggtcgcggaatcacacgccacaactcgcagtattgcgagagaccgtccttcagcactaagatgtacttgctggcgcctgcattctgccccatgtagagaaaatcccagtgcagtagttcttttcactccgttgcgttgtaggtggggccccacggacgtgtgatgatgttagcacccttcatgtgcttgcagagcagatagcgactgaggaaccgccggcacaatgataccaaaccgctgatccagaacaccgactggaccgtcgaaaccattggccccaggccacgatggccctgcacactacagtgtctcaccatgagaatatgctggagtagctcaacagcgctcgcaggaactcagatgcggtcaaccaccaacagtaaaccgctttcatcacactcagtaccctgcgtctgaccaccccgagttgtttttgtgcagctcgaactgcatcgagcgaagggacttcaaagtcagctggcatcatgtgaggttgtgatgaagcggctccaggttggtattggtcggcttcagtaggcgcatcaacatccgcctccgtagcttgtgatacaatctagtcgcagcttcggcgagttcgtgagcccgacttctcgtgatgaacttgcactgcaccctaacacccacctccttaacgggaagatcacacctagaaaggagatcggcccacagattatccacaccatcaatgtgctcaacctggaaggccaggccagtgagcgacagcgccgagcgctgtagcttcccgcgtacatggcgtttcacctccttctccggtgcaaagactaaggctatattcttgtggtcgcaataaaggcggaagcctccacggcgagccaacaggtagcccccgcgtagatgattggataagcttccatttcaataatgctccaccgctgctccgtgtcactgaacactccactcttgcaaagcagcaactcatgacgctgttccacaaccggtagggcatcatcccataccctgacttgagatgttactagtccccagcctcgttcagaagcgtcactgaaaacgaagatattcgcagtgtcctccgggaagtgcagcagctgcttggttgcgagaagcggccgagccgtatcaaacgccgacctctcattgactgtccacgtcaacataaattctgcggccaggcgcttcgtgcgatccacttgcttcagcgcggcctctagcatttcatggagtggctgcctggtcctgctgtagaccataattgagtcacgtagccagccggcagcgcagaggaaccacggtaggtcggcggcagtcactggtaatgggaggttccgtagggcgctgacacgagcagggtcatgctcaataacctcgccgctaaacaatcgtccacaccacttcgtcgtcttcttgaagagacagctcttgcgcaggctaagcgtgagccgagcctcctggacgcactaaaatttcacgcagcgcaccaaggaactccgtgggcgagcgagaatagaccaacaggtcgtcgatccaggcgagaagcttcacgtacatgttcctgaaggccacctccatctggttttggaaatggagcgccgaatcagtggcgccctgcggaacacgggtcggagtgtagacagcatcatccgtcacgaacctcatcagctcttgactgtcggggtgaagcggaagttgcgtgaaacctttggtcatgtccaagccctgaagttgcgggcggcagcagccagatccggcgccgtgccagcgatcggcacggtcacagtattgacaggcctgtagtcgatattcaacctgaattcattcggccaaccagccttcggcactgataccgcagcacaagcccaatggctttgctggtttcggcgtattcacaggtcgaagacatgtgcttggccccggcaaaaaacttgtaacattccaaaaccgggtaccaaaccgggtctctctttcttaattgtaatgtttaagctaatatctgccggaatcgggtacccgtcgataaatgctaagatttatgcacactatttaccaaaacctgcattcaagcacttacggacgtccagtacactaatggcttcgctgaaggcgtaccaatttgcgccataatcgaccaagcttagctgaagatgaccaacacgatttatgtaggtgcaggctgcattttttacatgtcaatttgctcaatacccaatcactcttagccgaagatgcccaacctcgtttctgtcgccaaaccaatcagctcaactcgacagtgacacgagcatcgttcgtttgaataagacttttttccctgcgttgaagcatccacttccaaggaattggcccattagcgtatttctcattccgcaatttaccccaagccctcaagttaaaagtttgtttgtttgtttgttttgttattgaattgaggatcattattgtcacttagctaacatcctcaagttaaaaggtcaagatcagcgcaccatgcgcctctccttcgttccgctactgttgctctctcgtctgatcgttagcacacaacctagttcaaaaatgagcacagtataccttacctgcaaagtgaatgaaatagctctctcgttgctggggccaacgcagccattggacgctgaccagggtgttatgtgacataacactctggtcagtgttcgaaggcataacatatgtcaccgatggcctcatcagaccaggcaacctcaattggcgactttcggttcctgagaacccaccacgataaagaagagcggggcttgctggttaccagcctcacaaaggtttggctgaaacatcatttccgtatcgatacacttcgacgtgcgcaactatttgttcaattacgcattctcgggaagatgatgcaactatttgttcaattacgcattctcgggaagatgctgcggggcgcagtagatgcccacgttagaatcaactagagagttgggctggtagtgcttttaaggattaaaaagaaaacaactttaggatttactcaattattatccattatcatcgtccatgaaactattcgtcgacctgtgtaccctcccggggcaacgctccgggttgcctataaactccatgtccagtagctgctgcgtgtgatcgcgaaggaaatcactctgcgcagcagcatagcaccgaggccgtgttcgatatggctgagcaccttcgcgaatcgtgatatgcagcgcctcgacgttggccgggggatcatcccccagatcaatgcggaaaacgtcttcgtactccagcactagatcgagcagtgcaggacgtactcgaccgggaacccttcatcaccagccgtaaccaccatggtcttaagtaggtcatgcacttcagccagagcattggctcaaggttcatcaacttcaaaagagccatggtcctccatgactcgacctccagccaagtgagatagctgtgcgctcacatcaatgccgagatagacagtcatgccgttgcccaaaatgaaatcttcctcgtcaccttcaaacatgaggcaggtcacttcagtgaggtggactggaccagcaattgtctgcagcatcaagtccaacttcaccgaatcgcggcgcccccagcaacagtgacatcgacgatagtacgaaaatgcatatttttgtcatttctgtgtactgaaatgctattttttgtcatcagaatatgttgtcctcacacttcaattatgtcatgtgttttctatgataattatacttctaatttgtatgatgcagctaaaaaatacagtagttaagtaaacattttgaaaattctgtcttttgtcaaacaactggacatttttattgtcacgaaaatgacctacttttgtcatcacaattcgatacgtttacggcgggtgtgctttttatcatctacggtaagttcgggtcgaatcgcgtcgctggagaaactctggatctaaagtccagagaactggagacaatgtcaaggatcctaacagcctccaacacggagcaggagcttctcgccgttgctaaagggctgggtagctcaagtttcacggcacgcgacgcgcgcgagtaccacttgcgtcgggacgctatcgtccgagttacagaagaaatcgaccgtcgcgtggtttcgtggaattcagcagatattttccagcacggggaagttggtggggtcgttttggtaaagtccgaggatgatgttcccactgagtgggtcgacatgctgatctctggaattggtttgtgccaagtccaacgcagtagtctcgtagtgtgcgaccacgcgaggatctcggaaatgaacccgatctggaactaaagctcaaaccctgggatatctcgagtagcgaatgtcttacgaggttattgcaactgattgggggccatctgcgcagcctttggcttgattttccttcgtggagtcttggcgtcgatgttgctgtaattttgtagtcgtgtccacacctacaggaactagcgatccgtaataatcaggtctctattaggacctctgctttggttcgggcatgtgaacagcacaacacgacactgagac

SEQ ID NO: 113 - DNA, 20627 bp, Phytophthora sp.; identical to SEQ ID NO: 112
  source 1..20627: mol_type = other DNA

SEQ ID NO: 114 - DNA, 21077 bp, unidentified
  misc_feature 1..21077: note = Fanzor polypeptide
  variation 1815: note = n is any nucleotide
  variation 10052: note = n is any nucleotide
  variation 16788..16938: note = n is any nucleotide
  source 1..21077: mol_type = other DNA
ctcaacgtcgtctcgaggatccatggcttctccaacctcgtcgtggatgatggggcggccgtcggtggcgctctctcagtaacttccacaatcaaggggtcctccaatttaagcatcgcgtcgcaggcggatgtcggcggtgccctcaatgtggcgtcaacaatcaaggggtactctaatctcttcattgcgtctcaagcggatgtgggaggttccatgacggtggcctcaacgatcaaggggtactctgacctcatcatcgcatctcaagcggatgtgggcggtgccctctcggttgcgtccacaatcaaagggtcatctaacttagtcattgcgtcccaagcggatgtgggcggttccatgacggtggcctcaaccatccaggggtcatctaacttaataatcgcgtcgcaagcggatgtgggcggttccctcaatgtggcctccacgatccaggggtcctctaatctcatcattgcgtcggaagctgaagtgggcggtgccctcaacgtgacctccacaatccaggggtcctctaacctcatcatcgcatttcaagcagatgtcggcgggtccctcacggtggcgtcaacgatccaggggtcgtctaaccttctcatcgcatctcaagcggatgtgggcgatgccctcaatgtggcctcaacgatcaaggggtactccaatttgatcgtcgcatctcaagcggatgtgggcggtgccctcacggtggcgtcaacgatccaggggtcgtctaaccttctcatcgcatctcaagcggatgtgggcggtgccctcacggtggcatcaacgatccaggggtcgtctaaccttctcatcgcgtctcaagcggatgtgggcggtgccctcacggtggcgtcaacgatcaaggggtcctctaaccttctcatcgcatctcaagcggatgtgggcggtgccctcacggtggcgtcaacgatccaggggtcgtctaaccttctcatcgcatctcaagcggatgtgggcggtgccctcacggtggcatcaaccatcaaggggtcctctaacctcatcgtcgcgtcacaagcggatgtgggcggtgccctcaatgtggcgtcgacgatccacggttcgtctaacttgcttgtcgacaacgacgttcacattggtgggtcactagctgtggatggaccctcacactttgcgactctgacggtcgatgccatacaagcgcttcaaatttcaacttcgaatttctcggcgtctgggaacgccaccttcgatgggaccgtcaagatcaaacacttggaagtggacggagtgaccttttcggggtcgaataatatcgcaggtagcgtgtccaacctcaatgtgaccggcaatctggcctgctcgaatgcttacatcaaggcactcgtgtgcgagaccattgccgggtcgaacggcttgctcgaggtcctgggcagagtcgacatggtgcaagggcaggtgcacatcaaggatctcctcgtggacaacatcatcttctcgacgacgtgcaacatcttcacgcatccgcatcgttgccgaatccccagcgattcgaacacgtgcgtggacgagatcgtcggggacctcatcgtggacggcgtcctttgcgccaggggcggcttctgcggggtcatcaagttcccgcagggggtcatcctgggcgacatgacgaccgccagcaacctcaacgtcactggcaacctcaacgtcagcggcaccagcacgctatccaatgtcattatcagggagctcgtgagcgagtccattgcgagctcgaacgcttacatcaaggcgctcgtgagtgaaacnccctcacggtggcatcaaccatcaaggggtcctctaacctcatcgtcgcgtcacaagcggatgtgggcggtgccctcaatgtggcgtcaacgatcacgggggcctccaatttgatcatcgcgtctcaagcgtacgtcggcggtgccctcaatgtggcgtcaacgatccaggggtcgtctaatctaatcatcgcatctcaagcggatgtgggcggtgccctctcggttgcgtccacaatcaaagggtcatctaacttagtcattgcgtcccaagcggatgtgggcggttccatgacggtggcctcaaccatccaggggtcatctaacttaataatcgcgtcgcaagcggatgtgggcggttccctcaatgtggcctccacgatccaggggtcctctaatctcatgattgcgtcggaagcggaagtgggcggtgccctcaacgtgacctccacaatccaggggtcctctaacctcatcatcgcatctcaagcagatgtcggcgggtccctcacggtggcgtcaacgatccaggggtcgtctaaccttctcatcgcatctcaagcggatgtgggcggtgccctcacggtggcgtcaacgatccaggggtactccaatttgatcgtcgcatctcaagcggatgtgggcggtgccttgacggtggcgtcaacgatcctgggatcctccaatttgatcatcgcgtcgcaggcggacgtgggcggtgccttgacggtggcgtcaacgatcaagggatcatctaacctcatcatcgcgtctcaggcagatgtgggcggtgccctcacggtggcgtcaacgatccaggggtcgtctaaccttctcatcgcgtctcaagcggatgtgggcggtgccctcacggtggcgtcaacgatccaggggtcgtctaaccttctcatcgcgtctcaagcggatgtgggcggtgccctcaaggtggcgtccacgatccacgggtcgtctaacttgcttgtcgacaacgacgttcacattggtgggtcactagctgtggatggaccctcacactttgcgactctgacggtcgatgccatacaagcgcttcaaatttcaacttcgaatttctcggcgtctgggaacgccaccttcgatgggaccgtcaagatcaaacacttggaagtggacggagtgaccttttcggggtcgaataatatcgcaggtagcgtgtccaacctcaatgtgaccggcaatctggcctgctcgaatgcttacatcaaggcactcgtgtgcgagaccattgccgggtcgaacggcttgctcgaggtcctgggcagagtcgacatggtgcaagggcaggtgcacatcaaggatctcctcgtggacaacatcatcttctcgacgacgtgcaacatcttcacgcatccgcatcgttgccgaatccccagcgattcgaacacgtgcgtggacgagatcgtcggggacctcatcgtggacggcgtcctttgcgccaggggcggcttctgcggggtcatcaagttcccgcagggggtcatcctgggcgacatgacgaccgccagcaacctcaacgtcactggcaacctcaacgtcagcggcaccagcacgctatccaatgtcattatcagggagctcgtgagcgagtccattgcgagctcgaacgcttacatcaaggcgctcgtgagtgaaaccattgccgggtcgaacggcttgctcgaggtcctgggcagggtcgacatggtgcaagggcaggtgcacatcaaggatctcctcgtggacaacatcatcttctcgacgacgtgcaacatcttcacgcatccgcatcgttgccgaatccccagcgattcgaacacgtgcgtggacgagatcgtcggggacctcatcgtggacggcgtcctttgcgccaggggcggcttctgcggggtcatcaagttcccgcagggggtcatcctgggcgacatgacgaccgccagcaacctcaacgtcactggcaacctcaacgtcagcggcacaatccacggctcctccaacctggagattgatgataaggcagcagtgggcggtgccctctcggtggcctccacgatccaggggtcatctaatctaatcatcgcgtctcaggcggatgtgggcggtgccttgaaggtagcctcaacgatccagggatcgtctaatttaatcattgcttcgcaagcggatatcggcggcgcattgaaggtagcctcaacaatccagggatcgtctaatttaatcatcgcgtctcaggcggatgtgggcggtgccttgaaggtagcctcaacaatccagggatcgtctaatttaatcatcgcttctcaagcggatatcggcggcgcattgaaggtagcctcaacaatccagggatcgtctaatttaatcatcgcgtctcaggcggatgtgggcggtgccttgaaggtagcctcaacgatccagggatcgtctaatttaatcatcgcgtcgcaagcggatgtgggcggtgccttgaaggtagcctcaacaatccagggatcgtctaatttaatcatcgcgtctcaggcggatgtgggcggtgccttgaaggtaacctcaacaatccagggatcgtctaatttaatcatcgcgtcgcaagcagatatcggcggcgccctcaaggtcacctcgaccatccatggcttctccaatctcatcgtggatcgtgaggcagcggtgggtggctctctctcggtggcctcaatgatccaggggtcatcaaatttaatcattgcatctcaagcggatatcggcggcgccctcaacgtcgcctcgaccatccatggcttctccaacctcatcgtggaggatcacgtggatataggcggggcactcaccgtggcgtgcaccgtccattgttcttccaacctcgtcgtggatggaaatgccgatgtcatctcaagtatccacgggttcgccgacctcatcatcgacgacgaagcggtcatcaagggttgtctcaacggtcgtgtcgagcatccacgggttcggcgttctcaccatcgatgatgacgcggtgatccagggttcactgaacgtcaggtcgactatctacggcttcgacgatctcatcatcgatagcgacgcggtcatcaagggtgctctcaacgtcaagtcgacattgcatggcttctgcaatctcgtcgtggatgaccaggtggatgtgggcgctgcactcaacgtcatgtcgaccatgcacggcttctccaacctcgtcgtcgaggaagccgtggaggtagggggggcgctctcggtggcatccatcatccacgggttttcaaacctcatcgtggaggggcacgctgatgttgggtgtaccctgaccgttgcgtcgagcatccacgggttcgccaacctcatcatcgaggaagacgcgctcatcaagggttctctcaacgtcgtgtcgagcatccacgggttcggcgacctcatcgtcgacgacgacgcgctcatcaagggtacgatccacggatcctccaacctcataatcgacgacgacgcggtcatcaagggttctctcaacgtcgcggggagtagcacactttcgaacgtgcatgccgcggcggggtgcatccgggcgcttgggtgcgcgacaatgggcatcgggggcacgtgcgcggacccggcctggatgctcgcgagcagcagcagcagcaatgataatgagctcacattccgctcgaaaaacggaacgattgtgaccttcacggacgacttcatcccaggcgtgctgaacttcacaggcaagcacaggtgcgtgaccaccgaggacgttacgagcctgcgactgggcatgatcgttgtggcagcggggacgtaccattccctcaacgggaaggcgggcattaccatcgacgaagccgttccggtcatggaggtatcgacccggcccatggatcgccgagtcttcggggtcgtcggcggtgtggaccgcggacagggcgtgttccacctgggaaacttgaacttcaagaaggatcttagcggccctccgcgcgtcatcgtgcaatcggacggcgaagggtgcatcctagtgtgcaatgagaatgggccgctctggaacggagacctcatcacgagcagctcgcagaggggcatcggtatgcgacaggcggacgactttgtgaggagttgcaccgtcgcgaagattacatgcgactgtttcttcgccgagggggaagaggatcggttggtcgggtgcgtttataaatagagtggagacggcgagtagccgttcaagacatctcctcctcttcgacgggcacgcaaaatgaaacgagcgccccgagcatgcccgtggtgccgcagaactcgtccatgtggcggctgcccatggagcgattgcaggtcgtgcagatgggtcgcaggttcgagatggcgtccgacccccctttgcaggctgcgagaatgtgtccgcactcgtagttctgctgcgtgatctcgcggcggcagcagtagcacgcgcccaccccagcccattcaccgaagaacctattccagaccgcgcatcgcgacgccctgggcaggggccgtcggcttgccttttcctccgcctgggggttgcttcgtgtctgttgcggaggttgaggtgggaccttgatgcagaaggagggaagccattccaagacccactcaaaggtcgcatcgtttgacaggaacaacggcatcaccgtcggggcttggcggaccttgtccagggcggcgagtgtggcgtgcgtcgccgggtgcagctcgtgcagccgggtgttggcgtggtcgacgaaggcggccagctcgagagcggtgatcgggaaggcgtcggggcatcgccgcgcgccggtcgccagagcagctgcgagagcgctcatggacacgttcggccggcgcgggttcgtcgcggtgctccaaaagggccggtaccgcttcttgaggatgctctggacgtccgtgatcgcgcacttgtggatggccgagatcgttccctggacgatccactcgggcaccggcaccgacttgttgactagcgtgaacacgtccttgagggtcagtgacgcggacactgtcacgatcagcacggacaccggctgctccgaaagctcatgcacgaggctccgcgccgcggcgaggcggtgctgcccatccacgatccagtagcgcccctgtgcgccggccgccaacagcgcaacgtccccgatgaagaggaaggccccgtgcttctcacggtgcgcccgctgaaactcgacgatcgtctgcacgcgctcgtcatcgacggaccgctgcagctcgggcacttggacattgaactcgacgagcttccgcagggagcagtaccatcgctcctgcgcggctgaaagtgtgacctttttcatgtactcgggtactcgggtactcgggtacacaagatactttatgtgtggggcagcttccgatctcaggcctgagcgcaagcccgccagcgcgggctccaccttttttggattcaggtgtgccccggggaaggcgcgcgcttcggaaatagtttagagatgggtaagaggattttcaccaccacggccagcatcacaacatttgcgagccagcaccacatcgttccccatgtttcgtaacgggtgaagtaatacaagctcagcaacaacgcgccgagagtcagcccaaagatcaagtattcttctgcaaggatcatcggtcccaaaaagaagatcatgtacgctgcgaacacgaaccaatttatggttttgaaggtcagccagttccagacgagatgcccgttttccccggcgtacgatctgaaacggtcaagaggcttcgacagcatcacgagcagtgtcccaactaaaattgcgccgtagatgcacaagagaactttcatcagatccttatccttctcgcggaggaggaagatggacgcaataggttgcgcaaggataagtagcatgccacagatggaagcgaccgtatttattgtttggttgtcgtagtacttccacacgaaatactcaacaagctgcacgctcacgaaggaaccgaagaggagcagctttgccacatcatagttgttcaaggcagccaaaaatataccaaagcttccgaacagaaacgtgttcaacgacaccgtttgatcccaacacatggtttacctttacatcttcagatgttttcggatgtgaacatgaaggactgccttttaaatgcccattggttttagcggtcgacctcatgtagcagatgtcaatgtcaatgtcaattttcccatcaatgtatatacactcaatgccacctccgaagtcatcggctggatctagagtaaaaaatagagtcaagaatagagtcatcgttacagtccgccaaatgaattgtgttacacctagatatggaaatcaattttcatgtatccgctggaccgtcggcagcttgctcgacacgtctattcattatttgagagtttgcgaaagtccgctgctattctcagggtaagccactctactgtggcaaggtggttgaaggctcccgtgcagaaaccctacatgtccgcagttcgccaagaccgtagcaaggcgttgctggtcaaggaaacaattcgagttgcgatccgaaacgacccgttgttgtcctgtcggcagctccgtgacatcgtgaagaccgtgttgcgggtggacatttcccgcgagctggctagagtcgtcctgctgaaacaggggttgacccgaaagaaagcgaggttctacggggctcccgcggatcttccagggaagaccactgcgtttttgaagtcccgagcagacctggtcgatgccgggtttcaattctggtccctggacgaaaccagctttggtcgacatggggcacctgtacatggcttctcgacacggggggtgccccttcggatcatgaaacgaagcgctcgtgtcaccacggtgtccgcaatggtcatcgcgaatgcatcgggcacggtgatccacgaggaacgaaagggttcctttgcaactgcatcgtttgtagagttccttggtcgcttgacgattcctgaacattccatcattctacttgacaacgtcgcgttccaccgttcaaaagcggcccgagaggtggcttcgcggcgcaactggacgcttctcttcgtccccccgtactccccgtggttcaacccgatagaagggattttctcgattgtgaagcggcgctggtacagtggatcgacgatcgaggaagccttcgcagcggtgacgcccgcacacaatgccgcgttttttcgcaactccatggcgcataaagggttcgagccgtaaccaaagtatcctcatacacgccatgctatggaagcgaccaaggaaacgaagaggaagcgtccggatagggcccttaaacttgaagaacgcagagtctccacggaaaccgtagtgaagtgctcgctgcgtagcgtcctcctagggtcaccagcccaggtcgacgcaatggtcaacgccatccgctcccgggtcgtcgccgcgtcccgacgggtcgtcctcgcctccatcgccctgaatctactcgtccgagaagtcttcgaccgccagcccgacgccaccctcgacatccgagacgagacaaccctgcggcagttcatgcttgggacagcgagcgcgaataaacccgatgcaagggtggccgatatcttcctgcgcaaccctgggctcctgcacgaggtctccgatcgacacctttccgatcgcaacatctactcagcagccgccaaaaagctggggaccaatctccgcaaccacctcgtcgtcaacctgaggcgggtggtcaacaaggcgctcgcggatgtcccaaacgatgcggagagggttctgatgctctacacgctttacggatggaagggagggccgcgcaagaaaatcaagccgcccaagaaggcgaagacctcctcctctgtcgcaccgacggcagagatcgccccggagccgccaccactgctgtcagcaccccagctcgacttcatccgggagtgccgacgcattcttgggttcaccgacgacaccgaggagctgaccgaacgctggatggacaagcctgcgaacctgcctcggatactggcattcttcgtccacgtgaaccgcctgctggagcaccgtggggagcttgaggacgacccgctaaaccggggccccacctgcttcgcgctcctcccgatctgcaagatcaaacgccacttcgtgacgctcgacacccactccatccacggggttgcgcgcgacgctgagatcgtgnaagggggggcgcttcaccggaaccatcgagacggatggagtggctgtctgcatccattacgtgcgccccaaggtgagctcggaaggtggcgttgccggcgagaagggcgcgatcgagacggaggagtccagggcggcgaagaaacccaagtcgaccgccgctcagggagaggaggcggaggagaaggtggcgaagaaacccaactcaagcccgccgcggcccacggcggagcagctcgcgcggtgcaggatcgtggtgatcgaccccggccgcaccaacatcatctacgcggtggaggtgacgtcgtcgggcgtgaaggtctaccggctgacacgtgcgcagtactaccaggagtcgggagtagcgcgggggaagcagcaagccacgagctggctccgaggggtgaaggatgagctggcgcagctctccacggtgagccccaagggagcggatctccccgcgttcctgctcttcgtggcgacgcacctggcgacgagcgaggcgaggtgggaggaggccatgaaaccgaggtgggcgcagatgcgcctgcgcttgtacgggggcaagaaacgcgtcctgtcgaggtttttcaacgagatcgctcgagggcaagggggcgcagattcccgtcctgtcgtcatcgcgtatggagccgccaagttcgctccgggcgggaagggcgagttgtcggtgccgacaagcggagtcttcaaggcatgccaggagcggttccctacgtacctggtggacgagttccggacgaccaagatacaccacgtggacgacagcctcttgcagggcgtcggggagaggagatggaaaggagacaacgtgaagacggtgcgaggcttgctatggtgtggttccaccaacgagaagaaaagcaagttcatcaaccgagacttcaacggagccatgaacatccggagatgcttcgtgtcggcggagcggcctgcaatcctggacagatccaagtgccaggggcggctgcagttcgtgcggacggggcgcgtgatccggatgaagtaaatgttgcgaggtgtgggagctattcgcttcgttcgcgaagcaactgcgcgacctcaggggaggtcaccacgcgtgaaggtcgcagcgttggaaggttcgcttagcttgcggttaatgccgatgtgagcgtcgaacaaggggaagagaaatcgacccgccttctatacatgaagaaggcgggtgtaccacaattcacttgctggagtgtagtatcattgtcattgtcattgcagtcgcatgcctgatcctggcttccctgtgcgcctgcatgtggaaaatgaatacgtttggagggggtccagtcgaaggtttaatggatgcaggagaaggtttaatggatacaggagatggagatggagaagcagaagtgatctacatgttgcgcacacatgtctgcgatgatggcacaatggacatgctggcacggatgcagcaggatgtgggcgttgaccgagtatgggtcctgtatgatgacacgaaggagagcctcacaccgacgatggtcgacgctgcaacgaacagactcatcgtccacacagaagacggttgcagatcgcaaaacccgtttcacgataacatatggagcaatgtggatgcaccgctggccattgcgtacaatgtgcttcggcatgtcggcttcgattttgtgtggctcattgagaacgacgtctactgcgacggctcctttaaaaatgcatttgacaaggcacgcggccatggccacgatttcctggcggacaacctggaggaatataatgaagccaatcgtgactggtgctggttcccaagccttgttggcgagatcagcacagcggtccccgtgcatgagagagtcaagtcgtacttccccatcacacgctacagcaagcgcatgctgcagtgcatcgcagacaaccttggcaggtcaggggggttctgcgagtgctacattccaacgctggcacgctggcaggggctgacctatgccacgcttcctgagcccatgattggagatctgacaacagagcaccgaggctggaagctgacgccgcaaacactaccccatgagacgaacgatgtgttctggcacaagtactactactgagagctagagcttgacatcggccgggtcttaggtctgttcaccgacttgcggcggcgaagcagccagtcgaaccgacctcggctgtcgcgcgacaggaggatggcgaggcgctcgtgcgtcgagaggtcgccgacagcgcatgccatcgcaaagccgatgtcttcgaggtccccgatgtccttgctttctttatcaaagtcaaactcagactcaaactctgaacgcagccgagcacactcctggacgtcccagtagtcccagggaccatcacggtcgcggagcacttcaacgttcacgaggacgttcgcggattgactcacgaggacgttcgcggattgagattgagattgagtttcgttaagcgagcaccggtgcagaccttgcagggtcacgagatgatggccgtggtcgtaccctcgcgtcatgcgagcgatgaccccaacggaattttggggcagtgctgggggcaggtaggcgggatggagcgccgcggcgatgatgacgtgcgggcgggatgccaacaacgatcgaactctgccgtcgtcctccgcgtcgctgatcacgaactgtcgagtctccaatggcagcaggggcacggagcccgacgggtagtacaagggtagcttactgagcttactgagcttacggagcttactgagtcttttggacgttggagattggaaagccatccttgttctggttgtcttattcttagtcttattcttcttgttcgtcttctttcatgaagaaggaaacgtaaaaccacagaacggcggcgcaggaatgtgtccagaacccccagccagggagctggccctgcacccaccgaaccgcgcgctggaacggcgccgtctgcgtgcgccacgtttcgtgagcatgccacatgcgaaccccctgccagaacgtcgcggcggtcaaagggcagccgagacgcttgagacagcacatcatttcaatgttgccgtgcttcgcagcactcgcatacgccgtgccgtccatgggacagccgtgcgccgcgaggaattccaggagctcctcgctcccatgggtcaccgccgcacgaaaggtccgctcgtcccaggggcagccgcgttcgtggagccagacggtagccgccatgctgccgccctcggccgcctgctcgaagatcgcctcgtccaggtccccgtccttcaagagccacgccatcgccggcaagttacccgcgcgcgcggattggcgtaaggccccgggcctgctggcgacaaagccggctgtgtggatgaaatttaaaatttcgggcgtcatgctccctggaaaccggaaagtccaccaacatgtgggtccagtcagcacctggctcatcacgtactgcaccagctccaggttgcccgtgcctatgacctggtccagcaccccccagttcaagcggtagccacgcgagacgagccacgtaagacgaggaagcgcatcgggcatcgtcatcgcctccccgcatgtcgacatgcatttttcgcacccctgtgactccagccagacaatcttctcatggaagtcggtcaaaaggacactgcgcgctgcagcagggatgacgcaggacgacgccatgacgaagccgagttcatactttgataccagtacctgcagcgtggccaggtcgcaaccgcgagccgccgccctgaccaacatgtactctcggaactggtcgttactactttctggaacttctggacgagattgagtgagtctcaaaaagtaatccatcaggacgacgtggcctccccgcgcggcatgagtcgccgccatccaaaagtcgtgatagcaagctcggctgttgcggacgatccaatcgcaaacgaacggcggctggcccgcgtccgctgctgagcatcacactccgcaggacccctcgggcagtagaaggtcatgaggaagcggcagacgtccaggcgacccgcgccagccgctgcatcccagacctcgaattcccatgcatgggcctcggacctcctgaggagggccctgaggttctcgaccgagccgctacgcgccgtcagcttcgccagggtcatccgctggacggtgttcagtgtcctcatcttgttcgagatgaaccacctgaattccctgggcgggacaggcttcgagagcgtaaccgattttgaattcgaaaagtgtgctgccgtggccttgtcgaccaggcgcaggaagggtagacagttgtccgggaggtgcccagcgatgctggtgaggatgtccgggaaccagattcggtatgttgttgacgtcatgttcgttctctgttctctgtccctatcatcaaaaccctaaatcaagcgtaatcaatggcacaaacagattcagttgatcatcggtctttgagagtcgcacgggtctctgagtatcgcacgggtcttggagagtcgcacgggtcttcgagagtcgcacgggtccttcagggtccgggtccttcagtcattccggtctataatccgagtgtcccattttattttggcaccgactgtatgatcggtatggtgccgatgcgcatgcggaaggactccctggaagaggtcaccttgccgagaacggctgtaatgccaccgattctccgagaggcccccaggctcaccagagcacttatcccagcatgacttcagcttttgcctagaaggtttgcctagaggctgcacttatcagtgctcgggactagtggtctgcggaggcgtattccgtcacaggaactcgacctcagtccatcagggttatccccggagccccgtgtttctaacgggaaatactttggggtttattcatgacccctttcacccccccctgcgtcatttacccagacacgtttcttgtgttccgggtgtcccaaaataaatgacgccaactgtattatcgcggatggttgcggatcgttgggctctagatgcatctccagatacatgtatgatgtatttcagatgtatttcaacagcgtcacggacgagtcaaaactcaaaccatcgtgccatcatgtgaccttgattgtgacctgctcaccacttcactggaacaatcctcactgggtgttcgaccttggccagagctgcagtgaaggccagaatcggaactgccgtgaaatagtaagtgagatgggtgcatccaggatcggaatcgttttctatgtgacacaggccacggacaacgtcaaacttgtcatggatgacaccctcgtaaaatgcttccagcgtgacgccccctaatatgcatgtccgtgatttctccctctctcgcgtccgtaatcgcgacccgatccgaacacagatccgaacacagtctgtcagccactctcaacctagacctcaacccagtttcgccagcagctgccccagtgcgtccgcggaggccgactgcgtttctacccatcgctgcttcagcccggccagctcgagcgccttccgcgcggccgtttcggcaacctgtgcttccgccagctgctccttcgcccattttagctcgatcccttcatgcgccgctgccgcgcagaccgcattcgcggcggccagcttcatccggacctccttgagctcgaccgcctgctgccgtacggtctcaccgtcgacctgcgcgacggccagcatgtgccttgtccatttgagctcccccccctgctgcgcggcggccgcgccagccgcattggcggcggccagcttcatccggacctccctgagctcgtccacctgctgtgccacggaggacaggtcggcctgcgcggcggccagctgctccctcaccctctcgagctcgccctccaccagcaccgttgccgcgcggtcggcctgcgcggcggccagctgctccctcaccctctcgagctcgccctccaccagcaccgctgtcgcacggtcggcctgcgcggcgaccagctgccccctcgccctctcgagctcgccctcgcgctccaccagcaccgctgccgcgcggtcggcctgcgcggcggccagctgctccctcaccctctcgagctcgccctccaccagcaccgctgccgcgcggtcggcctgcgcggcggccagctgccccctcgccctctcgagctcgccctcgcgctccaccagcaccgctgccgcgcggtcggcctgcgcggcggccagctgccccctcgccctctcgagctcgcgctccaccagcaccgctgccgcgcggtcggcctgcgcggcggccagctgccccctcgccctctcgagctcgccctccaccagcaccgctgccgcgcggtcggcctgcgcggcggccagctgccccctcaccctctcgagctcgccctccaccagcaccgctgccgcgcggtcggcctgcgcggcggccagctgccccctcgccctctcgagctcgccctcgcgctccaccagcaccgctgccgcgcggtcggcctgcgcggcggccagctgccccctcgccctctcgagctcgccctcgcgctccaccagcaccgctgccgcgcggtcggcctgcgcggcggccagctgctcgagctcgccctcgcgctccaccagcaccgctgccgcgcggtcggcctgcgcggcggccagctgccccctcgccctctcgagctcgccctcgcgctccaccagcaccgctgccgcgcggtcggcnnnnnnnnnnnnnnnnnnnnnnnnnnnnnnnnnnnnnnnnnnnnnnnnnnnnnnnnnnnnnnnnnnnnnnnnnnnnnnnnnnnnnnnnnnnnnnnnnnnnnnnnnnnnnnnnnnnnnnnnnnnnnnnnnnnnnnnnnnnnnnnnnnnnnnntctccgcctccgcctccgcctccgcctccgcgtccgcctccgcctccgcctccgcctccgcctccgccctctgaccgcttgacacttggcgtcggtacgtattcgtcgtcatcgggtacgtattcgtcgtcaacctgctgctgcaccagacgcttcaagttcttgcgtagatttcttagtttgttcctcggaatgaatccacaattcacccatgcgaagtcggggttgggctgcaaggacgagtcgccgagcggaacgagccaggtggaaataaactgcatgcagcggtcggcttcgcgcggtcggcggcgcgcggtcggcttcgcgtggacgtggtcgaccagctcgggccacgcctcgagtagaggcaggaatgcctccgccgtgtgatcgcagacggcgcgcttgtcccgcaaattgcagaagaagaccagtggcttgtcgctcgcgatggctgcgcaggtcgcatggcagtaccggttgcagcgcgtgttggtcgatagagaatggtaggagcactgcaggagctcggcttcagcgggagctaggcatttgccaatgagctgcgccatgcacacggggtcgtcggccatatcgagattcgggagagagtttgagagagtttgagagagtttgagagagagttgagagcgattacatgtatttattacagctgtgcacgtacggcgcctttttcgtggaccataatcaaaacagtctcattgaatcttttgcacggtccgagaaaaagaataatcaggcctccctggagtccacgcgcgataaaaaagttccctactatgcatatgattgtgtaacgtctttgaaagtattatttggtcggtcaagaggtcacgtcgatttccagaaagaaagtttcctactcgtcttcgcgaatgaaggactttgaacgctcttggcgcaagctcagcagatccatcatcattgctgggacgagcggctgctgcttcgagcttgcttacagaaaggtgtacaatgacatcgtttctctgaaaaggaaggccggcaagctgaacaagctgatcaagctgatcaagctgcgcgatgacatcgtcgaccagtgctgggaggtcgctttggatcggtggatcccgcccgagacttgcaacgaacgtgtgcgtctcatcggagatgtgttcctgtacctcgatgcggcggtgctgaagccaaacggcgcgacgaccctggtggaggcgctccgggcccgcttcatgggcttcgctgcggcggtccggcagcggaaatcgcagcgcatgctggccttggccgctctccttcgccaggggctgaagaaggagatcgtgatggcacggtgaaaaaggcggcggtagatgatgcgacgacggggtggccagagaggcccgcgaagccgagtccgtcgagtgagcctaaggtcgtggtgcaccccctttccatcgcctccgccgccacgttgcgcgccccatctggcttggctcgctggggcgggctaggatggccggacggtgaggagttgcgtggattaattctttttacagtgttgtttactaccggacactacttggtcaccttgtacgacttgaccttcttgagcagctccatggcctcctcgctgttctcaaagtggtcacgaaccggctgcaggatcgcgttcaggtggcgcgagagtccggcctgcgttgcgcgtcaagacaaagctcaagaagagatccaacaagttcacaaacaagtccgacctttaggtctcccgggtgcagcgccccctcctcgtagtccgccgccagctccaccacactgacgtagcgcttgtcgccgccgtggtccgcgggccgtaacacgtcaaagtgaccgacccaggggagcacgatgaagcgcgcgtactcgaagcaggggttgcccgtcgtgaccttgggaccttcttgatcttggtcgagcgcaagtcctcttccccgatctccaaaccgaggacggcgtccggggggcgcatggaagataagttcttgagcatcaaatctgcaggaagccggagggtttatcattggtacgtttccttcctgcctttgctacctttactgcctctgcctctactgacttttctgacttttctgacttttctggctttgctgcctctgctgcctctgctgcctctgctgcctctgctgcctctgctgactctgctgcctctgctgactttgcgggctttgggtttggaccgcatcccccccccggcccttgacgctgggaaactgaggtgtatttcagatggtgcgactttgttgcctctgcgtatacttgcgttccaaaatgtatcgtcgggtggtcgtgcggtccgtgtgttcatcgtttcggttgcgtcatacggtacgaccgttgccgaccgcctgtttgtctgtcttgcgcttgtttggagcatgttttctatgtgcacgtacacatagcaatgctttcgccgtaatttaccgctaacatcccaccaccacacgctatagtccttaacatgttggtcgtatgacagcatatatttcactgtcggatccgtactttcccacacaacttcgctggtcttgttgaactcctccgggaactcatattcttcggaactcagattcgtcgttgggaagacaatgcctttcttgcgatgtcgcaagttcttgacctcattgatagggtacacacctaatcgtgcgacggcaataaccgcatccgagaagggctcacccgccgtgtaaggtttaacgattggcataatgaatactttcacattatcagtcgcattacccgactcattgaggaagaatcgttccagtcttcttactcgttccaagcgattaccccgccacaaattgaatgcgtggcttggatctattttaagtccttcactatcagatagtatgtttgatgcatcattgctatctgatacgatgaacacgtatactttatcccgtaacacatacttatttcctgcttgttggaggggttcaaatataccatacttctttcctgcttgttggcggggctcaaataatctaaatgtaccattcgcatatgacagcagcatgacagcgccatccaccttcgtagtacattcccacgcgtctcttatcggtagctcagaagtcgaactcgtattttgtgttgggaaccacaagcaaccttcagggtttcgcttaccaagctgcgactttggcataatgaatacagttacatcgctaccaggatcaaaacgataatcgagaatgaaatggtccgatctttttggtttctttaggagttgcttccattcatccttgtgcaactcctcgtcgttggtctcaaattttgtccgtcttgtctcgtggtttgtctggtttgtgtggtttgtgtggtttgtgtggtttgtctggtggtttgtctggtggtttgtctggtggtttgtctggtggtttgtctggtggtttgtctggtggtttgtctggtggtttgtctcgtggtttgtctcgtggtttgtctggccccgcaaggacatcctttatctacatttatgtaatttgagcggaggccagaaccaacaatgaacaacacaacacaaacacacctccgcctccgagtcctccatgaaaatggccgagttggggtcgctcttgctcatcttctcctgtccctcgagcagccccggcatcatcttgtgcgagagcacgatgggcttgcgctttgagtcgcagtactcgcgcgccagcatgttgacctgaatagaaggttaggttaggaagcacggtcatgatcttcgtgagcgtcaagttaccttgcgctggcccatgccaagctggcagatgtcagccttcaagaagaagatgtcggcgcactgcatgcaggggtagaatatctgcgcggcagtcaggtcatccgcctcggagcggcccatgatctgggagcacctgcgcggatcaggaacagggaactcgatcgggaaccaggaatacgggactcgggaaccaggaaccggacctgacgatgcgcttgaggctgttcttgcgcacaatgtccatcaccagcgtccagtactcctccggccgcttgttgatctcctcgctgctcgacaagaactccaccttcagcgtcaagtaagtaagaataagcgtctggttttttcgtgggtacgc

SEQ ID NO: 115 - DNA, 21188 bp, unidentified
  misc_feature 1..21188: note = Fanzor polypeptide
  variation 3094..5243: note = n is any nucleotide
  variation 9574: note = n is any nucleotide
  source 1..21188: mol_type = other DNA
tttgtcagaaacctgcctggctggctgctctcacccaagctgcttatcccaacagaactgtcagagcttccgaccaaatgcctgcccaacacacgacgatgcattggcgcccctgggatgcagtgtggtgcatcccaggggcagcccagcaggtatttttgccgtccacacgccttcaccataacccagcgtctcgcaagccacaacataccaccttcgcatcctccgggacacgtgcagcttggacgccgctcagccaatcttggacgccgctcaccagcccgcacactcattacccgctttcagccgcctgccccttgcctacctcgttgcccccttgcggctgagggccccgccttaccccgagctgtgcagccggccccgctcccgccgccgccacacgccctgctcgctggctgcgcccgctgccaaccccgcgccctgacctcccctgaccagaagccgcagcccctacccttttggggctgagcccccgccgcgaagcggcatcgggggggcgaagccccccgggattggtgccgtgtgcctgcgtccgtccgtccgccatgaacttgaataccaggcccatctggcttcgccacgaccttgccatgaccttcctctatccatccccccgggtctcgtgcccccaataaatcgggtgcgctctggaaaagtcggcgaacatctcgggcggaaactcaaacttgcgcctcgcggccagctcgcaacggctttggacatgcctatcactcctgtatccatcgtgcccggtcctgggccttcaagcccaactcggccgggcccgtcggccgggcccgtcgcgaattgcatggtcgggccgcgggcgcgctatctagagctcgccaccatagcatcctgcccttgccgacacaatgctggctgctcaagtgcattcgatgcgcctgtgctagctgtggggcacacatgtgtgtgcgttttgttttggcctgcttggtgatttggcgcggctagtaacacccacggtgctaatgattctcgtctgtggggttgggactggctggggcttgcggttgggctgtgcggtgaggacggcaggggagtctaggggcaggacatactgcaggatgggagggtggggaggggcttccatgcacaacggaaccggcccgtcctctcgggctcagccctttttccaagctttcttaaagcttagccccccttgtcacggctgaaggccatcaggcaggacgtgtctggacgtgttatgggcttctcctcctcgatctcgctctctcgctcactgttactgaagattggtatccactccaagagacagaacacttcctgactccgtggcccacacaatcccgctgtggcagcaagggggctaacgcgcatccagggggctcgagtcggattggtgccatttgagtgcagggtagaggctctgcgaccccaggattttctggaggtaagacattgaatcgctggccaacgtgtatctgtatatgaatcgacggctatctgtgtatgaatcgacggctcccttgtacgatagtacgacagcaagcttacatgttactggcaggggtcacctggttgagtccagtcctcagctcgtcccgtgccgggttccactgcaataagcacagcagtgcggggaactctacgagacaaccccgggctctatccttcatacggcaaagcagacacccgaggaacacccgtttctggtgttcctcctgctcgcggcaagccgacgcaaactgtatcaaggcttccataaccatgaccaccagcctataacccagcatagctctgctgccgccaatcgcgacgagccagcccgtgaggacgacgattttgatggcgatgatggtgtagcgcacacccccccacgtcaggtcctgcatagggcaggacagggccacccacacgaccgcggcaacaacagcccacgcccggccggagcatttctgcaagcagaaaacacgagtaagtcctacagaacgaccaaaaactcaacacacagctaggtgcagaacatgtccagccgggtgcacgcctccggacttcctgggaagcagtgggcgcccggttgctcttgagcagtgcggcgccaagaaggacgtcctgctcgcaaaccacgtcctccagcgcctcctctcgttgctgctgttgcatcagcggcggtggcggcatgcttgcgctgctcctctgttgagcggccgcagaggtgctgcttgcacggcagtccggcaggcggcagcctgaggctgcggacgatgtcgccttgtccatacgtacctgcgggggtgcagcagggggttgcagcagggagcctgcgtttgcttgcctctctgtgcggccgtgacgccaagatgcgcaatgttgacacgcgtgcggctggcagcgggcatgaggccaccagggtgtgagcaagcagagcaattacagcctggacagcacttctgggggcggattggatgtacgatggcggaacgggagagagctgtcagtgtccctacgattgcctgtctgcgacgcaccttgggctgcccctgcgcaggctgcggaggctgcccctgcgcaggctgcggcggctgctcctgcgcaggctgtgccggctgcccctgcgcaggctgcgcaggctgcccctgcgcaggctgcgcaggctgcggaggctgcccctgcgcaggctgcggcggctgctcctgcgcaggctgtgccggctgcccctgcgcaggctgcgcaggctgcccctgcgcaggctgcgcaggctgcggaggctgcccctgcgcaggctgcggcggctgctcctgcgcaggctgtgccggctgcccctgcgcaggctgcgcaggctgcccctgcgcaggctgcgcaggctgcggaggctgcccctgcgcaggctgcgcaggctgcccctgcgcaggctgcgcaggctgcggaggctgcccctgcgcaggctgcggcggctgctcctgcgcaggctgtgccggctgcccctgcgcaggctgcgcaggctgcggaggctgcccctgcgcaggctgcggcggctgctcctgcgcaggctgtgccggctgcccctgcgcaggctgcgcaggctgcnnnnnnnnnnnnnnnnnnnnnnnnnnnnnnnnnnnnnnnnnnnnnnnnnnnnnnnnnnnnnnnnnnnnnnnnnnnnnnnnnnnnnnnnnnnnnnnnnnnnnnnnnnnnnnnnnnnnnnnnnnnnnnnnnnnnnnnnnnnnnnnnnnnnnnnnnnnnnnnnnnnnnnnnnnnnnnnnnnnnnnnnnnnnnnnnnnnnnnnnnnnnnnnnnnnnnnnnnnnnnnnnnnnnnnnnnnnnnnnnnnnnnnnnnnnnnnnnnnnnnnnnnnnnnnnnnnnnnnnnnnnnnnnnnnnnnnnnnnnnnnnnnnnnnnnnnnnnnnnnnnnnnnnnnnnnnnnnnnnnnnnnnnnnnnnnnnnnnnnnnnnnnnnnnnnnnnnnnnnnnnnnnnnnnnnnnnnnnnnnnnnnnnnnnnnnnnnnnnnnnnnnnnnnnnnnnnnnnnnnnnnnnnnnnnnnnnnnnnnnnnnnnnnnnnnnnnnnnnnnnnnnnnnnnnnnnnnnnnnnnnnnnnnnnnnnnnnnnnnnnnnnnnnnnnnnnnnnnnnnnnnnnnnnnnnnnnnnnnnnnnnnnnnnnnnnnnnnnnnnnnnnnnnnnnnnnnnnnnnnnnnnnnnnnnnnnnnnnnnnnnnnnnnnnnnnnnnnnnnnnnnnnnnnnnnnnnnnnnnnnnnnnnnnnnnnnnnnnnnnnnnnnnnnnnnnnnnnnnnnnnnnnnnnnnnnnnnnnnnnnnnnnnnnnnnnnnnnnnnnnnnnnnnnnnnnnnnnnnnnnnnnnnnnnnnnnnnnnnnnnnnnnnnnnnnnnnnnnnnnnnnnnnnnnnnnnnnnnnnnnnnnnnnnnnnnnnnnnnnnnnnnnnnnnnnnnnnnnnnnnnnnnnnnnnnnnnnnnnnnnnnnnnnnnnnnnnnnnnnnnnnnnnnnnnnnnnnnnnnnnnnnnnnnnnnnnnnnnnnnnnnnnnnnnnnnnnnnnnnnnnnnnnnnnnnnnnnnnnnnnnnnnnnnnnnnnnnnnnnnnnnnnnnnnnnnnnnnnnnnnnnnnnnnnnnnnnnnnnnnnnnnnnnnnnnnnnnnnnnnnnnnnnnnnnnnnnnnnnnnnnnnnnnnnnnnnnnnnnnnnnnnnnnnnnnnnnnnnnnnnnnnnnnnnnnnnnnnnnnnnnnnnnnnnnnnnnnnnnnnnnnnnnnnnnnnnnnnnnnnnnnnnnnnnnnnnnnnnnnnnnnnnnnnnnnnnnnnnnnnnnnnnnnnnnnnnnnnnnnnnnnnnnnnnnnnnnnnnnnnnnnnnnnnnnnnnnnnnnnnnnnnnnnnnnnnnnnnnnnnnnnnnnnnnnnnnnnnnnnnnnnnnnnnnnnnnnnnnnnnnnnnnnnnnnnnnnnnnnnnnnnnnnnnnnnnnnnnnnnnnnnnnnnnnnnnnnnnnnnnnnnnnnnnnnnnnnnnnnnnnnnnnnnnnnnnnnnnnnnnnnnnnnnnnnnnnnnnnnnnnnnnnnnnnnnnnnnnnnnnnnnnnnnnnnnnnnnnnnnnnnnnnnnnnnnnnnnnnnnnnnnnnnnnnnnnnnnnnnnnnnnnnnnnnnnnnnnnnnnnnnnnnnnnnnnnnnnnnnnnnnnnnnnnnnnnnnnnnnnnnnnnnnnnnnnnnnnnnnnnnnnnnnnnnnnnnnnnnnnnnnnnnnnnnnnnnnnnnnnnnnnnnnnnnnnnnnnnnnnnnnnnnnnnnnnnnnnnnnnnnnnnnnnnnnnnnnnnnnnnnnnnnnnnnnnnnnnnnnnnnnnnnnnnnnnnnnnnnnnnnnnnnnnnnnnnnnnnnnnnnnnnnnnnnnnnnnnnnnnnnnnnnnnnnnnnnnnnnnnnnnnnnnnnnnnnnnnnnnnnnnnnnnnnnnnnnnnnnnnnnnnnnnnnnnnnnnnnnnnnnnnnnnnnnnnnnnnnnnnnnnnnnnnnnnnnnnnnnnnnnnnnnnnnnnnnnnnnnnnnnnnnnnnnnnnnnnnnnnnnnnnnnnnnnnnnnnnnnnnnnnnnnnnnnnnnnnnnnnnnnnnnnnnnnnnnnnnnnnnnnnnnnnnnnnnnnnnnnnnnnnnnnnnnnnnnnnnnnnnnnnnnnnnnnnnnnnnnnnnnnnnnnnnnnnnnnnnnnnnnnnnnnnnnnnnnnnnnnnnnnnnnnnnnnnnnnnnnnnnnnnnnnnnnnnccgcatccccaagacccccgcccagcagccccgccgccgcccctgccccaatcccgcggtattgcgccgccccgggcagcgatccgtgcccgatcgtgccgcgaacggtcgccgacaccggccgacacgcctactgctcgaacatcttggcaatctctcggggactctcgggtccgctcggggtccgctttcgcctcggcgttgagtgcccaggtgcgtctgcgagctcaagctttgcgttcggcaccgttcgacctgcgaggtctactcgatgcagcgtccctgatgcgcccgatgcgcaatgtcgccttgtcgctcaccgctcgttctcctcgccacaggacttcccccattttagttcgaccttcatcagcctcatccaggatggagtcgtcgagtaggttgtccgctcacgtcggtgttcgcctttcgttgaagcttgactgcgccacaggttctcgccccaccatgttctatttctacaacttgacacgcgggaggcttcgtgtctacacttccagtgacgcagtcattgccaagtacactgtgtcacccacagaggccgaccacaaactgtccatggagggcaacagaatcaccatcgctgctgagtcgcccggcaacgagttcaagaccgatgtgcaccgtggacggaccatggacggacagaaccttgtcgtctacgagggccgcgcgcactacgagtgcaactggttcaaggacgaggacatcgatcgcgagctggactccatcctgcgaagggtcgtctacgcggaccgcgaggactggtccaaggacgagtacgagaaccgcggggacgggttcaaggtcgatggcaagctggacatcctgccaagggatgagtcgaaacgggaacgcttcgcgaagctcatcatgcgtcgggctggcaggcctgctatgctcgatctcataaagtcgtccactctgatacagtggtccagctacttgcgtctcagcgacgactcaccaacgattcggggcaagatcgtggcggccatagggatcaatgatcaggtaggatcaagtaggatcaggtagttgttgtttctggtctgtgttggtgttgtactcccctaagcaggtgttgtactcccctacctaccctgctgcacagaccttgaaggactactcaggggagatctacctcgagaacctcggcgacatcgacctcacctgcaaggagctgcccacgtgcatcaagcgcattcagaaggccacgctcgtgctcggcgacacactgcacatcaactcgcatgtcgtattcgacgacgtcagggtcaagtacaagttcagcgacaagagtgtgatcgtggtcaaggggggcgccggcaccgaagacacgcccgtcaccatgaaaaatgtgcgttttcggttcgacaaggagagtagcagcgtctcgacttccccaagcgagtccttccttctcgacgtcgagagtcatgtcaccctcgacacctgcaagctgtcgcgcagcacaggcggcggcgctcgcgtgcacgacggcgggcatctgagggcgactggcacgacgttcagcggcaacaagtccaccggtgtgacggtcagaggcgccggcagcacggccgtcctcgaggagggctgcacgctgtcggacaacgtctccggcgcggtcgtggagagtggcgggcacctggaggcgactggcacgacgttcatcggaaacaaagaagacggcgcgatcgtgcaagacggcgggcacctggaggcgactgccacgacgttcatcggcaacaagggagacggcgtgattgtcagtggcgccggcagcacggccgtcctcgaggagggctgcacgttcagcgacaaccgaatcggcgtgtttgtcgtaaaggccggcagcaaggccgtcctcaaggagcgctgcacgctgtcggacaacgtggaggcctgcgcgtacgtgcaagacggcgggcacctggaggcgactggcacgacgttcagcggcaactggagctacggtttgaggatccttgccgacagcacggccgtcctcaaggagggctgcacgctgtggaagaacaaggtacacggcgcgttcgtttttttcggcgggaacctggaggcgactggcacgacgttcagcggcaacgtgtcatacggcgtggaggttgaaggctatggcagcaaggccgtcctcaaggagggctgcatgctgttggacaacgagtccggtgcgcacgtacaagacggcgggggcctggaggcgactggcacgacgttcagcggcaacaaggaagtcggcgtgaaggttagtggcaacacggccgacttatatgaggacaaagaagacggtgtgaaggttattggcactcccagcaaggccgtcctcaagggctgcacgctgtcgaagaagaaggttggcggcgcgttcgtttccaagggcgggagcctggaggcgacttgcacgacgttcagcggcaacgatgaaggcggcgtgaattttaatgtcaccgacaattccaccggcttgtctgtcactggcccccgcagcacggccgtcctcaaggaggactgcaagctgttggacaacgaggacaccggcgcgttcgtggagttgggcgggagcctggaggcgactggcacgacgttcagcggcaacacgttaactggcgtgtatgtcactggcactggcagcacggccgtcctcaaggagggctgcatggtgtcggagtcgcactccggcggcgcgatcgtgagtggcggcgggctcctgaaggcgactcgcacgacgttcagcggcaacttcaaccacggtatgaacgttacagtccgccaaatgaattgtgttacacctagatatggaaatcaattttcatgtatccgctggaccgtcggcagcttgctcgacacgtctattcattatttgagagtttgcgaaagtccgctgctattctcagggtaagccactctactgtggcaaggtggttgaaggctcccgtgcagaaaccctacatgtccgcagttcgccaagaccgtagcaaggcgttgctggtcaaggaaacaattcgagttgcgatccgaaacgacccgttgttgtcctgtcggcagctccgtgacatcgtgaagaccgtgttgcgggtggacatttcccgcgagctggctagagtcgtcctgctgaaacagacctggtcgatgccgggtttcaattctggtccctggacgaaaccagctttggtcgacatggggcacctgtacatggcttctcgacacggggggtgccccttcggatcatgaaacgaagcgctcgtgtcaccacggtgtccgcaatggtcatcgcgaatgcatcgggcacggtgatccacgaggaacgaaagggttcctttgcaactgcatcgtttgtagagttccttggtcgcttgacgattcctgaacattccatcattctacttgacaacgtcgcgttccaccgttcaaaagcggcccgagaggtggcttcgcggcgcaactggacgcttctcttcgtccccccgtactccccgtggttcaacccgattgaagggattttctcgattgtgaagcggcgctggtacagtggatcgacgatcgaggaagccttcgcagcggtgacgcccgcacacaatgccgcgttttttcgcaactccatggcgcataaagggttcgagccgtaaccaaagtatcctcatacacgccatgctatggaagcgaccaaggaaacgaagaggaagcgtccggatagggcccttaaacttgaagaacgcagagtctccacggaaaccgtagtgaagtgctcgctgcgtagcgtcctcctagggtcaccagcccaggtcgacgcaatggtcaacgccatccgctcccgggtcgtcgccgcgtcccgacgggtcgtcctcgcctccatcgccctgaatctactcgtccgagaagtcttcgaccgccagcccgacgccaccctcgacatccgagacgagacaaccctgcggcagttcatgcttgggacagcgagcgcgaataaacccgatgcaagggtggccgatatcttcctgcgcaaccctgggctcctgcacgaggtctccgatcgacacctttccgatcgcaacatctactcagcagccgccaaaaagctggggaccaatctccgcaaccacctcgtcgtcagcctgaggcgggtggtcaacaaggcgctcgcggatgtcccaaacgatgcggagagggttctgatgctctacacgctttacggatggaagggagggccgcgcaagaaaatcaagccgcccaagaaggcgaagacctcctcctctgtcgcaccgacggcagagatcgccccggagccnaaaccctacatgtccgcagttcgccaagaccgtagcaaggcgttgctggtcaaggaaacaattcgagttgcgatccgaaacgacccgttgttgtcctgtcggcagctccgtgacatcgtgaagaccgtgttgcgggtggacatttcccgcgagctggctagagtcgtcctgctgaaacagacctggtcgatgccgggtttcaattctggtccctggacgaaaccagctttggtcgacatggggcacctgtacatggcttctcgacacggggggtgccccttcggatcatgaaacgaagcgctcgtgtcaccacggtgtccgcaatggtcatcgcgaatgcatcgggcacggtgatccacgaggaacgaaagggttcctttgcaactgcatcgtttgtagagttccttggtcgcttgacaattcctgagcattccatcattctactcgacaacgttgcgttccatcgttccaaggcagcccgggaggtggcctcccagcgcaattggactcttctctttgtccctccgtattccccatggttcaacccaatcgaaggaatcttctccactccaaacacctgccccagggggggcgcttcaccggcaccatcgagacggatggagtggctgtctgcatccattacgtgcgccccaaggtgagctcggaaggtggcgttgccggcgagaagggcgcgatcgagacggaggagtccagggcggcgaagaaacccaagtcgaccgccgctcagggagaggaggcggaggcggaggagaaggtggcgaagaaacccaactcaagcccgccgcggcccacggcggagcagctcgcgcggtgcaggatcgtggtgatcgaccccggccgcaccaacatcatctacgcggtggaggtgacgtcgtcgggcgtgaaggtctaccggctgacacgtgcgcagtactaccaggagtcgggagtagcgcgggggaagcagcaagccacgagctggctccgaggggtgaaggatgagctggcgcagctctccacggtgagccccaagggagcggatctccccgcgttcctgctcttcgtggcgacgcacctggcgacgagcgaggcgaggtgggaggaggccatgaaaccgaggtgggcgcagatgcgcctgcgcttgtacgggggcaagaaacgcgtcctgtcgaggtttttcaacgagatcgctcgagggcaagggggcgcagattcccgtcctgtcgtcatcgcgtatggagccgccaagttcgctccgggcgggaagggcgagttgtcggtgccgacaagcggagtcttcaaggcatgccaggagcggttccctacgtacctggtggacgagttccggacgaccaagatacaccacgtggacgacagcctcttgcagggcgtcggggagaggagatggaaaggagacaacgtgaagacggtgcgaggcttgctatggtgtggttccaccaacgagacgaagagcaagtttgtcaaccgagacttcaacggagccatgaacatccggagatgcttcgtgtcggcggagcggcctgcaatcctggacagatccaagtgccaggggcggctgcagttcgtgcggacggggcgcgtgatccggatgaagtaaatgttgcgaggtgtgggagctattcgcttcgttcgcgaagcaactgcgcgacctcaggggaggtcaccacgcgtgaaggtcgcagcgttggaaggttcgcttagcttgcggttaatgccgatgtgagcgtcgaacaaggggaagagaaatcgacccgccttctatacatgaagaaggcgggtgtaccacaattcacttgctggagtgtaaagacactggcagcaatgccgtccttgagaactgcatgctggaggagaactacacgtatggcgcgttcgtggacgacggcgggagcctggaggcgactggcacgacgttcagcggcaacgaacaagtcggcgtgaaggtcagcggcaccggcagcacggccgacctcaaggagcgctgcaagctgttggagaacaaggaatacggcgcgctcgtggccagcggcgggagcctgaaggcgactggcacgacggtcagcggcaacaaaaaagtcggcgtgcttgccatgggcgacggcagcacggccgtcctccaggagggttgcacgttcagcaacaacccaatgcccgtgtgggaggaggacaacggaaagttaattgcgcagtagaaaaaatagctgagggggagaggtagttccgggctttcaactggactgtgggcctcttgtggggtgaaatgctgattcggagtgtagagtggagatgcgccagggtgacgtctcttcatgatggaacccgacgagaggagaacggctttcaacgacgcgctgggctcttgtggttgctggttccgggcgctgatgggcctgacggggccgtgaagggacgatcatgggccgcgaggggacgatcgacgggcctgctgggtccgcgagggggcgctgacgggccgtgaggggacgataaggtcgcgagggggacgctgacggggccgtgaggggatgtggaccatcaggggctgcttctatcttcattcgagatctgacctacataaacctacatgcacttgtaaactatgattcccgactctcaatgtccgtccgactcctagagagccagcgggtgcctcgcaagggtctcgctgtagatgcttcgccaaagagaggtccatcgacgatgccctcgcactcctcgccgtccccaatggggtgccaacggggaaccaagggggcaaagggtggggccgatggggtgccaagggtggggcgacgcagggctgatggagccaaggggcgccaaggggtcacgaagggggcccattgggggggcaaaggggacacgaaggggccgatggggtccacttggggcgccaaggggacatttccgctcgcaataagtagcgccgtgagtacaattggctcgagccccagctccggccgagctcgagccgagctaccgagccgagccgagcgacggttgtaggtcctgggaggaagttgaagtatttttaacgcactgtgtggggcgtcttaaaagagatcgccggccttccctggagtgttgagcacacgccatgttcgcgtgccttctcgctgcatcttatagcctaaatcttaatctacatcgcaatcttaaagagcagcacacggtcgctgaccttcactgtcgggattctgcttcgtcgctcgctgccacgatcgaccatctccacgagccctactgctcgaacatagtggcgaactctcgggggctctcggggtccgcttttcgcctcggcgttgagtccccaggtgcgtctgcgagctcaagctttgcgtttggcatcgttgaggtctacggagtctttgcagcgtccctgatgcgcccgatgcgcgatgtcgcaccgctcgttctcctcgccacaggacttcccccattttagttcgaccttagaccttcatccgcctcatccaggctggagtcgtcgagtaggttgtccgctgctcacctcggtttcgcctttcgttgaagcttgactgcgccacaggttctcgccgcaccatgttctatttctacaacttgacacgcgggaagcttcgtgtctctacttctagtgacgcagtcgaggccacgcacactgtgtcgaccacagaggccgacctcaaactgtccatggagggcaacacaatcaccatcgctgctgagtcgcccggcaccgagttcatgaccaatgtgcaaaccatggacggacagaaccttgtcgtctacaagaagggaggggactacacgtggaactgggtcgaagcggagagaattgaggacttcctggactccatcctcgaggagtcggatcgggaacacttcgcggagctcatcatgaagagggctgacaggctggctatgctcgaactcgtaaagtcgtcctcaaaaaaaatacagtggtccagctacttgcacctcagcgactcaccaacgattcggggcaagatcgtggcggccatagggatcaatgatcaggtaggatcgggtaggatcaggtaggatcaggtagttgttgtactcccctgagcgtcccctaccctgctgcacagatcttaatggactactcaggggagatctacctcgagaacctcgaggacctcggcgacatcgacctcacctgcaaggagctgcccacgtgcatcaagcgcattcagaaggccacgctcgtgctcggcgacacactgcacatcaactcgcatgtcgcattcgacaacgtcacggtcaagtacaatttcagcaacaagagcgtgatcgtggtcaaggggggcgccggcaccgaagacatgcccgtcaccatgaaaaaagtgcgttttcagctcgacatcaacgtctcgacttcacgcgacccaagcgacgtcgaccttctcgacgtcgagagtcatgtcaccctggacacctgcgagctgtcgcgcagcacaggcggcggcgctctcgtgcacgacggcgggcagctgaaggcgactggcacgatgttcagcggcaataataagcacggtgtgacggtcagaggcgccggcagcaaggccgtcctcgaggagggctgcacgctgtcggagaacgagatgcgcggcgcgagcgtggaagacggcgggtgcctggcggcgactggcacgacgttcagcggcaacaagcgagacggcgtggatgtttgcggcagtgacagcaaggccgttctcgaggagggctgcaagctgttggacaattcgtttggcgcactcgtgctcagcggcgggcgcctagaggcgactggcacgacgttcagcggcaacaaggaagacggcgtgtgtgtcagtggcaaaggcagcacggccgtcctcgagaaggactgcaagctgtcggacaacaagtatggcgcgttcgtggacgacggcgggcacctggaggcgactggcacgacgttcagcggcaacaagctcgacggcacgtatgtcactggcgacggcagcacggccgtcctcaaggagggctgcaatctgtcggacaccaaggaggtcaacggcgcgttcgtggaagacggcgggcgcctggaggcgactggcacgacgttcagcggcaacaagattaacggtgtgacggtcagtggcactggcagcacggccgtcctcaaggagagctgcacgctgtcggagaacaagatgcgcggcgcgagcgtggaagacggcgggcacctggaggcgactggcatgacgttcagcggcaacaagttaaacggcgtgttttgcggcagtgacagcacggccgtcctcgggaaggactgcaagctgtcgaagaacaaggaacacggtgcggtcgtggtcagcggcgggcagctgaatgcgactggcacgacgttcagcggcaatgagaagcacggtgtgacagtcagtggcactgacagcaaggccgttctcgagaaggactgcacgctgtcggacaacgtcgtccacggcgctcgcgtgaaagacggcgggcgcctgcaggcgactggcacgacgttcagcggcaacaaagtattcggcgtggcggtcaagcacgccggcagcacggccgttctcgagaaggactgcacgctgtcggacaacgtcctccacggcgcttgcgtgaaagacggcgggcgcctgcaggcgaccggcacgacgttcagcggcaacaaagtattcggcgtggcggtcaagcacgccggcagcacggccgtccttagtggctgcacgctgtcggacaacgtcgtccacggcgctcgcgtgaaaaacggcgggcgcctgcaggcgactggcacgacgttcagcggcggtcaaggtttagtggtggccaaggacgccggcagcacgttcgtccttactggctgcatgggacgcaacgggacgattctcgcagacgcaactatggaggtagctgcgtcctaccaactggtgggtgacatgctgattccgagtgagagtggagatgcgccaaggtgacagatgaggtcgtgatggaacacgaggagcggagaacggctttcaacgacgcgctgggttcttgtggttgctctggttccgggcgctgacgggcctgacggggccgtgaggggacgatcgacggccctgatggggccgcgagggggcgctgacgggccgtgaggcgacgtggacgatcagggcctgatggggccgcgaggggacgatcaggggtcgcgaggggggcgctgacgggccgtgaggggacgatcaggggccgcgaggggacgatcaggggctgcgagtgccctcctatcttcattcgacaatgacctgacctacataaacctacatgcacccggtgcatgacttgtaaactgtcattcccgactctcaatgtccgtccgactcctagagagccagcgggtgcctcgcaagggtcttgccgtagatgacttcgccaaagagaggtccatcgacgatgccctcgcactcctcgccgtccccgggcacacgcgccacgagttcttgaactcacgagttcatactcggttgtacctcgattacgatgaggtccttgaaacgccgctgacaccggagatcctgaaggacaggaaggagaaggtcgtcgccatgctcgacgcgctcctcggacccttcgtcgcagaaaacactcaagtatcgtattccatcgccagccgacacggcttctccccgcgccacggcaagttcaaggtctccttccggccgttcgtccgcggcctctccatcccgtacacggagatcccgcggctcctccgatccactcagacctccgatcttccgagcttccaagacttctgggacatgtccatctacaaggacggcgagcagctcctcgccgcgatcaacggcatcaaggatcgcgacgacccgcgtgtcctgaccaaggaacatgcagacgacccggacgcctggtacgtcgcgcagatcctcgatgacgacgcgctgcccttccgcatgccagtcgaggagtctcaacgcccagagtctcaacgccgagaatctcaacgccgagagtcaaacgtcgacatcgtcctggtgcgcgacgtgctgacgtgcttgtcctccgaccgcttccgcgactacgagtcctggaggaccgtcggcttcgccctgaagtcattgggggactctacgcgggactacgcgggactcttccaggagttctcacgtattccagagtacgatagtaccgaggctcagggagcgtgccgcgagctcttcgaacgcgcctctacgaacggagtgactttcgggacgctgcggcactgggccaaggaggacgacgctgcgggctacgagcgggcgtgcgcggcgtacaagcaaagagaagtcacgtcacacgtcaagagagtccccgatgataaaatcatggacgccgcgcggatcctctacacgaagctcacttttagaccagcaccgatcgccagcgtcctgcgtcacgacgtcacaaaggccgtgttcgacgtccacgtcctcctcgacgacgtgaccgaggggcacctgaccatggccctggacacgctgcacgtcaggggagtcttccacggcgagacctttgagaaatacctgaacgacagcgaggccacggcgatcccggtcgtgggggtcgaaatagcgtcggttcacaaggatctgctacccgacctgcaatggcgcatcatgcgcccgacgggcacgcgagcagtcttctcgacagagaataacggagccatgatcgaggtcctgaacgtcaacagccctggcaaggaaacggccaacgtcaagttcgatctcaagaccgccgccatcaagaagggacagatgtccctcctgaacgatgcctacaagaaggccatccagaactcggtggtcaacgacatgaacatgggctgggccatcaacatcgccatcaacgggaccgtcaacatctacaacggtcaacccgaggagaaggaatcagcattcgacatcctccgacccatcttcctcaatcgggcccaggagcagcgcctgcggaagctcgatggcatcatctaccgacccgtccctcattgcccgtgtgcgtacgtatccttgtcgacgtatgctgacttcatcaatgactccctctcgggtcacgctgtctacgtctcgaatcccaagaggttcgaggaggcaatgaagtatctcacgaactaccgcgacgataaactgcccctcctcgtgcgcgacacgcacttgctttccttctcaaatggcgtcctcaacatccagacgcgagagttcatcgagtactcccttatctcgggcgactcttccggccagctctctggcaaagttgcgcggcatcacatcgacgctcgctacagtggcacaacggacacgcccctcctcgacatcatattggacgcgcagtttggcaaggaggtcgccgaggtcctctgcgcgttgttcgggcgggccatgttccgggtccgcgagctcgacaactgggaggtcatgccttacatcgtcggtgtgggaggcaccggcaagtcgctgctcctcaacgtcctccagcacatgttcgccccggaggctgtcggcagcctcgccgctaaacgcgaggtcatcttcggcatggccaacctcgtcgacaaggaggtcgtcatcggccgagatatgccagccaagctgtccgagagcctgccgcaggagatcatgcagtgcatgacaacgggcgagcagatggagatccctcggaagaccacgacggccctccacgttccctggagtgcccccgtcgtcatggccagcaaccacatgccggactatctgaataccgggaacaacgtggggcgccggctggtcgcgctctgcttcaacaacgtcgtcgccaacccccaggaagacctccagtcggcgatccttgcaggagagctcccgtcaatcatcgcgcggtccctggcctcctatgggaacctgcgcgcgagggtcaaggccgcggggtcgttctggaaggccatgccgccagaggttctcgagtggaggggcaaactctcggcggccacgaacacgctctacgagttcctcgccatggaggacgacgaacggacctcaccgtcgaccttcaagacttactcaatctccaacgttccgggacacgtcacatgggtgtcggacctcaagcacgccttcgaggactgcatgtcctccaaactccttctcgacgcagccacgctcgggacattcgggtaccgggcgtccggaggacgcgaacacgtctgcaagagctgcaagggaatcgcaaaggcccgtgggggacgctgctgcgatgcatatgatgtcaagaaccgcatcaagaaggaggttatcttcgacatgcgaattgtcaccatgtaaaactagggtgttgtaacaagtttcgttccaactctcatccgtcagctggcggaaaccccccttggtggtcgttttttgctccgcccgaaagcggagcaaaaacatgagcaccggggtggctccaacaaggagcacatcctcctgacgatccacggcttcaagcagctgtgcatgtcagccaacaccgagaaggggcgcagggtgcgcgagtactacatcagcatggaggaaatcttgtttgagtacacacggtgcaacgctgtgaaggagcgtgagcggttcaatgcgacgatcgaggaggctaagaaggaggccgaggaatccaacgcacttgcagcagccaaggaggcggagctcgcaaagatccgcaccaagatctacaaggagctccccaagctggacaacgtctacgtgaacaaggaggtggttgcgcctcaatggcgcctggccaagggccaagccgagctggccactgacgcgcacaaggtcggcaaggccattgatccgaagaagcgggaggttcgcgcacaagcgcgctcacgaagtgaagcgcagctcaacactggcagatgttggtatagcaccccaccctgatatctcatggaacaacgtaacatggaacaagctggggtgcctctcgcatttttaacgcataaaggatctgtaagttgtcggtaggaacatcatggatcctgtccgccccctcaagagtcacatttccgtgaagaggctggaggatatcaaggtcgctctgtcttgcaaggggtacacggcggcgcaagtcctcgaagtcgaggccgtcatctgccaggcgctcaactttgatccgaatgacaagcgattacttcaataccaacgcgaaaaggtccgcgagaaggcgaaacgcctgggcgtgagcactttcatcgcttctgggcacaagccaaccactcagaagcgacataaaggcagctctactcatatcgagtagacacgacaagacgatggaagtcacaggatggaagttgcagcggtgcaagatcgtaatcacgtgtccgccccttccaagttaggcaaagatgcggccacatgcatggccgtagggaccagactccatcgacaccaccagctgagcaccaaggcctgtcatacacacacaccgttccagctggatctggacgatccttacgaacacacaccgttccagcttccaggtgcgcgcacagagcccagaccgtgcaaggcttcgccagtcaatgtcaacggtcatggcaaccactgcaaagctgccgtttaccgctcaacaacctcgagagagcgctctgccccacgacaagccgagtcctgaccttgccttcccaatccccccgtaccaagcaggcaagagcacgctccaagatgcaatccactaggtgcataatgagtacgccaccatttgatggacatacacgctccaagacaaccttattcgtttctccaacgtgcccgtgccacacaacagagagggccgacccgcgcctcagccgcggcaaggaggctccgaactcagcacacctgctcaatcatcgctccctcgatgaccgttgcctgcagcggacgaggcggggttgggtcaagaaagactagacaattgcgcagaagcccggggttggacggggttgggtgatgtgttcccgagcactggtgcctggtgagctctgaggcaccgtttgctgtccgggtgtcctggtcttagaagtaaggttgccagcagcggttcatggcccatggcccatggatgcaggatccaacaccgtccctagcgagccgcgctgacgtctcgcttcctgcagcatcagcacccctccgtgcagccttgcttggggagcagccgctcagatgcggacgcaatggggccaagcgcttgctctgcagccaccacctcgtcacggcagaaggccgcacccctcggctgcacctgatccaccagccgaggccgacacccgcaatgagcgccacccccaacaggtgtagcatcctcctcctgcacctttgcgctggttctctcccccgtcttcttccaccgccccggcgcttgcacgcacgtcgcacacctgcccccttggcattacatagcggtgtggactggcgctgatattgctcatcgtttgtgttgcgcagtacaaggcgtcggtgcgtccttccgggcggggcggctagctacccaacgccctggcagcctttgacagccgccatcgccatcacacctctgccgccagcagcccctcagc

SEQ ID NO: 116 - DNA, 21986 bp, unidentified
  misc_feature 1..21986: note = Fanzor polypeptide
  source 1..21986: mol_type = other DNA
tgccagtaagtttcatttattctctgatattatcatgttctttgttacatctacaatcaaccaaacaaacaattccgcaacaaacttgcaatgacgcgaagaaaaacatcggcaaaacaacaccgtagacaacccacgacgcaaccaaccaaccaagtctcatgtacaaaccagtacacgagctattacttaaacaacttgctcaagtaatgtcagcgaccagttcactttcagcgccgcagccactgccttggcgccctcgtcgccgatattgttgcccgaaagactgtcgatttgattgaatgatggcaagcaatacattacacgttacatattacaatagatgcacgcatgcatgcatagacgtgagtgatctaggttgactttcagcatttatctttgttgtgttgtcattttgttctttgttcgatggatgtatactcactcaaacagacaactcatccatccatcaaacaaacaagcgattacataaacttgcaaaacaacaccgacccacccaccaaacaactaaccaagcctcgtgtacaaacaagtccacgagctgcggtgttgcgtagacaacttactatagtgatgccagcgaccggttctctttcagcgccgcagccactgccttgccgccctctgagccgatattgttgcttccaagactgtccatttgattgaatgatagcaagtaatacattacacgttacatattacaatagatgcacgcatgcatgcatggatgtgagtgatctaggttggctgtcaggatttatctttgttgtgttgacattttgctgtttgttggatggatgtgtactcactcaaacagacaaatcatccatccatcaaacaaacaagcgattgcataaacttgcaaaacaacaccgacccacccaccaaacaacaaaccaagcatcatgtacaaacaagtccacgagctgcggtgttgcgtagacaacttactcgagtgatgtcagcgaccggttctctttcagcgccgcagccactgccatggcgccctctgagccgatcttgttgtaggaaagactgtcgattcgattgaatatacattacacgttacatattacaatagatgcacgcatgcatgcatggacgtgagtgatctaggttggctttcagcatttatctttgttgtgttgtcattttactctttgttcgatggatgtatactcactcaaacagacaacccatccatccatcaaacaaacaagcgattgcataaacttgcaaaacaacaccgacccacccaccaaacaacaaaccaagcatcatgtacaaacaagtccacgagctgcggtgttgcgtagacaacttactcgagtgatgtcagcgaccggttctctttcagcgccgcagccactgccttggcgccctctgagccgatttggttgccttgaagactgtcgatttgattgaatgatggcaagcaatacattacacgttacatattacaatagatgcacgcatgcatgcatggacgtgagtgatctaggttggctttcagcatttatctttgttgtgttgtcattttgctctttgttcgatggatgtatactcactcaaacagacaactcatccatccatcacaacaaacacagcgattgcataaacttgcaaaacaacaccgacccacccaccaaacaacaaaccaagcatcatgtacaaacaaagtccacgagctgcggtgttgcgtagacaacttaccgaagtgatgtcagcgaccggttctctttcagcgccgcagccactgccttggcgccctctgagccgatatagttgccataaagactgttgatttgattgaatgatggcaagcaatacattacacgttacatattacaatagatgcacgcatgcatgcatagacgtgagtgatctaggttggcattcagcatttatctttgttgtgttgtcattttgctctttgttcgatggatgtatactcactcaaacagacaaatcatccatccatcaaacaaacaagcgattgcataaacttgcaaaacaacaccgacccacccaccaaacaacaaaccaagcatcatgtacaaacaagtccacgagctgcggtgttgcgtagacaacttactcgagtgatgtcagcgaccggttctctttcagcgccgcagccactgccttggcgccctctgagccgatttggttgcttccaagactgtcgatttgattgaatgatggcaagcaatacattacacgttacatattacaatagatgcacgcatgcatgcatggacgtgagtgatctagattggctttcagcatttatctttgttgtgttatcattttgctctttgttcgatgcatgtatactcactcaaacagacaacccatccatccatcaaacaaacaagcgattgcataaacttgcaaaacaacaccgacccacccaccaaacaacaaaccaagcatcatgtacaaacaagtccacgagctgcggtgttgcgtagacaacttactcgagtgatgtcagcgaccggttctctttcagcgccgcagccactgccttggcgccctctgagccgatttggttgccttgaagactgtcgatttgattgaatgatggcaagcaatacattacacgttacatattacaatagatgcacgcatgcatgcatggacgtgagtgatctaggttggctttcagcatttatctttgttgtgttgtcattttgctctttgttcgatggatgtatactcactcaaacagacaactcatccatccatcaaacaacaaacaaacaagcgattgcataaacttgcaaaacaacaccgacccacccaccaaacaacaaaccaagcatcatgtacaaacaagtccacgagctgcggtgttgcgtagacaacttactcgagtgatgtcagcgaccggttctctttcagcgccgcagccactgccttggcgccctctgagccgatttggttgccttgaagactgtcgatttgattgaatgatggcaagcaatacattacacgttacatattacaatagatgcacgcatgcatgcatggacgtgagtgatctaggttggctttcagcatttatctttgttgtgttatcattttgctctttgttcgatgcatgtatactcactcaaacagacaaatcatccatccatcaaacaaacaaacaaacaaacaaacaagcgattgcataaatttgcaaaacaacaccgacccacccaccaaacaacaaaccaagcatcatgtacaaacaagtccacgagctgcggtgttgcgtagacaacttacttgagtgatgtcagcgaccggttctctttcagcgccgcagccactgccttggcgccctctgagccgatattgttgcttccaagactgtcgatttgattgaatggtggcaagcaatacattacacgttacacattacaatagatgcacgcatgcatgcatggacgtgagtgatctaggttggatttcagcatttatctttgttgtgttgacattttgctctttgttcgatggatgtatactcactcaaacagacaacccatccatccatcaaacaaacaagcgattgcataaacttgcaaaacaacaccgacccacccaccaaacaacaaaccaagcatcatgtacaaacaagtccacgagctgcgatgttgcgtagacaacttacgatagtgatgtcagcgaccggttctctttcagcgccgcagccactgccttggcgccctctgagccgatcttgttgtaggaaagactgtcgattcgattgaatgatggcaagcaatacattacacgttacacattacaatagatgcacgcatgcatgcatggacgtgagtgatctaggttggatttcagcatttatctttgttgtgttgacattttgctctttgttcgatggatgtatactcactcaaacagacaacccatccatccatcaaacaaacaagcgattgcataaacttgcaaaccaacaccgacccacccaccaaacaacaaaccaagcatcatgtacaaacaagtccacgagctgcggtgttgcgtacacaacttacttgagtgatgtcagcgaccggttctctttcagcgccgcagccactgccttggcgccctctgagccgatcttgttgtaggaaagactgtcgattcgattgaatatacattacacgttacatattacaatagatgcacgcatgcatgcatggacgtgagtgatctaggttggctttcagcatttatctttgttgtgttgtcattttactctttgttcgatggatgtatactcactcaaacagacaacccatccatccatcaaacaaacaagcgattgcataaacttgcaaaacaacaccgacccacccaccaaacaacaaaccaagcatcatgtacaaacaagtccacgagctgcggtgttgcgtacacaacttacttgagtgatgtcagcgaccggttctctttcagcgccgcagccactgccttggcgccctctgagccgatattgttgcgttcaagactgtcgatttgattgaatgatggcaagcaatacattacacgttacatattacaatagatgcacgcatgcatgcatggatgtgagtgatctaggttggctttcagcatttatctttgttgtgttgtcattttgctctttgttcgatggatgtatactcactcaaacagacaactcatccatccatcaaacaaacaagcgattgcataaacttgcaaaacaacaccgacccacccaccaaacaacaaaccaagcatcatgttcaaacaagtccacgagctgcggtgttgcgtagacaacttactcaagtgatgtcagcgaccggttctctttcagcgccgcacccactgccttggcgccctctgagccgattttgttgcttccaagactgtcgatttgattgaatgatagcaagcaatacattacacgttacatattacaatagatgcacgcatgcatgcatggacgtgagtgatctagattggctttcagcatttatctttgttgtgttgtcattttgctctttgttcgatggatgtatactcactcaaacagacaacccatccatccatcaaacaaacaagcgattgcataaacttgcaaacaacaccgacccacccaccaaacaacaaaccaagcatcatgtacaaacaagtccacgagctgcggtgttgcgtagacaacttactcaagtgatgtcagcgaccggttctctttcagcgccgcagccactgcctcggcgccctctgagccgatattgttgccgtcaagactgtcgattcgattgaatgatggcaagcaatacattacacgttacatattacaatagatgcacgcatgcatgcatggacgtgagtgatctaggttggctttcagcatttatctttgttgtgttgtcattttgctctttgttcgatggatgtatactcactcaaacagacaactcatccatccatcaaacaaacaagcgattgcataaacttgcaaaacaacaccgacccacccaccaaacaacaaaccaagcatcatgtacaaacaagtccatgcgctgcgatgttgcgtagacaacttactcaagtgatgtcagcgaccggttctctttcagcgccgcagccactgccttggcgccctctgagccgacattgttgcttctaagactgtcgatttgattgaatgatggcaagcaatacgttacacgttacatattacaatagatgcacgcatgcattcatggacgtgagtgatctaggttggctttcattatttatctttgttgtgttgtcattttgctctttgttcgatggatatatactcactcaaacatacaactcatccatccatcaaacaaacaagcgattgcataaacttgcaaaacaacaccgacccacccaccaaacaacaaatcaagcatcatgtacaaacaagtccacgagctgcggtgttgcatagacaacttaccgaagtgatatcagcgaccggttctctttcagcgccgcagccactgccttggcgccctctgagccgattttgttgttaccaagactgtcgatttgattgaatgatggcaagcaatacattacacgttacatattacaatagatgcacgcatgcatgcatggacgtgagtgatctaggttggctttcagcatttatctttgttgtgttgtcattttgctctttgttcgatggatgtatactcactcaaacagacaactcatccatccatcaaacaaacaagcgattgcataaacttgcaaaacaacaccgacccacccaccaaacaacaaaccaagcatcatgtacaaacaagtccacgagctgcggtgttgcgtagacaacttactcaagtgatgtcagcgaccggttctctttcagcgccgcagccactgccttggcgccctcgtcgccgatattgttgccgtcaagactgtcgatttgattgaatgatggcaagcaatacattacacgttacatattacaatagatgcacgcatgcattcatggacgtgagtgatctaagttggctttcagcatttatctttgttgtgttgtcatttgctctttgttcgatagatgtatactcactcaaacagacaacccatccatccatcaaacaaacaagcgattgtataaacttgcaaaacaacaccgacccacccactaaacaacaaaccaagcatcatgtacaaacaagtccacgaactgcggtgttgcgtagacaacttacttgagtgatgtcagcgaccggttctctttcagcgccgcagccactgccttgccgccctctgagccgatatagttgtaggaaagactgtcggtttgattgaatgatggcaagcaatacattacacgttacacattacaatagatgcacgcatgcatgcatggacgtgagtgatctaggttggctttcagcatttatctttgttgtgttgtcattttgctctttgttcagagcataatcaagcaagcaagcaagcaagcaagcaagcaagcaagcaagcaagcaagcaagcaagcaagcaagcaagcaagcaagcaagcaagcaagcaagcaagcaagcaagcaagcaagcaagcaagcaagcaagcaagcaagcaagcaagcaagcaagcaagcaagcaagcaagcaagcaagcaagcaagcaagcaagcaagcaagcaagcaagcaagcaagcaagcaagcaagcaagcaagcaagcaagcaagcaagcaagcaagcaagcaagcaagcaagcaagcaagcaagcaagcaagcaagcaagcgagcaagcaagcaagcaagcaagcaagcaagcaagcaagcaagcaagcaagcaagcaagcaagcaagcaagcgagcaagcaagcaagcaagcaagcaagcaagcaagcgagcgagcaagcaagcaagcaagcaagcaagcaagcaagcaagcaagcaagcaagcaagcaagcaagcaagcaagcaagcaagcaagcaagcaagcaagcaagcgagcaagcaagcaagcaagcaagcaagcaagcaaacaagcaagcgaacgagcgaacgagagtaccatgttaacttactccattgttgtagcgcgctgttcaagagcggcaacaattcttgggtagtctgacatcgtgcagtaaggaaagatctagacttcaaccagcgggcgcgtgcgtgtacgttctcagctaagctcgtggcgcaggcccagtcgttgcagaaggtttcgaacctgctagatgtgaagctgcaaggccatgacagggttgcaaggtagcgtgcacacgtgctggcttaatgagttgctatggttttccctaagatacagatgttacttagtgctcttgaaataaaaaggtattttactaacttgatcctaactctacctaacaagccatgctggcgtccttccttgcaagtcctattatcacttgttcgataggctaagcactagaagatcttttccagtaatgtttgctccagaggttccactaccaccatctcataggactacctagtcatagaactaactagtatctgacaatcaaactaatatttataaaggcatcatatatcctttccaaagcactttcgaccataccacgcaggtaacacctcatttgcactgagtgtcaactgaccttcatacccactgctagcccatgcttaggctttattgacgtaatatacacttaacttaagttgacctaaatcttctatccgacactccactggattcaacatgatacattcatcctgcctgtatccgaaagatccgaaatttcaataacataaatatcatcattgttgaactacctctgcgcgctaagctaatctgcaataggcttaattaataattggccaaaaattcacttttgttcggtctgacggtgggtaacctataagtacaagttcaattttgtcaggagaaattactcttcaaaggcctgtcagctgatattagagaacttaaatcacaagaaagacctaattttagtctttcgaggttgctgctctcttagggcctgtcgattgacacgcatgcaaaagtaggattttgagccactctctaagagggtctgtcaaatggcaggccttcagtgataaggcagattatataaaagtacttgaggaaggtttggccctaagataagaaaaacgttgggcagattggccctgagaggtctagaaaggttttgtaaaaaagctcctgaatgaggttaggccctaagagaagaaagaatttatgcaagtcggccttaagagatctagaaaagtcatgcagcttacttctcagcaagctttggcctggggggactcaaaaatgttaaagctaagaaactttcctcggcgaatacaaattttgtgtagtttgtgataaaaggtttttaaacaacctatccccgtatgcaagatctgcaactccgtgtttaaagcaccaccctgtcctaattgtttaaaacgcgcagacgcttgggttgtaaagactgtggaaagcttatgaacgaaatatgcgaagcatgtggtattgactgagaagcttctcctagatgcgtcgaaataactaccgaacttgtccatttaaatgaataacaagtagattttttgtcctgtattgtattatttgttccaactttatcctatgatgagagggttgatttgaaaacaatatcccgctacgtgtagctactttgtatgtgtgattattgctactttaactaatgcgtagttttccttcttcaagtacaccctcactgatcaattttttctgtatagggctcggtgccatgtaaactagctccaatcacagtttttaaagtcacccagcccttagatacgcctcttcttcttcatattattattattattatttctttaaaaatagatataattttaaaaaaacgtataaaattctcctacgcggaatcgaaccacggttgtcagagtcagagtctgacatgctgccattacatcacaggagaattaacttcgatctgggtggattacagagtatatttatttccaaacttagaaacgataccctcaattacatttttttaaaaagaagaaaaagaccacaacatctaggttgagcgagttgaatctttttccgaatcatcttctacaacccaagaatcatttcataacctatcaatacacagatacccacgaaactcatcattatttcgttgattttgtgaagaaaaagtaagcattgaaaatggcttttaagtttaaaaagctactgtgagtgggactcgaacccacgccctttcggaccacggccttaacgtggcaccttaaccgctcggtcatcacagcttgatggatgaggtacgaagtgagtacaatataaaaactgcacataactttaatctgggaacttcagtatgacaaaaaccgttaaaatttcgataacttatatttcgatgtgcttgtttcatattaattatatattatacttagttagatctttaataagaagtggaggttaggtaagaaaatggggaggccaaggaaccgccaagctccaaacactgcaagtggagcaaacctcgaatacaaaccagcaaagttctttcaccggaagtttggggtctcagcaagcgcccttcggggctgggccgatggcggacgcgtgcgctgcgcgcgcttccccggaggcaagcgcatctacgcctgcgacgatgttgagcgcatctttgattgcggttccaccggccgcgagcaacgcagctctggatgtaccgttatctacgccagagtgtcctcggccaagcaaaaggaggacctcgaacgccaggttggcgatctccagcgcgcctacccagatgcttccgccgtctacaaagacatcggtagcggggtcaatttcaaacgccaaggcctgtgctccctactggacgcctgtgaccgcggcggaatcggccaagttgtggtcatgcaccgcgaccgacttgcgcgaatcgcagtcgacctcctggaacaccttttcgaaagaaaaaatgtcaaagtcgtggtacacggccaagatgcacatgccggagacgcagacaccttcaccaaagacctcctcggaatcatcaccgtctttgtggcatcgcatcacggaaaacgagcagcgcaaaatagacggcgacgacgcagcgaggaagaagcgagctcgcacgaaggcgcgcaagaccatcaagaaagaatatgaccttgtccgtgccaaaaaggtcagggtataccctactaaagatcagcgtacacagttgcttaaatggtttggtgtcactagaagagcctacaatactggcgttgcgtttcaccgagacgtggcgaagggcgagaaagaagccatcaaattgcatcaagaagcgtgcatcaaaaaggattccaagacgaagcaggttttagtagatgaagatgggaatccccaaacgtatggtgccctctatggagaaaagaaagccgttcgatctaaagaaaggcatgatgctcctgaatgggttctcgaggtcccacaggttatccgtgattccgggattctggatttcttcaaggctcttaactctggacgagccaaaaacgaagaactcgctgtacaaaagaaagttcatgagcaatctttttataagtttcggaccaagcgtgatgaatcacagattttcgaagtgaacgcacgtatctggaatacggagaaatcaaagaccaccagctttctaaaagagtttcgtacgcacaaagaaaagttccccagtcagattaagaacgccatgcgtgtgcaaatgaatcgccttgggcatgtgtacttctgcttcttacgagaagaagaaaagcgtccaatggaccaggcacccaaggcgcaccacagtgtcattgctctagatccaggtgttcgctcgtttcagacgatgtatgatgctgatggccgcgccattgaatggggcacagggaaagattttagaaccatattctatctctgtcgccgcgttgataagatccaaagcaggattgataaagctcaagaaaataaaaagaaaactgcatacgatttcaacacccccttgaagcgcgccttctatcgcgcccaactcaagatcaagaacaagatcactgagattcaccgcaagctcgcgctttggctttgtgaaaactatcgtgttattctcttgcctaaattcgaaacctctaagatgagcaggaggatggagcgacggatatccaagaagtctgttcgaatgatgtgtcgttggtcccattttgggttccgccaggctctcattcataaggctgagatgttcccgtggtgcaagcttgttctttgccaagagagctacacttcaaaaacatgcaatgagtgcggtaccctccaccataaactcggggcatccaaggttttccaatgccctaatctcaagtgcaaccatgtagcagaccgtgatgtccatgccgcaagaggcatccttttacgctacctatccaaggacatgatttaaaaaaaatcatttcattgagtcgcgggttagtctaactagtccgtgatggagtcttagctccttctatgaaatgcaagttttgcaaattttgtagtttaacatctaagagtcacaaaagcctgctgcaataattttcagtaggcacaatcgctaacgattttcgatattattttcttcctttttatttcactgctgtttttttaattttaagtttttaatgaaggttcttgaaaaagtaagacagcaaggccagtaatctatcatccaaaacctcaaaggaatatctcggattctaaaacaagacttgccgcttagttcgccttccccaaagttccaaaccctgcgcaacctcctacactcctccaacatgaacctgcgtcagaggtagtgttttcgagttgaaattgttcaaattagggtaaggtttgtatttaaaaaaagaaaaattctaaatgaaaaaattagttcccaatgaggggatcgaaccctcgaccatttgattaagagtcaaacgctctaccgctgagctaaccgggattcctaagagaggacactggagatttgatgctcctatttcccaatacaatctctgatgggttgtttgcatatataaacacttatacaagtaactattttctcaaataaaaaacttttaagagaacataacttttatgagccacacagaaaaccaaggagtttaagtgtgaaggaactcccggtcttgcatggacagggttaattaatcgaccaagttcgccttgagagaagtcgtttgccggtgtcttggtggctgaaaagtacgcacaagttgatttggtagctggcacatagaatatattttgaagctgtaaaggagtgaagggtcaactaattgatactcctgttaaatgggattatgcgtgcattaatgataatcatagagaaagagagaaagaagcttcattctcgatgtgatagaagtagaaggttaatgtatataggttgactatgtctgtcaaaatattgtatgattgaaaaataatcataacgtcattatataccacgttcgttgcaaacaaaattaaggttaagcttataagcgcaccatcagctgcttaaatgcacctttaattcttacaaagatcttgtctatcaacttctgaagatttaagcaaactcttctgggggtataatccacaaccttaggtattctccgtttgattcatctagaaatgtgaaattttagctatagatagctgctgatcccaacactcataatggttttcgaattttcatgatagagtgcgttttgaacgacaaatcataagttaacagtggatgagactataatattcgcagtttatatgagctgaaatgccctgttgctgggaaaagggctagtatgcaactgttatctctcttatgaatcctagtggtcatttcttagaaagtcttcttattggtggttctttagttcaatacataatttgcaccttgcaaaataagatttcgaaaataacatacagggttattactccgttaagtttatctctaaagtaacatcagacggcatcaatggtctgaaaagcaaacaaatacagattccaaggtcttggcttacgttataagaaagtgctggccgttaaagtagattttgcaagtagtggagcgggcaagacatacatgataattggctacttcccatgaatacaagtagataaatatgaaccaaaaattcaaactgtatcagctgtacaatccatccatttttagaatgttctgctagtctcacactcgttgaattcacatatatacttcaaaatccgatcaataatttgctctgccatactgaaaatagccatcatactaagcaagctcaatgatacgctattttacatgccaaataaatcattatgacaacttatgaactcaattaacatttagatgttttacagaggggtttctcatagacaactatctgcttggtttattgaaggataaatctaacctaatacaacgtattgacttcattttacagctgcgaggtcctttactattattattttttatatatctaagaacgatctcagaaagggctcgcttaactcgacgaggacacatggtgcgagtgcggttcaaagttattcagggttttgcgctcgatataactgttgagtacgggaacagacttgacggaataatccctagataatcgactcagcttaaagctcaactccctttgtgagattctatcatttgttacctcaagagagcatcattttaataaaacaatcccctaatacttcaattttggaaatcaagttgaaaggaaagtatcttcactgtccttactgtttcctccactctaagctctcattaattatgacttgttaatatcaacaagatcacttgcaagtttgggatttcctctaattgtcgtcaggagttactgagtccaaggtttatgctaaaattacaaaagtagtacctctaacaaataaaaacgggagtcccggaatttgttcaataaataagctggactgcatgctgacttgcgaagtcttacttcactcgtgcttagaatgactttgagttaatagatgaaatgttctagaaaagtgttctcttccaaatctaaatcaagcaagagtcaaacatgtaatttctgcaaagcaattgaacttggtattttggcctctttatcctggctagtttactcaaatatgaatatgctaataaacgattgagctctatctcactttacttcacggaactggagatttgtatttaaaattaacaagccaaattctagcacgtctcaaattgtaatttctctagactctgaattatttagaagagtgatgcatacgagccttagttcatgtcatcttagtggttgctaaagatggattttcgtcttttgaactcttcaggcgaggatctgtactattgatgccccagctactcagattgcagataagctcaaaggggggctaggacttcattatattcgtatcagctaaaattcagaagctgctgtgagaggttgctcaaattggttgctttccttgaataattattcatttatgaagcatctaagtctctaggccaatagctgaaaaccaggaaatacttctatatccaaaatccctctgatttacttgtctaatatggcgttatttcgattgtccaagcgcagaaacctaattgctaaggttcgcaaaaattgttgagaacagtctggtattactttcaatgttattgtaaatttaaaattggaatcatactaatgtgcaactattaaacattattgtatataccttgtgaggaggcccagtggtagtagacttaattattttcagtggaagtagaggaaagtcatcactgtgtgttcttgctaaaaccagtaacagatttcataaagcgttttagctttaaagctaaatgtcatttcacgcccccacagttcaatccaaaatacatatcagaaaattcgccaacacaataattttgtgaggagaagtagaattttaccccaaatctctctgcctgtttccctctcccttctgcaagagcatggaagatttgccgctactacaactagtaatatgataagtaggaatcactcagtgtgggaacgtggcgcttttaaagcatggtttcgtcactttgcacttctttctgacgtgatgagcagcttgttttctcgagattgggacgtccaagagcgacgaggaacaagagcacgcctgtttgggagtcatggaataacgatgcgaggaggtcgtatgtacagagaaacgcggtggagagcgacagagcgggttggggcagcaaaactcaatcaacaacgagcaagtgaggtaggtgaaagagggaggaaagagggacaaggagaagtaaaacgatgatgcgaggactcggaatacaggccgggccagtctgcgtgggcgagctgacctcgaaactgtctctgctgacaaacctgccaaaaccacgcatggcaaggaacgaggtgcttattaaggtgcagtgtgttgggattggcattgacgaaattcatgctgcggaaggctcgttccttggaattatcagcagccagccccgacgaatctctgtagaaagccctctaattcctggtcttgagtgttgcggcatcattgaggatcgcggatccgacgtcccggcacaatttaaggttggagatgctgtcttggggtttcaaaaaccaatggatcgtctccaaggaacgtgggccgaatatgctataatcccggcggatttttgtttgatgcataagccagaagagcaaacagcgcaagaagccttggcaagtttcttctctggtcttgttgcatgcgcagcgttagacgtatcccggcctgtaatggagcgtgctgagcgtccacgcatccttgtttgtggggcatcgggtagtatcggaacgcttgccttgcagggtgttcggcacctttggccaaactgcgcagacgtctttggggtttgtagctctcgtagcgcatcgcttgccactactgctggtgcctctgaggtcgttgcatatgaccaggtgcctgaatggggcatggatccccgcgtgcgtggaaaagttgatgttgtgattgatctcgttggtggcgatcagtccgagactcaggcgggccacgcattacgtcgcggcggcaagtttgtcacaatggttggacccgttcaattcctaggagacaagaaatcttccatgtgggagtttttcatgtgggcttgtaaagtaggtctcaaatttgtaccacgtttatctcgccattacgaatacaatctgagtgatgtaggtagtcatatgcctggagctttgacgacatggcgagcacttgcgcatgaaaatgtatttcatccgcgtattcaagaagcaatctccatgaatgacgttgatgccgtctgtgcagcgattcagcgtgtacgtaaacacggaaaccagggaaaagtcatcatcaacgtagtggaataaagcatactactgtttgaggaccaatatatatctggctcggttgataaaataccacatggatataatctcaataccacaaaaagtctgttccatgagcttgcgcatataagcgctagataatccctttccctttaaaattatgtttttacttgctgctttctctcatatttccggggattcggtgaatatcaggatttttacacatgcatattgctggaagtctccttcaatcaagttggtttcattatttggacgcctccacacgttctggtaagtcagtgagttgactgtttagatgaagtattttttaagatgaacatttggattccctgggaaagaaattataggttggactgcttcatggtataattagataattaaggcagacttgatcagagtaacacacaattgaggagattaagttaactcagttcctcaaccactaattcatgtcatccatattcattcttttatacatatataaataaatcgtttatagttttttatcttaattattaaggatctgcaataatgcgccagagactctgacatgtttagcccacatagtcctttaatcggggatctctgcatctatgttgctaaaacaaaacgaaacccaaggctatagataatgaccaggcaaaacaggtggaggtgaaaacctaaaaatggaaactgacttatcgcttttaaaatccctagatttacaatttcgacaatcaagtgatggtgttagtactttatatcatggtcaatatacgattaaagtcgtttagtagatcggtggctatgctatggtgcttgttgcgactgttgagtgatgcttcagatggagacacgaatgtattggcttgtttttagcgcttgcttcaaacaatttaaagtcttacttatgttgtagtaacaaatagaactgactggagaagatgcactgtatgaatcgtcttctctcccgtgattcgacaaattcattgtgcgtgcaaatagttcatttgattctttttttaaaatctcccatgataagaataagaatacaaaaacaaataaagagagagacaaagaaaaagggagagaacaacctaaaacaaaatctagcagtgactatgcctcggagaagaagagatctccagatcggggcatttctttgattcacaagcaatccttgaacagcaggtattttggagaaataaatgcatgataactaacgaaagcataagctagccgtcaagcttaactatgagactggtgctcccttgcacgcatgcttctcaaggctatgcccttcgttattttggcactcttcgtgtggatactcattgtgccgatgctgcgcaaagagcatgtaaatggaggaagaaaggccaaatttggtctcgctaatttctctggattccgagccttaatagacactgtgaatagttacaagccattgcaatgcccggtcacctttaaatcgatcctgagatttcagccatacagtaaactagaatgttgtcacagacatattcacattctcaaagacctcctctatttacactacctactgtgttggtgtaagagagggttactgtaagagccgagtacgaagatacaaaaaaagagacattaccgcaaacatagaataggaaagtccgtgaatccaacattcttggttaggtacactcctaaatttgtgtttgtgtacatgtcgcgctcctacgaactctcgcgtgtaggattgcacttcattcgccttagaaactcccgcgttctgtaggcacgatgctgctgtaattcctcctttgtatttattcttcttgcgcccatagtaaggtcaatgaagggcgtttttgattgataagagtgcacgataatgaaaaggcattttgttcaagacaatgaagctttagtgtctcacgtatggtcttttggtttccactgtccggttcccttttccctgcctgctattctcccccccccgccactcaacttccaaagctacctatcaaagtgaatcagcagacagaagaccctaatgtggccaattgagtttcaaaagaagtggatcctcttgataaagaaaccaccgatcgaaagattatcccttcaacgagaaggacttccatgttgcccacaaatttgccagagaactccgcatctaataagtccattcctcatcagaaagatacgtcttcaaggaacgctaagctcgcggaaaggaggagaacatacgtaagcagctgttgtttcaggcttggatgatctgagacaacaccgcagagcagagaacagctcagctcacagccgtgagattagtgctggtgacaaatatattccagagggtgttgaccaccccacacagagaacgacaacaataatcattatagccacagaaagacaaacttgaggagatcgaaccatgcgaagacgttcttctttttctccttttgtatcggtcgccattgtgctccagtggcggagttccttaaggagccatctctcgttaattatagtaaatgttgttgttgccatcaacagcagcaggcttccaaagagcaccaacagaaagatgaatcgcaaagaggatgcatctctcactagcagcatcaaaaattacgttgcaactaatgaaaacacacgtcgaatttctacagagaaagtcaaatgttaatgttgattggctgctcctccacgtaggcagtctaccaaggttgggtttgggcattgcgcactcaaccaatcgattatagaactagtgtagaacatagctctacagaatgaattcgatgctcaggtatgtttgttgttaattgtcaatttcaagagggacaaattaaacaaagaagggcaatgtcaaatgttcacatacatatacatacatccaaaggacagcatgatttattaagcaactgatcgactcccttgtctgattcagtcttttgtgcttttcagtatctgcaaagtatcttgctcacacaacttatcctgttgtttatgtatgtggtacttgcttgcttctggtttatcccttttcatttcataccaatatagctctactagtccggaattccgactctgcctatctatctctctatcgatcaacttgactatcgagctacttttagtaccaccctatatattttgatgagcagcagataactagtacctaggcatttaactagaagatctggtaggacagcgacgaattgttacggagattcgggagaggtttgttctgttctgttctgtcgcggacctcccttggcccacggcaggcagtctgccgccttggttcgccctgtaagcgactctaacatgggtacactttcaaggccttattggcttcgatttttttgtagtatctgttctatagctaatgaaatagctatttccctccaaaaggagggaaagtatttcatagtacttttcacccttgctgcgagggcgccagcttgctggtccccgcagcctggatggccgtggcctcacacaactagccgcgagacgtccttccgccacttccacaagggtagggttagggttccatggaatccggcgcgtctggggcgccggcatggcgcttgagcagcttggtcaagttagacctagagatatggtagtccccgacgaagagagtggcctcgttgttggcatgatggttgttagcaatgtggacttgggtaaatccggatctttcgaggtgaaagagtgcgcgggccatcagcgcggaccagatacaggagcggtctgccttggcgcgtatagatccttggtaattttccacaagtatcttggacaactcgtgaatgatccagcgctgcgggtctctgtcgcagaaagggtcattctggtccagctggaaccgtttgtggtagtgcacgatgaagtccagatcctcgtggaagaggatggcagcgcgatgtttgacgcgggagcgcagcgtcgactcattgatggcgttgcgatctgagttggataccttggccatttggtagttctcgagactctccaagaaccatgccgcatccttaagcggcaaaattccgttgatgtcatcttgtcccagcgagtctgccatgtcgctgatttctggttcggcattcatgaaccaggcacgatcaacctttgacaacaggtcgtctggatcttgttcgtcctcctcgcgtcgtgacgtcggcgatccatgtgtggcaggacccattgagtcggtgggactgagttggttttgttgctggatttgctgctgctggtgcatttgctggatttgctggagatgctgctgctggatttgctgaagctggtgttgttggtgcatttgttgcaaaagaagctgttgctggtgcgcggccatcacagcattcatgtccaggtacggtggagtcgcgcctgttcgtacgctcgaaaatcccgctggtcccgactggctgcctctgttggtattcttgtcattgttcttgacacttccagcatccttgtccttgttcttgcttctttcatcctcaacgcgttcatcttgttcttcctcctcgctcttgttcttgcccttttggcctgcactaccgtcgctgtttccacgaaagaggccgctgtgcgttgtgacctcccgaaagagcgctgtctcctctcgctgcggttgatgatgcggcatgtgctggggcatcagagcgtgcatggcggccgccatttgcgcgctgtttacaagctccggtgacgctcgatgcggatgctgctgccgctgcagagacgaggtcgatgaagatcggcgtcctggttgaaaaagcattgcaggaaatgtaggggtggcatttgcaccaggacccaccggcggcatggtgaaaccttgcgtagaggcttgaatagatctcaacgtaggagtggaggaggacgtcgacgacgaagaagacgaacttgacagagatgttgaggatgccgatgccggtgcaaggccagttgctgacgacgaaggcgacgaggactttgacttcgctgcagctgccacggcagccgcaagccagccctcgtgtgctgcgacac

SEQ ID NO: 117 - DNA, 21845 bp, unidentified
  misc_feature 1..21845: note = Fanzor polypeptide
  source 1..21845: mol_type = other DNA
tgccacccccaccatacccttcaactcgagcagcctgtgagctgtgtcgataagtcagccagtcagcaatctaagaacgacacggcgaacactgcctcgagcacgacttggcctttctttatacaggcgacacagaattgcagtcagagtcactcccagcgccattccatctcacgttgcatcacctgcacccacgacagtctagtgaagaagcggcgagctggcagtaggcttaggcaacaagtcgagcaggcgagtggcggcctagctcgcggtggccaagaagaattcgtacaccttcctgccgcgacgctcttggtgcctgagatcgctgcgttgcgcgttcattaacttgaaaagaagagcgaaagagcaaaagaaagctctatcaaaaagaacaaacaccaaaaaacaatcaaatccaatcccaatcccaattccagctctgggaggatacgaagttggtccttaaaaggcacagaactggcgaaacggtgcggagcgaggtctgtctgcggcaggcagcctgtgggactttgtgggctgtgagttgtattctgcaaagaaggacagatacaacaagcgagggagggagctcatcctttgtacgacgtggacaaaatagcttgaggaccacgaaggtggataccttgtttggagacaagtttgcgcacaggaactgcctgctggaggtgactaagaagagcaaacctctgcattgacttgggcaagactgtgctgcgtgagcgacctgtgcagcgaaaagcaatagcttcaagattaagtggagctgggcctgaactggcctcgatcgatcgatcgatcgtgctcagaaaatagaaccgccagtctctctgcctgctcttgtggcatcaccggcgccctgagttgctgccggtcttcttcagtcctgatttatctccgtctttgttggacttcgctgtcgtcgctcctcgttatctttgtgacgagcttgggaccgaacacctggaggggctgactgtaaaatcaggtccgaagctgtcagaatccgcagttcttttgcaagtacgtaaggccactcttctccgttaagaaaagaggacagcagtcatagggagcgagtctttggcagtctgtacctgtgcccattcaccacacccgatctttagatctcctcctgagttgattcattccttgatttcgttgaattacattcgctccacttcatttagccattctaccaaattgattgtcagtattacctgagcgatagctaggtaccttggtagtcgaatcaataggagtccggtaattggagcaagccacggaggtgtcgaggtaggagtactactacgtctacatagaggtaaacagatataggagccaacaccatctaagtaaaataggctagttcggatcgatctggttacagggaagacgtcaagagcactggcgaaggtcgcggagcggacctggacatcaagattcgaaagcatatctagggaaacctcttttcagtcgattagtgttgatcttctggctgagcagaactggtttgtgtgcagaaaatcgttcaagtggaagacattggggacttgtgtgggagaaggactggcgtgaacggttactctgaagtggtaccgattgaagtatcgccgcctcaagtgtgtgctgctgtttataaaaaagggagaatcgctggacctggtggaggttttgacttcttactgcgtgcggaaaagagtcgcggtgaaagcaaacgcgtggcgttgtgatttgcacgtggacaggcgcgagtgagcgtgcctctaaagcgtgacgctttaccgggagcttatcaagttcgccccaatccatgtgccaccgcacgtgtaatatcgaggaaagagcattgatatggcgcaacagataatgcgagaaacacaatcttgcggtgtgaacctgcaagataaagtcgaccaagagcaagataatcctaactgcaaagaaagggacaagggaacttgcaagtatcatagccaccgggacaaggtaaaaggaatttcagaccaaaccgttcaagacggccaagcttttgaacaaaaccgagcggtgcgcaagcagccagtgctgcagcgccgtcttggatcagaaaaccaagagccaaagaagaaaatgggtaggaaaaggttctctacaccacgttggcgtcgtgctgtgccacggcatttgcagagcgtcacgagccaagactcagaagacggcagcgatgttcttttgcctgggccctcgcgactcgaggaaattatgcgtgcatcaacgtccatgagagatttactcttatgtgcactcgctccagagaatggactcacggaaaatgaaagtcaagaagtcatcaacaccctgctcttcaccacgcgacctattacgatggttgcctggctcattgaactagcgcactcacatccgtgggaggataatgctacaattttcgtccatggaactcgcgaactagagtcccctcaacaggttgctctcttcattctcattgaatggcttgatcattgggatgctgctaccgagttggaaatattccctgcattatatgcacaagccatcgaggttattgattcttgtgaccacgatcgtaccacagtgcttgggcagtctgttgcaacaaagctcgatgaggctgccagaagggttgttacatccttaccttctcaagaagaaggcgctgaaggtactctcggacaaccacaagatgaccccttttttgcagacgaagaagatccaggcccatatctcatgcctgcaggatcctcagagaattgcgaggctgagctgatgggatttttggatgaagaagtcgcacgccgaaatagtgcttgctggtttggtttatcaagcgcggaatttgcagcacagcgcctcactgcagagcgtagagggtcggttgcttcatgggcgtcggcacaatccttggaatcagcacattctaacacatcgtcagtctcccaccgacgtcttaaatcttttcgctcattgctgtcaatttttcgctctcgtgccgatagcaacaatagcctgcaagttgaacttatggcacatgattttcgacaaggtcttgtatctcgactcttcaaattatcgcccaatgaggtggcgatccaactaacattgctggtgcatgactgcatattcacggaagtaaaactctacgagcttggcagagccgtacgagccggtcgcatacgcgctaccatgtgcccaaatttacaacgcatggtcagtgtttttgaggtgattgcttcctgggttgaactcgaagttttagcacatgcaaaccggagttcgtcgagtcggatccgggccatatcattctttctccgcattgctgctgcctgccgtgaacaacggagttttcatctactttttgcaatcgtggcgggacttgggcagacaacgttgtcgtgggtttggcagcatacgcctgctcgagagcgtgctgctttcgaaaagttgcaacgcgccgtttcccctcggcagaattacctcgtttatcgtgccgatttgtccaaaagccctgtgccgcgtgtacaaccgtgtggcacaggctgcatgccatttcttggcatttggctcaaagatgccagtgtcatgctagaaattcgaggtggagatggcagtcgagacgcattgtccctgtattctgcttattccctggccaaggagctcttagcatgtcagcactccttcacaagttgtcaccgtgatgactcgattcgagaacttttaagttctctccttcaatcgaccaccattaataacgaattccgtaaccaactatcattcactgagcatcgtcgatctagtcctcgtctcacaacgatgctttctcgccgtggattttccactcctgaggcagccttgccctagtagaaaatcggaggaagccacaatctacttggctctgtgttgtgagtgagtgcacaccttttcctcaggtgcgttttggaggaactaaagtgaataggatcgttgaatcccaaatttgtatttcaacaatgtgtttataacaagcatttaagcatggtttctgatcaggcatgctagaagccaccagcaaagggaactaagtatctacgtacttccatcaaatacgtgctgacgccaaaatattttggcttgttggtactcacctacctaggtaattgcattatttgtactagtagatacagtaggatacagacgctaggcaagtatcagtttggctcttttgaacgtcctttgccttgccttctgcggtggaagtttgagagaaaaggtggtgcaataacaacacgaaaaatcgaggatatgagcctggaaaacactctttggagggccaagagtggtaactttttagccgattctgtattatattttttttactcctctgatacacccagagcttgttgcattacctttttttaatcatgcacgacaatgattaaaacagaaaagaagcaacagccttgtcttttattttgtttcttcaaaaataaactaaaatccacagtccattttctatttctatatttttgagataaggtcgcatcgaacttcatgattctcggtcttacaactgaataaatatcattttttaactattcaatcgaataggaagatttaaaacaattgaatcgatagatttttaatttctccggactgaccagcctcgtttgcacaacatagtaggtgtggtcgtgcgactttataagtaagtagtagaggtctttgttgggttctacatgtatcatcttacaagatgagacgccgtggccgccatcagcaaagctgaagaggcgggcaggcacaggcaagcaagcgaacatgtaagccttacctcgtagtccgacaaaataggcactccactccgcgcgcacacctgatcaacgcatcatttcagctaccattgaaaacttttggtcgacgaaaaccaaaacacttgttccacctcaccacacaatattcaatagacgcgttatcgaaatcatagttcgctcttcctattcgagagttagtacgtgcctcattatggaactcaaaagctacataatttagtttgactgttgcatacgtgcctcacgctcgcacgctggccctcttctgctggtgaagttcttgttcattgatatgtatgatcatggcaaggatgcatcaatccacagaatgagcacttacatctttcaaaaacacgtccagctgtctcaaatggtggagaaacactaatatatttgtagccaaggaaacgtaaccgctcaagaatcgacgagtttgggtgtacttgccggagtaaatcctgtgatttgacgcccgggggggggggggggggggggctcaagcgtttcaaagcaaaataaatgcttttcttgtcagaccaatctcgaatatgaatcgagacggtcacattcttgactatctaaaaaaaaactcttccagccactcgggcttcacgcaatcgaaagattacatatatatcgtacttatcaggaaaatgaaactgcaccttccttgtagcagtaacgcgtggtggagactcttgcaggctctgcgtaagtgcatttgtcacattcagaccgtcttaattctttctcatttcaacgtcctctcccatctctacaaacttacaaattctattgatgtagataattgtccgttgagataggcgagaaaggtgtagaaaagggaggtaaattcgtgatgttggcaagcaggaatgaacaattattaggctttacaattacttgtcgaaatttacgctcagctctaattaggagctttgatcatgccgcttcagccaggaaagagaacacaaaggcagggaatagtgcgctttatggaatgagcaagctataggtagatcggatctgcagaatcatggtgttccataccataaagcacgcttgagtgcgcaccccacttagcagacgcactctacctatgagcctagtcttttgcgcggactctataggacaatgttagcacgaaagcgaagacactgagagaaagaatgcatctgtgttattaccacggggctaccagtacttcctcataacgggaacccgtattttcaacggataaaagttcgtttgttgacccactagccactccctagaacctgctacaggaaatgtaagttcgtaaatcattgcgaaggacctttacatgcggagacgccactgatgaggacggaaaggtgcgagattttgcagaccatcaagtcacgggtcggtactgctacctcttcatgcgcactccatagctggtttcttattgatgtttgctggaggcacccgatataatagttattactatgtaagttctttcgacttacataaaacgcggaattactttgcaataatttttacgagatgacatttaccaagtaataacatctgagcactcacattttaacatttagcgcagtgatccttcaagacacgtttgatcatcggcagctgcatcgtaaagtacagtgctagcggtcgcgcagtggtgaccgccgcgtcaaaagcagcaaaacatcgcgtgcgctagagcttctgaaactctaagaggccggcgcctcaacacgtgcagcgactataaagcatatctggctagcaagcactccactctgtatcaataatttagggcatagaacaacgaaagcgccgacaaaaccaccaacgaagcgtaaatttacaattctgatcacgccaggagctgtcaaaaactagtcactatctcttcggtgatcatccgggctctacgtgagctatcgctacagccaactccttgctaaattcaactgtttatcggaggcagactgcgatcgtcaagagctctggcactgatcacatcctctgtgtatagttttgaagaagtagaccttggtacacgtgtgcgacaactcgcacacgtggttcacaatgaatattctcaaccaagttgtggaggatcaacgctttcttgatgcacaatgtgcaatatccaagtttgctgtgcacaaaaccaagcggcagctgacctattcaaatcttcagaacctgctcgcacgattccgcaccaacctcaaagctgacgctattctttccagtggggtcaaacgatctctgttctggaggtaccttcgtgatgaaaatcttttgcagctacttctctgttacgaagattgcgatcaagcgcaggcaattccacctggcattaagttgttatcttatttgcgacatattggactcacttatttaacaccaggcaaaccatacttcgttggcgatgaaggggccgagtcagttactcagcttgaccaggatattgctggcttcattaacgccggtatagtatctaaaatcccgaactctttgaaaatggttatggcatatcttctcgatcgtctgaacgatcacgttggaagttttattgatgggccgtatggctatgcactggcgagtttcgagaattacgccttgaaaccccgtgtaatgcgtgattttgaacgtcttcgtttgcttggcgagggaggtttcggcaaagttcatgccgttcgagtagtgtaagttgatgataaggtggcagaaaaccgaagcatttcgtatatttcgaggggagtttaaccacgcctctgtaagatatggtaaggttagattttggataggagggaagcaaaagctaacgtgaaatgtatttgtgggataaatttgacctaatgaacatacgtctgcatacatgctcatctgcaaaatgggcgaatactgaatttcattgcgatgcacagtgatacaaacgctgtatgggccttgaaagaaatgaataaagttcgcattattacgaagaaacgacttaatacagttgtggctgaagctaccattctacgaaaagttgattacccattcgtagcaagggttcatcaagtttttcaagatgatgtaaatatctactttttgcttgatattcttccaggtggagaactcaaattccatttacgacgtatgccagtagtccctcacgaggtagcacaattttggatggcgtgccttgtgttgggtatcggatatctacattccaaacatatcattcatcgagatctcaaaccaagtaattgtcttttagacactagtggctatgttgttatcagtgactttggtcttagtgtcactgctgaatcagcacaagatcttcgtcatgaccagtgttgtggtactccaggttacattgcgccagagatgtatctcggtccctgttgggaccgaaggagaccgacggaggttaaaaaacgcagcagcacaacgcgaagaacaacttggctttcaacgttccaatcatctctccgagcactcacctctaagtccgcacgagttgatgcttttgaccctagtaacgcgcaacttgcacgaggtgcagcaaattcttcaaaagttgaaactacgaatacaactcgaaggaaagctggaggaacagcctcattaggagatacaaataacaacatgcgggcaaccgcaaatatgcttgacgttcagagtgacaagacaactcgacaatttctgcgtgtggacactaataaggtgttcccacctccagagaatcaacctgttgagacattctccccagttaacccattactgagcccaggttcaccgggctcaccttcgccaacctctccaggttatattgcctcaccattatcaccaaatgtagcaattggtggaaatgctaaccagctccaagctagctttaagtcgccaaatattcctgtagttccattgctcaatggtgataatgaaaacgatgatggtggggagaatgtcgatggactcggacgcttggaagacactgaaaactctgttcgaaggctctccgcagacccagatcgcttgccccgttatcctaactatggtgtttctgtagattggtttgcactcggggtgattttgcaccaattttattgcttaggaaggatgcctttcactcgtggcccaaagcggtctcatcgcacgttgttaagaaatatggttcttggtaaagtacggtggtctgagtcagcattacaatgcgcggagagaaatcgtaacgaattacatcgtcgtttaaaggagccgggtagagctgaaaagcccatcgtcggtctcacctacgaagcacaagatcttgtgcacaaattattacaccatgatccggaagcccgacttgggtgcggtacacgtggtgtcagggagattatggagcatcccttctttgatggcatcgattgggataaactagagaaacgtcatattgttccaccatttattcccagttcgactacggtcaatgcagagttccagccaaatgattatgatggtggtgaaccgacaaagaaagaaaaacgtaaatcagcaatgcttactgatgagcatcaccgtgcctctttcaaagctttagagtacgtgcgctccgagactttgtttgaggagctcgttggatgccaagttgactttgaggccaatcatgctgacaatggtcgtcagtcacaggtggcttgctgcattatgtgaattatgaacatataaatctaattggctttgtagttactactccaaagtctttttgatttttttcatgtactccgtcaccgtgatatcagaacaacttgattgtcacaactgttttgaggttgttactgtgtgagatagtttctgctgttttatttacatttgaagaagggtactttcttctttttgagaaacagcaaatttgggatatatgtgcactatttaacgccaaaggatatacacagcgcgcatttgacctttttctgattttcataactagatgaacaacaaattcctctttgatttacacgcattcgtaagcaccaaatttaacttgcaaaatcctcaacaacgctttccaaattagcagagcattctccgctactcaacacggctatctatttccgcctagatattttcgtgccctgcattatagtcttgtgcatctcaacctaacatcaaacgaacgttgatctcacctgtaaaaaaacctgcaaatcacaagtctcattgttcaatctgtgcagcctgcgacgatgttgagcgcatctttgattgcggttccaccggccgcgagcaacgcagctctggatgtaccgttatctacgccagagtgtcctcggccaagcaaaaggaggacctcgaacgccaggttggcgatctccagcgcgcctacccagatgcttccgccgtctacaaagacatcggtagcggggtcaatttcaaacgccaaggcctgtgctccctactggacgcctgtgaccgcggcggaatcggccaagttgtggtcatgcaccgcgaccgacttgcgcgaatcgcagtcgacctcctggaacaccttttcgaaagaaaaaatgtcaaaatcgtggtacacggccaagatgcacatgccggagacgcagacaccttcaccaaagacctcctcggaatcatcaccgtctttgtggcatcgcatcacggaaaacgagcagcgcaaaatagacggcgacgacgcagcgaggaagaagcgagctcgcacgaaggcgcgcaagaccatcaagaaagaatatgaccttgtccgtgccaaaaaggtcagggtataccctactaaagatcagcgtacacagttgcttaaatggtttggtgtcactagaagagcctacaatactggcgttgcgtttcaccgagacgtggcgaagggcgaggaagaagccatcaaattgcatcaagaagcgtgcatcaaaaaggattccaagacgaagcaggttttagtagatgaagatgggaatccccaaacgtatggtgccctctatggagaaaagaaagccgttcgatctaaagaaaggcatgatgctcctgaatgggttctcgaggtcccacaggctatccgtgattccgggattctggatttcttcaaggctcttaactctggacgagccaaaaacgaagaactcgctgtacaaaagaaagtccatgagcaatctttttataagtttcggaccaagcgtgatgaatcacagattttcgaagtgaatgcacgtacctggaatgcgaagaaatcaaagacctccaactttctaaaagaattccgaacacgtaaagaaaagttccccagtcagattaagaacgccatgcgtgtgcaaatgaatcgccttgggcatgtgtacttctgcttcttacgagaagaagaaaagcgtccaatggaccaggcacccaaggcgcaccacagtgtcattgctctagatccaggtgttcgctcgtttcagacgatgtatgatgctgatggccgcgccattgaatggggcacagggaaagattttagaaccatattctatctctgtcgccgcgttgataagatccaaagcaggattgataaagctcaagaaaataaaaagaaaactgcatacgatttcaacacccccttgaagcgcgccttctatcgcgcccaactcaagatcaagaacaagatcactgagattcaccgcaagctcgcgctttggctttgtgaaaactatcgtgttattctcttgcctaaattcgaaacctctaagatgagcaggaggatggagcgacggatatccaagaagtctgttcgaatgatgtgtcgttggtcccattttgggttccgccaggctctcattcataaggctgagatgttcccgtggtgcaagcttgttctttgccaagagagctacacttcaaaaacatgcaatgagtgcggtaccctccaccataaactcggggcatccaaggttttccaatgccctaatcccaagtgcaaccatgtagcagaccgtgatgtccatgccgcaagaggcatccttttacgctacctatccaaggacatgatttaaaaaaaatcatttcattgagtcgcgggttagtctaactagtccgtgatggagtcttagctccttctatgaaatgcaagttttgcaaattttgtagtttaaaatctaagagatcgaccttcaactatacaacctaaaagagcactacttcacttcattacctagcacattatctattactatctgctaacatcacctttcacttcttcgcgaacattgctgttttttccctcccccccaaaccactttcggcgcttgtttgcgccctttttctatgtccctaacctcgttaggtatcgccgctccagcttagtaatttatagcaccttaaacacactggtatcatatgcactgcagctatactatttaaggcggatgggacatttcggcctccgagagaaaaggaaaaaagaaaatgcggaagtaactttaaaaaaaacgaaataaaaaccacaaaagaaaaccatcataaaaaaaaaatagttgaaaagcaggattcgcagatatggatatcgatcgagttggtacgcctatgcctttatcgcagccacatcctggtcaaaatagctgcactccgcccttgatttccaacgcacagctagctctccaaattaatggcacaggttggttttttcatttgcttcgcaaatgttatgtttgttaacgttgaccatcgacgttttaaggatccccctcttaggactttaccctaagtgaaccctatcagcgtctccatacagtggaaataaggtgcgatttcaagattgcaaacatcttcagatttcatctccaaattgctcccgagaatcgctgcgctgcgtaaaccttggccaaatcgtggccatcgtccacccagtcgaagttggagcattttaggagcagctcttgagctctgccgtcctgagcatcgagcttgacgccgagatggagctgcgtgttttttgtctcccattaaatgcggcggtagactcatctcatccatccatccatccatgagttacctatgctttcctaccactcatagcgcgggaccttagcagggcgtatgtgactcttaacacgctgcgccagctgtactctttgtcgttgaagagaaagagagaaagagagaaagagagaaagagagagagagaaagagagagagagaaagagtgaaagagagagagagagaaagagagagagagaaagataacggtgactctctctaagagaggtttgttttgaaattgagaatgaaaatatctttaaatgaaacttagaggcgctattctgtagtagtgctttattacgtgtaatgagacattcattctgtttctctgattctctgatactctgtgtctctgttttggatggttgggaggacttggcgtttaaggtgggacgcactagcgtggcctccgtgtgcatgataagggactgagggtgcgtgaaataatgaatgaatgaatgaatgaatgaatgagtgatgaatgggaatgaatgagaatgaatcattcgctaattcgcttactcgaagggagtgcagatagcttctcagagcactgcagaccgaccattcacgcaacgaccaatcgttgttgcgaggaagcggcattcgcgagaggcggggcggcagcagttccataatgggcaagaagaaagcggtggccaaaaaggcccctgccgccgcaccggcggcgccagcagccgctggcgcgaacacgcaggtcttgcccaagaaggaggatgggctcttcaaagagctcatcagacttcaggagagcaagcagtacaagaaggccatcaagactgcagacacagtcttgaagaagtttcccgaacatggcgagaccaatgccatgaagggcctcgtgtacaacagcatgggcgagaaggacaaggcctatgagcttgccaagctcggcgtgcgctacaacatcaaaagcgccgtctgctggcacgtctacggaatgatcaaccgtagcgacaaaaactacaaggaagccatcaagtgtttccagatggctgtcaggttcaacccgaacaaccttcagatcgtccgcgagctgtctgttcttcagattcagattcgcgatatgccaggtttcacagcttgccgccttgaccttgttcgtcaacaaggcggtctccgcagcaactggctcggatacaggtacgtaatttcaactctttcacaccctttagatgttttgtggaaacgtgtttttacttcacgaatctgtactcaaagtccaaaggcatcccaaaacacggttttaaataggcttgatcgaagctggttgcagggcactttttcactctggaccagtcaaaacatagccaacaatactgttctctgaacacagtgcatataaggtcgctggcgagatttcatcagtaatccccactcacgtccgcatcacccaatgcacggtcatccaatacttttcttgccgtgacactccccgactgtctatgcgtcatttttctatggcctgatttgaactcggtaaactaactatactacctcatgattggttaaaacatttcgcagtcttggtcagcatctcagtggaaacctcaaaatggccatcacaatcctcgatcaatacctcaccacgcttcctgcagagcgcgacgcttcgtacgaagagagtgagattcttatgtacaagttacaaattcttgaagagatcggtgataagcaggctgctcttgaccacttagaccgtcacttctatgatattttagatcgaaatgcctggcttgaaaagaaggttgagcttcttctcgctcttggtcgctctgatgaagcccgtcagcttctaactctcctgattaagcgcaatcctgaaaactacatgtatcatcgtgacctgcaggtaagtaaatcgttgctctatagcgtgaataactttttcagtcctttatgcaagtatctcaaaaacttaaacgcgatcctttctgccacgactttctggttccttctgggaaataccatatgagttgcctttgtatcgcggatagtaaggcccgctcttagaaattcctttttatcgtgcagtctatcttgatatgaggaaacggagcatgctacatacgaatagatatcagtttttgattttacatacatgggcttatatgaagatgtcatgctgtctatctctgatctgttcaagttggaactaacacgttttctaatattttttttacaaaactacaggcatgtgcgcttggtttgaagaatgtcagtaagatggagaactctagacttcctgctgataccatggagtaagtgaatttttatccgtccatgcatgccaaacccagaactttttagtttccaaaaatggtgcacacctctttttaccgtagacctatatgattttttcgatgatgtaaacttcagatcgtcaaatacggatagccctctgcctcggactcgcgattacgcgggagaaccctccgggggtcaggttatcttggtgagcgaaactcgcatcttttggtgcagtctgagaatctagtcatatctagcgtctactgtatcacatgtgtgcaacttctgtggtttggcgaacgttgaggttttacaaggttcgaaacactaacttgacgctgttaaaaaatctacagactttccgaggaacaaattgcagcattacagcagcagtatgaagatttatttggtacggtgaagcgtaagccaacttctgtgcgtcgtatccccatgggttacctgcagggtgaggcttttcgcacacatgcagatggatttcttcgtcagtctatgcgaaagggcgttccctcgcttttctcatctcttcgccctatctataaaatggcattgcgtaacaacatcgatgtttcagagtcaattcagaagcaagcgatggaacgtgttcagattcttggtgagctcgtggagggctacgtcaagtcactggatgccacaagtgagcttcccgccttggagggagattctgtcaaggaaaaggagtcgcctacaatgttattgtgggctctcttctttctcgcacaacactatgacatgatgtcggagtccgtaagtcatctgagtatctatgcaggcaccgaagtgcctgcaacagttggtgtgatggtggggtggggtgttttgggtagttgtgtgttctgctttctgtctcattgtctgttaagcttcttatccgcgggaggaaaaaattattcacagacctgtactgaaattctttgaggagcaaacaactttagcattctgatggacgggtccttttgacaatgacaatgtgcagaacacgcagatgttttggggaagtgggtcgaaggtgggtaggtggtgttaatcttgtgtgtaaatgtttatgcgcactgtggcgtgcgctgctagattgttgacagatccgcgggaggaaagaactattcacagacctgtactgaaatactttgaggagcaaacaactttagcattctgatggatttttaacattcagtagcatggcatttacgcactgggctgggctggaggggtttagtgtttgtgtctgggttaagcaacttggaagtactaacatgttttcaatggcttcatcgataacaggataaggcgcttgcaacgattgagagggcgattgagcacacgccgaccacgttggatctttttgtagtaagtgcatctcgttttattttgctgaaattctcagcttatctttattgtttatcagtttgttcaaagatggaacaagaccagcaacgttggagatgatggcaaaaattctattctacacctttagaggactgggactacggtcacccgtccatgaaaacaacgtttgctgatcctttggtgctggtattgctcgttgggtgaacatccatgatatgatcttcaagtcattgttggcattgaatgaaaaacaatttgtatgtttgttgtatgacagggatatctaacatctagttcgttgaattttacaggttaaagcacggatcctcaagcatatgggagattttattggtgctgctgctgcaatggagtcgggccgggaactcgaccttgcagacaagtggattaactccaaggctaccaagtatctgttaagagccggtcagattgacaaggccgaagatgtggttggtcttttcaccaaacacgagggtgacagccgtggctacctcaaagagatgcaggctgtttggtttgaaatcgaaattgcccgctctttcaagaggattggagaccttcaacttgctctgaagttctatgcagccattgttgagcattacgatgactttgaagaagaccaacttgaattccacttgtattgcttgcgcaaggctacaatgcgcgcatatgtatctacaattcgttatgaggaccatgttcgcggacatcccgcgtatggtcgtgcggctaagggcgttattgattgtctcctcgagcttcatgataagccagcgaagtactccgctgttgttgagaaagctaagaaggatgctccatccaagtctggcgacggtgaggaaggctcttcaggtggtgctaagaaatcctctgaagatagtttctctggcatgtctgctgctgaaaagaagaaggctaaggccaaggctcgtaaagaggaggcgaagcgtaagcaagaggaagagtcgggtgagaagaaagaaggagaggatgaaggcgaggacaaggccaagcgttctcgtgttgcgactgatgaggaccccaagggggctaagcttctcgcaaaatatgcggatagtcctctcgaggaagcgcacaagctttgtgaagttcttcgcaagtttgccccgtcccgtcttgatacgcaactttgcatctttgatgtggaagtgcgccgtggcaagtaccttcaggcccttcgtgctctgtgctgtgctgttgatttggctcctgggggtgccaagaatcctgctgtattcagtcgtctcgctccgtttattcagcttgtgcaaagcagtaaggttacttatgccccttgggctggaaagtctacttctgatgaagatgtcaacgttgccatctctgaaagtgttgagatccccgagtctgttagaactgctgtagagtctcatgcagcgcctcttattgatgggtcgccttctgatgcagctagcgcttttttcaaggagaactctggtagcccttccatctcgagtcgcgttgctgcagctgtagcgatgattcgcgttgatgctcaagttgctgagtctgctgagaaaaccttgacctccatagtgggtgatctcccggagtctgcctttttccaggatctttctgatatgcatgaagagctgactggccttggagcctctcagtccctgttagatgaccttaaggcgtcaatccttaagaagttcccacatggttcccttgaggtgccttctcccgattttggtaaggatactaagaagaaggagaccgaggctaccgacaaagaagagtaattttttttatatctaaccagtcttgaagctaatgtaaattctttttgtttaaatttgtcttgtcttgttatgtttttgttatcaatgtcgaaggattggtttctcagggatgtttaagtattcggtggtgtgcgcttgcttgtgagtgacctccaagaatttttgtcgcggacatgcggaggtaagactgctgctcgttcagatctggattcatctgagtcattttcagctccctcaattagaccacctgcatgttcatcgttgtcgtcatagtcatattcatcgtcatcatcaatatggctatcatcatcattgatgttgtttgcatcattttcatcattgtcttgatcatcattgttgttgtaatcgtcagtgtcatcgaagttactgttgtggtcttgaccagcagaatagcttaaaaatggatttgtagttctccgtgtgcttcgagatccattatcatcttcttctcggagatcaaagtgatcatggatgagagtgcgaggggtgaatgtggctgcagttggtgcagggctcggtgtttggttcgattgtccactgccaaaggatcttagacgattaaatgatctctgttgagcttcgatatctggagattctccgttggtgttttgttgctcgtttcctccggcatcatcctctggtgcgtctgcggggacaacaattggtgtttgttggtgttcgagttcatgtaattgatggcgggtaataattccaaccacaagattagacgtgttgaccacagttaagtggcgtagcccaagatggcggaatagttggtgaacacgtgaaacgtaaacagagtggtgaactgttaaagcgcttgagttgaggtagggacgaagatctactacacggtcaaagtcttcctctgaaagtctagtcaaaacatcgcgaatactcggtgatcttggatagtgtttgaagaaatctctccaagcaatagttgctccctttcgcttcatacgatcctgaaaagatgcattgttatcaacaaagacgcgttcaaacaagagaataagtagttcactacgtaggattgttccttcaaatatcccctttcctctaacttcatcgacctcatctgcatcaaggttagtacgttgagaattggcacgccgcttgcgtcctttcacattacgacgacgcgtgctcttgttagatgttgatttttgttcagatcctgtacgaaacaaagtagcatccagatcggagcggctgccaagactgcgatggcttacgaatctacgctgctctccaagagttggaggtcttataaggcggtctgccatttctgtcgagttttcagaggttgtgcggtgtaaacttgcagtggagtcaatgtctacacttgatctgcggttgtggtgagcgattgagatgtgtgacactacaggaaagccattatgtgagcagtcttgtagaacctgtaagatatcgcctacacgttcgaaaagattaaacactacgggctgtttcaccatgatgtcacgtaccctaattttgtgcgcattcggaggtggttggtcatgcacaaatttgattccttggagctcaatatgcatatcatacaggccgtctgtgaaaagatctcctactacctttgcagacataattgtgaccatgagaggaattgcataggttgagttattcgtcgtttccataagaatcaccacgatagagattgtcatccgcgtaacaccaccgagcattgccgctcctccaaggagtgagtacgtgcccgggtcaatgataccaaatatattcataaaggagccattgtcgacagaccacaaaccctgaccaaatgcacgtcccaaggcagcgccgatagtgatggctggaacgaaaagtccgctaggaatgctggtgccatacgtaaaacaagctaacatccaaacagtgaagccaaacaaaagcaaggctggccaagcgtacagagcttcactatggaaaaggcgtcgaacagctgaatcaagcgaactcagcatcagagtttcgaggtcattaacttcatcatcaccgtcacacatgtgaccattcattgcaataagctcgcaggtactattcttgactgggtgaacagggttgctatttgtccaagatgcgtaatgaacatcctttcgtgatcgacaaggataggcatacgagaggccaaaaaatactgtggaagaaataagggcaacaatgagagactcgaccagacgcactcgtgggtccacgatatatttggtacgaatgcggcttaaaacaagattgagagagttaaaagcggccccgagaaggccgcccatcgcaccaatgagaacgaaaagaggaagctgcatgaatcggtatgggggttgcataggatagcacggatctctagaggcaccttcgaaactgccaaatgaaacaacagcagattgtgacatgagaccccactcagcagtatcctttgcacctgagaggaccacatcaacaaatgaagcgcatgccatagtggcaaagaatgtgagccatgtgaggcgaacgctccagtatgatgctgcttcctcaataacaaaaagaacgccaccgagaggcgccgagaaagcagcagcaacaccacaagcgcaacccagcgaaacaaaagagcgcttttctttatcactgcggaacgaaagaatacctagcccgaacgagtaaaactcgtctcgtccttgagatatgatcgcgcctacaacagctccagcatgcatcatagggccttcttttcccaacacaagggacccagagacactgaaaacaactcccacaagcttacttactaatgtacgaatggagatgacacgatgaatctttcggccattgaggtagcttttaatctctgggatgccactgcctttggctttgaggtccaagaatgcaacaaacgccgtggcaatgctgacaaaaagcatgttgtagccagcataatataaaaacgctcgcggggccttctcatggtcgagtcggtagttcacttcactaaatttgtggcctgcaagtgcagtcacgctaacatctacaatgatggcaaggcaaccgacaataattgctatgacaagacctgttagccaacgcacagcctcgacattttgcaatactccaccggacgcggacacttgtgtaagttcttcaacacgttgtgagtacaatttattctccgacgtgtcaaagtcaagcccttcctcacgattcggtgttcgcaaggagttccagtgagcacgaagtttgcggagaagtcgctggacacatgttcctccttcgtcgcggtagctgttccacatagattggtacaagcggtggtggtgaacactcgcatgttcttcatcatctatatttccatcattgaagctgtaagaactagcactcgaaatccgtggtactggcctatcttgcctctgctcaaagctactctcatcggcacccaacaacggttctagaaaactattcgaatatgtctgcccactcgccatcttgtcaagctatccaagacacaaacaaagcctggcggtttcctctcttcccaaga

SEQ ID NO: 118 - DNA, 21986 bp, unidentified
  misc_feature 1..21986: note = Fanzor polypeptide
  source 1..21986: mol_type = other DNA
cagcgccatggttgctgagtttgcggtaagtggcggtagcggcgggatcgccggcacgttggagttggcctcatccggcaccatgccggcccgatcagggctcatgccgcgagcccgtgcggcggcgcggcgtcagctgccggccaggcgcttctggatccctttcctccgtcctctcctcactccaccaccccttatctgcgcagcgctactgcctcggcgtcggctgcggcgacgagtgctgcagcgatggaaatttcaaaactcgctccaggagctcgccgcgtcttcgagtgctccgtgcgcagaagccctgcagtcgcgctacagggcctgccgctccgcaccgcttctccttttcccaagttcctcctccgcccgcgcggccctgagcgaccgcagaccccgcgcagcagccgcgccgcgagacgcctcaggttttgcccgccgcttttttccctcttccgcgctctgccttttccttctctctcttcttctcccttctccttctccttcatattcaggtacctacctcctatctatttctattcgtctatttgtctatttattctttatctatttattcactattcatctatttgttcattcatctatttatctatttactcactattcgcctatttatttactcgcctgtttgcctacttgttcatctgcttatctactatttactttgttccatttcatctgttcatttacctatctatagattgagactgcctgttcttatcgcaactatcgcctgttcttgtaggttcgaagaagaatcaggtacacgatctaactaactaactatctaactaactaactaagtaaataactaagtatagctccctattcaattttgaatttgaaaacccgtctaactatctcctttctggctagctagcagctacctagccgttcacctatgccccccgcctcttctgcttatccttagttgttcattgattcaactgactgctgtgccctttcttatctaccatactatctatctatctatctttctttctttctttctttctatctatctattcattgaattgaattgaattgaattgaattgaattgaattgaattgaattgatcgatttccgtgttctttctcctctttttatctctcctgtatcatttgagtcagtacacttacctacctatagtactatatagtatgtatatttcttcagcgaagtttatctatctgttattcttctttccctattctctaaccggctacaacaggtcctactatgtgccttaacagtcctaccctgagttagcaactgatagatggaatgatagtagcaggctcttctcataggtacagtaggacccattaagtgtacttaagggatactacgactctggtacggacaactacctactagcctaacggcgagagtttggggcaacttcagttcatagaacaggattgataggattggccttgaataatacatcgatcaattcgttgctctatgatattaaggttgttcttggcagagtaagaatcttatatggaggggatcactatccacaaattggttacgcctgagaggcttagattcggacttggcaaagaaaagcatgcccactaccactacaattttgtgaagcttttcatcattagcaggacgaccgagcaaaccgcaaggcaactccgaaaatgaatattatctgtagttaggctttgtttctataattgccgctacagtcttgtcatcgggccaggaaaaaatgttcccttactgccgaagaattagccatcgcctctacacacagacaccattccgaagacacttcctgctctagttttgcctgtattctgcttttcttatctcgatatggtctgcatgtgtgcttgttcagctttttaacaagtctactttgctgtcagcgccttcgtgcgttcaatgtgctcaatttcctgctgaccaattctaggccatttggagcctcgatacttcactgatcttgctctttaggatgcacatttgtctggtggttacattgaccataatatcgtttatggcgagaagaaacccagcatagcccttatcaagtcccttctgcccacaatgcaaagtcaagaatatacctcaatgcagatttactcacgagactcgacggcttctcattactcggagcctttcttcgcttcttttctgtgctgtttgcgctgacagactttgagtttgcctgtctatacagccgaaagctctcacttctcatatgtacgtgtccgagtgctgaaatccgacccttgatcagtcagagattgactatactgacgaaactcgggacaacacgcaactcgcgagattaaagaactccagacataccatttacatgtgctcccaattaagagagacattcgctttgcttgagcacaacggcagtactacactgttttctccactctcaggataacccataactcaaacaatttttattttttgaaaatgaaacctcaggctttttcctgaaaacaaaagttcagtaaggtctcttctcttcccatttcgtttcgtttcgttggttttctttccaagagtcaattttttatcatacagattttttgttttttataattatgtttgctcttgtacttgccatgttgtcttgtcacatataactcagagacatgattacaagcacgtaacaagttgtactgtgcagcaatcgcaagttatatcaagtttctggctgtaaatttcgttgtttccttgcctttgaaagaaagatttgaaacttttacgctcgatagcatcaagtacccaacttacttttgccatttccatcgtgtcgctaaacttgattgtcagaagtggccagatttgacttttcttttacctttgttgaacaataggcactacttaattaggtatcaaccaaataaagaaaaatattgatacgaaattttattgataaatgctcccaatcaaccatgactgacatttggcctaatgtcccgcacgggacacttctcaatttgagtttcctgggaaggaacgttctgcaatcagcctcactgatgaaaagcatttatttacaatggtttcgttgctttaattaagtatcagatgaaaggagaaatttaatcaatccatcaagtggttttctccaagctcgacctagctcaagctatgctgccttttcccaggaaataaaacagacaatagtttattagtatgcttgggccaaatttgaattatgattatgcttgaaaagagcttttcttttttttaagtgcacgaacacaaggtggaataacaatgacttccttgacgcaaactcttactaccgccgcattgtgtacggtcacaaagtgtcgattctgtgagcatactatttaggtttcgaatgcactgagacgcatgagaggcttcgacagggaactgttgctgttctttcattttccaagaaaatcaactcacaggaaactgcacgtgcattcttatggtgccctggaaagtacgcatgattcgatcgaggataacaaatacatttattaaagatagcctagtaggtgctagctcttagcttttattgcagaagcaatagattgaacagctactccatttggattgttgaaaagggcaaatcagaaatcaagagtttttggcatcaaacactaaattgacaacgaacctctctagcgtttatccttctgtttgttcctagactaccgggaagaaggctacaacttctcattaaatgctaccgatgtcacatggttccaagggcaaagagcaaggccacgaaggaagcaaaaaagatgcccaaaacgggaatcagtctgaccatgatcaacaactcctagtgcagcagtcacaacaaggtcagaaagaaagtattgaagaagatatggaaacgaacgaagaatatcagcatgcagctaacattatgctaccttgcaattgcttgaatcaaattaccatcaacattaacaatgaaaaaaccaaacatctcaggggaaaaggctcaagaaatgtgcgttttcttgaagctttcctggacataaaaattagtttttgttcgtcaatttccccgaaggaaaatgctgtgactataaagtcgcgccgcattgacttgaaaaacaacaagtgcccccaagtaaggcatttgctgagatatttaaagtcagcaactcgtggaggattcttaaaatacttcaccgaggaagaataccaaggaattggcactctcaaacagcgacgcctatgggatcagctcaacaagcttgcagccacctacaaggtccaggtgatacagcatattttaccgacatctctaatatatagggaatacaacgggaaacctctaagacgcataatctgtgttttggaatacccgggcaaaactctgaaatacgaaagggctgtgcgcaatataggtcaaataatacattcgagatttcgcaatgcatgggcagctgatacacgatctatggaggcaataactaaacactaaagctctattgcgccgctgtatgatgaagagaatcagccacactaccagtggcaattgatagaatgttcaacgaaacctaacaatttaaacccagcacataacatcagaacttgctcttcaaacgtcgattttgtactgcctttcccaaattaaattatcaaataagccacaaaacatataccaggagctcctggcaggtgcagtctttgatactgaaacaacaaggcaaacctgacttgaacttatcagtgttttgctgagatttctaatccaagctatcgatagacaagtcattgttgaagttcttgacattccattgtaagccctcaaaggctgaagacgtacatagggccataacgagacatccagttacgtggttgtgaagtgaaaaaactcgggaggtaaaagtgtacatatacattgaccagaacaaagtatggtgaaatctgaatggatagttgaagtagcaagctaagctaacctcttcaattgaaagatcaagtctgtcttagtcttctagtttaaacatgaatctgcctaccttgggcttgaagcccaagagcagcagatcgctaacttttaaagttctcaacccttccacaagcctcttgccttcatcctcatgatcaacttgtagctgaccaaattcgtcattcagcatacgtgccgcaaagtccaaaggccggaagtcttttgaaattaggaccatttcctattttaattgttcactttctgcaaagacaaatcataggactgatagttgagcccaaggtgatcaacaacgtgaatgtgacctgttacaaatccactctgttgtagtgtagaaatattacaaataggagaagaggatattttttttgaaaggggggagagtcgaacgttctaaaaatactgaaaatcacctccacattgcttgctgcaattcactttgctttgcatttgagatacattttattgtttagtcttcttcttgaagaacttcatataggcctatgttgataacatcttgttcgttgtttcagctgtccccagaacccgagcatatcaagcctatcagcttatctcgccatcaaagggttcatccaggcaagccttccacacaccagcatccctgtagatctctagcacaagtgcccagatgtcgctcgacgatagagaactacaatcgttcacctttgctgcactaaaacaattggcaccatcgtcataaatatctaccgaaaggttaagactaggtagcttcttctatgaagatggtacccactgatgcctacctggaacatcgggatttgccatgtacaataactaaaggtcacaaccacacagcactcgtaattctccagacagagcagtcattcaacaatgttttgcttgccgacgaacctgaagtggtgagaaacagtgacttgtagaaggggagagtcaggcccggaaatgaattctctctgcaaagcccgcgcggacgtggaagaaataaattaaaaccaaagagcttatatactatgcaaatattagtagtacctattagaatttcgttagagagaagaaaagaaagactatgatagtgctagtgtaaagtacagatgtattttattcctgatcatatagttcaccattgtaattaagttcattttcgtcctaaatgcagtgtaagtttgagacaccatcgggtttttggacattgcggcgcgagcaatcaaagtccaaactcactcggagagaagtgccggctgcgagcgagtccgtcagggcgtcacaagcgcgggactaactcttgaaggatcagacacacacatcggagacgtgtggcacggcatactggcctgtctttagcgaagcaaggtcatctctccaccctggagaatacacagatcgggactacttggccgccggctttcatatctgctcaagtgcttcttgggtacgcgctaagatttcactctctgaacagaaacaaaggtttgcttttatcctgagacccggattgtcgaagcgcaagccttttctcttttttgtgatagctgagaaagctcaggcaactggtgaagctaggccctcgtttatctgttctttgtgcttttcgaggaggttctttgctcgagttttgttttagtctattatacatatatcatatcggatacacatttggttgcagaaacttcagtcatcgctggtttcccgagtatcgtgtgcaaaagttacgtgctaactcacgtgctagaggaaattgtcagcaaatccagaagaggtttatcaacgttgaacacacgatggtatttgtgcaaattgaaccaaacttaagccgcgctgggtccaacattcggtcggagatagatgagtcgcgggatgcacagacgtcaagggccgaacgactggcaaggcgcaattctttgcgcaggaggattaagctattgtgcattgttatgctgattacctactgtgtacgcttcgtgctgactgtcactgtatggaacgtctctgattcttcattcacaattccattctcgcttggtgtcgcctattgtggtcttgttggtgcagctcgcatgaataaggacacactctcgtgcttttatttttgctgccttgcctcactttgtctttatgttgcgaatgtcttggtgcaaacaaaaatggtcattgatgtgcgaaatggcgaagaagtacatggcgaaactgagtccacacaagacgtatatttagtggttatcacagcaataggtatggagactttcttagcttttattcaggtgattggtgcgttgtatgggagagagcttgtccataaacatctcgtggtgcgccatgatgatgcacgccctcacatgttcagcgggaatgccttcagccttgaattcatccaacaacagcagaatcagtctcgttctgctgcagattttgcggcttcattaacggagagcctcaacacaaaaatgacaatcgaaagcattcctgtgcgtatgtatcaaaaaggtatcccccccgagtcctttcctgttacctccacaacaaccctttccccaagtgtggagttgtgtgaaccaagtgcaagcgcccatccccgcccacctctcccaccagctgcagctgctgccgcagcctcttcgacgcccctccctgtaccccaagctaactatgcagcaaacggagctgttgtgtccccttttgcggaggacgcagatgcggacctttgcgtgatttgccaagacgaactccgcgaccgcgcctcagttaaggtactacagtgcaaacattacttccatgtccactgcattgacgcatggcttgaacggtctttgcattgcccaatgtgtatgcaagaaattcccattattcgattctatgagaatgcctctccgggagaagctcctgttgcagctggtgatgccagctctacttctggagctggctcctctatccctagtggtatgcgtagtgacgaaagagctacagaactcacttccattcagtccactacaagccctattatagctgaagctgtcccatctcatgcgcagaacctaacttctaggtcgtcatcgtcagcttcatctgcgacatcagccccgtcccactactccgcaaaccacgattacgaggttgctagctttgcaacctcatttcgccacaacccgggcagagaacatcccgaccaaacaggtgaagaagcaagtaatgtacacaatgctccacccattgttttaccttcaaattcttcagccggaccatccgcaaaccactcaggatcccgaacacatcgtgatcttgcacaggtttaggacgaccttcagcggaatgttctttgagacaaatttcagtgttgtagtagtagtagaatcgcaaagttaaaccttcaatctgtcatgcccaaccattgctgtgctgtatcctcacaggtacgctcagatatgctctgatagtccttaataatttattgatcgttctcaagtttctagtatcttcctttttaaaagcgttgaatcatctctgagcccaagtagggatcaagaacacttcgtctttacctataaaaactgcatttcctacggtgacgtgggcttaaggcccaattgcaggttaataatctaaactgcgactcaaagacattttaaaataatttctttgtatatgtagcgcaaaaggatggcttcgacggcgtggatatcgctattggttatgtgtttgcatttgaggcatttgaaacctttggattccgaggttttccatggatggcaccagattcattgcatgtttttagaaagtgtaagcctttcggcaaataacaagcttacactaggggaaaagctcgcctttgtgaatgaacgcttggcggaatataaagtgacccagcgtcacattattcgaaacctctttattttagttcatcctgttaatttattaacaatttgggaggtttcaaattcaggcaaatggataacacggtcatattcatagagccaaagtacaagtttgtggcgaacctcggttttgctcttggtattgaggataacgcgtatgtatgcacgtcttactctgtagttatagcgaacattttagggttgcctgtttcgtcttcagggcttccttcgttttaggactttctgatgcatgcatcctgatgaagggccacacttcgtctttacctttggacaagtcataatgaaggcaacgccaatgttgtaagctcttctggtaacgtcaaaccattctttaacttgaaagggcctgtctttcgttggatagacacgaatatccccagcacaaaatagattatactctttcttcgcacgtgccctcttcttcctcgctaagttggcgctgtctattgtgcgctgctcgttatccgtgatgcgagaccacaaagacagtgacgatgccaagaaggtgtcagagtctccggcatgtgcatcttggtggtgtatcacgagttcttcttctttttcttttgagatgtggatgtcaacggcgacttgcgcaacttggtcgacaaactggctgacttcgtcacaggcatccagtaaggcacgcaatcccggccttttgaggttgaccccgctaccaatgtctttgtcgacaacacgctggagaccaaaagtctcgcgtttgagattctatattggttggcaaaggacactcggggagatactggtacagtcagagctgcattgctcgcggccaccggaactgcagcgacagatgcactcaacatcgtcatttgcatacatgcacttgtctcgcacttaccgatacgtcaaacttctggttgaggtactctcctggattctattgaaagtttgcttcacttgtagcgtttggaccttggtggttccttggccgtgccattttcttacccagtctccatgtcttagcagacttctatatcatttatttggagcagtatgacaaaaaccgttaaaatttcgataacttatatttcgatgtgcttgtttcatattaatcatatattatacttagttagatctttaataagaagtggagtagttaggtaagaaaatggggaggccaaggaaccgccaagctccaaacactgcaagtggaacaaacctcgaatacaaaccagcaaagttctttcaccggaagtttggggtctcagcaagcgcccttcggggctgggccgatggcggacgcgtgcgctgcgcgcgcttccccggaggcaagcgcatctacgcctgcgacgatgttgagcgcatctttgattgcggttccaccggccgcgagcaacgcagctctggatgtaccgttatctacgccagagtgtcctcggccaagcaaaaggaggacctcgaacgccaggttggcgatctccagcgcgcctacccagatgcttccgccgtctacaaagacatcggtagcggggtcaatttcaaacgccaaggcctgtgctccctactggacgcctgtgaccgcggcggaatcggccaagttgtggtcatgcaccgcgaccgacttgcgcgaatcgcagtcgacctcctggaacaccttttcgaaagaaaaaatgtcaaaatcgtggtacacggccaagatgcacatgccggagacgcagacaccttcaccaaagacctcctcggaatcatcaccgtctttgtggcatcgcatcacggaaaacgagcagcgcaaaatagacggcgacgacgcagcgaggaagaagcgagctcgcacgaaggcgcgcaagaccatcaagaaagaatatgaccttgtccgtgccaaaaaggtcagggtataccctactaaagatcagcgtacacagttgcttaaatggtttggtgtcactagaagagcctacaatactggcgttgcgtttcaccgagacgtggcgaagggcgatgaagaagccatcaaattgcatcaagaagcgtgcatcaaaaaggattccaagacgaagcaggttttagtagatgaagatgggaatccccaaacgtatggtgccctctatggagaaaagaaagccgttcgatctaaagaaaggcatgatgctcctgaatgggttctcgaggtcccacaggctatccgtgattccgggattctggatttcttcaaggctcttaactctggacgagccaaaaacgaagaactcgctgtacaaaagaaagttcatgagcaatctttttataagtttcggaccaagcgtgatgaatcacagattttcgaagtgaacgcacgtatctggaatacggagaaatcaaagaccaccagctttctaaaagagtttcgtacgcgcaaagaaaagttccccagtcagattaagaacgccatgcgtgtgcaaatgaatcgccttgggcatgtgtacttctgcttcttacgagaagaagaaaagcgtccaatggaccaggcacccaaggcgcaccacagtgtcattgctctagatccaggtgttcgctcgtttcagacgatgtatgatgctgatggccgcgccattgaatggggcacagggaaagattttagaaccatattctatctctgtcgccgcgttgataagatccaaagcaggattgataaagctcaagaaaataaaaagaaaactgcatacgatttcaacacccccttgaagcgcgccttctatcgcgcccaactcaagatcaagaacaagatcactgagattcaccgcaagctcgcgctttggctttgtgaaaactatcgtgttattctcttgcctaaattcgaaacctctaagatgagcaggaggatggagcgacggatatccaagaagtctgttcgaatgatgtgtcgttggtcccattttgggttccgccaggctctcattcataaggctgagatgttcccgtggtgcaagcttgttctttgccaagagagctacacttcaaaaacatgcaatgagtgcggtaccctccaccataaactcggggcatccaaggttttccaatgccctaatctcaagtgcaaccatgtagcagaccgtgatgtccatgccgcaagaggcatccttttacgctacctatccaaggacatgatttaaaaaaaatcatttcattgagtcgcgggttagtctaactagtccgtgatggagtcttagctccttctatgaaatgcaagttttgcaaattttgtagtttaaaatctaagagacactagtactatttggaggttatatatttccaccgattttatttgtatagcttattccatattgttagagtaggtatatatgttcaattgctctttttgtaaacatctaatgttaaacatgcggtcttagctcaggtgggagagcgtcagactgaagatctgaaggtcctgcgttcgatccgcggagaccgcaaaattatttttttctccccatatttttttttttctctataaattaaaatttacttctcccccgcctctaccttttacattctaccacctaccactcctgagaagagcatactaacaacgacgttatacctcaagactctgaacacagctacttttacaatcatttgaacggttgctttataatcatcttgggggaaattaaactggtaggtattgaagtctgtttaaatgttatctgagtcatctggctggaaaattcgaaaatgttcaattcccgagatggagtttaaactggattggaacaaatcttggcaagaggcatgccagaaatgccttcttagtgaagtgattatcaagagtgttaagttataaagttataacccgtgggaactatgggtccctcaagacagctgtttcgcaacaatacgaatatattaagtctactacacctactctaccttgaatggttctctatgcgcttctcgaacgtccagcatgaatgcattccacaatgccacaataggtacagacaaattattagatcttcaattgaaggaactagtggacaaatcattgccagcattcgctccattgtacgcactcaaggattttggacttacttagaatagaactagccaactagacttattgcgtggttaatgagccaagatccaaagttcacatgtgtagcacttagaatcgagcacggtggaatctaaatctgtaatcgaagcggttacttgtcaatcatggcggatacaagtcaagtgtgtaatagtccctaatttcagtttgccttcaaaattcaattccaagcatagtagatcactaagaccaagagcaagagcgctgaggtttttaggaaaagaaaggaagatcagaaatagccaaatctagcacgagaacgcggagatgactcaaaagtcttcaatcgcgagtcttaccaccaaggtggtaatacaatcaccctcaagttactagcggtcttagctcaggtgggagagcgtcagactgaagatctgaaggtcctgcgttcgatccgcggagaccgcattatttttttttaatttctattttttttttaaaataaaaatttctcccgaaaaactaagcaggaacatcaacaacgaaaactagggcagaaatgcacattacagtttatttatttaaaggaaaagttgcagacaagtcatttaaagtagtagataaattccaggcgcatctttcacacaccataaataaatctcttgttggtcaatccatatcagaaggtcctcatgttttgtgttttatgttttatttatttattttaaataattaatttcaaaagttagaattaaaattttaactaaataaaaaatgagaaagcgagttttagaaaacatacactatcataataattataactttaccgacgaagtattcagtcaacagccagcaatgacttgctcgctttccgttgcggtcttagctcaggtgggagagcgtcagactgaagatctgaaggtcctgcgttcgatccgcggagaccgcatcattttttctttcccccaatttcagttgattttttaatttttaatttttattaaaaataattaatcgaagctaccacatagtacaattcatttcgttacttttgagtcgtaaacttgtgacactagaaatttagataaccttgtaaaacagcgaactattgtacaagcaaaatgatgatactattatagagggtaaccacaaaaagaagcaactagaaagggtagactaaaagatatatgttcctagtatccctagtttgtatgctatggttgatttattatctctttatgcagtcaatttggaaagacttcttttgttagggatttgagatttcatgaattctcccacattatgatagaattgaaggattgatcgggttgtttcgtgaaagattggttttgtgttcatttgaaactttgcgagcattgccatcatctaattaattagcggtcttagctcaggtgggagagcgtcagactgaagatctgaaggtcctgcgttcgatccgcggagaccgcattaatattttttaattttaaacactactttttagtagctaggcagtacttactcttacctatattgtatatggttaccaatatttctctttatacacaatttatatacatattttttatttaaaaaaaattaaatccaaaaccatgacaagctaccatccatgcttatctgtataaagctctacattcctcatttcgactttttaagagacacacgaccacctaaatacggaaggtgaataagtagataaagactgtttgttctctgaatagttttttgttgttaatttttaaaattcaatgttctctagctagagatataaaaagtcaattcctcccaggattgcagtgcctggtcaaaataatgcacataagttgttcattggtttgccttggaaagatgatggatgttttgctcgtatctgtgtaaaatgtgtgctatttgttcaccctgaattctacttgtgtgggaaaatgaggctttgaagcagtgtaggagtcggattccggttctgtaaactgggtaccctgacgctgctctggtgcttcagctcatacaagcgaagcttatgaaggtagtgaggtttgcattaggagataaaacatgccagttggccattctaaaaggggggaaataaatttagcatttaacccgaagagaagagcagctgttcctgtcaaggagttaattacaatagtgggagaagcatacgaaatgggtgatcaagacgctcctgaagaggttaggggaattcacacaatttaaatgacttaaacaatgtctgttttctctaaatacgcatattaataatttgctgctttagtcagacgtaaactaaaaggtttagatacaacccagctaaagttgatataaatcatttgctccactcttgcagtctgagtatgacttacacaggaatatcgccttacttcatctgttaagctccattagaataaaggtagttgtcttcttcaaaggacgagaccatagagagagcgctaaagcgctgcgaacgtatatctcaaaattgcgagaggaatttaagaggttctatcgaagtcagaactgtacgagctatgttcttaataggcttaatctgcaaagtactacaacaggtactagctcatgacgttcttaaggtgattgtgagaccaaaaacttagggttgcatagattacagcccactcattggaggggggctgctgaaaaggaagggaccatcccgctaaattcactagagcaaagcattgcatcggcttgcaagttattttataccttttgagagcgttgtgtgctcttgttcacggggagggcgctttgttaagctgtcgccttccaaaatcttcaactcccgaatctcatccacatttgtaaatacaaatactctgtataataagaacttaggacacaatcaacattgcgttttcaaacttaagctcattgctgagattttcaattgaaatgactatcggacgaatcattgctacagtgcttgtcgttccattctgatccccgaggaatttgggagttacataggtacagaactatacaactaggatcacggttgtgtagttatgatagacgagaactaaaggcgtacaaatgcattcgttagaacccaatgtggcactatctggattgatggctaaagagacaagttaatctggctccttcaatttgtacagaaaaagtttctcttggcctcctaattgtagcatggatcagcctgcttcctaaggacagcagatcgccaacttttaaagataacactaatcgagcctatttccattcttttgccttcagtttaatcttagtcaacatctagctgaccagactcatctttcagcacttgtattagctttttcaatactgattcaatattgattcagtactgattctagtattccatcagaggaatataatttagacgacgcttgtatgcataccaaacgtactcttggctagcacaagcagcctaacacaagcagctgtagccatttttgatcgcacatacatctttataccagcccctactcacgctactcataatcgtagtgcgttctttaggatttgattcgacaagagttgctttaccttgattaaatcgatactctgtcagctaaaaacatcgtgcttatactgaacaacaccttttgagagagatattgaaaggaccctgcgtgtatcccccttgcatccgttatggtgaatttcatcctccattaaaggtgatttagattatgctattgattagcaaaagcttgagatccattttacattactagtgatgatggtcctaaaggttggaacttgtcgagctagatattgactgagcaaggctgaaccaacgacaaaggtcaaagaaacgatatgcttgctccctgtatgattttgtgatgaggatgctcactggccaggcgtacatgcagaagatcaacacaaggagcagtagcagaggcgagacaataagcgagctataatttatcagagaggaccgaagtagaagaaatatacggaggaggttaagattaagtacgctccccgagaggataaggaaggcgggctgcatgaagatttagacgaagcaagaagtacccctaaaaggcaatagaagacagagagtttcttcagactaatgactgcttatagaggcaatgggaccgactgggatcaattcaccgcatgggctgccggtgcaattttgttttctctataggatatacaggacatcagaggaaatgtccaacgacagcggaatggttaacccggtgccaaccattataaacgccgagcctgaacacacagagattgtgattgctgaggttgcattgcgcttgcttggttgtcttgcatggggcaagaaaatcgcttcctaatttgggatgacaatgagcaaagcatatcttgctaagtacgaagtcaagcgcaaccaagcgcaaccaaaccatttcgtagacagcgctccacggaccttgatttcattgagcgaggcgtcctatcagtgtttatgaaagaaaacaacatacctttttccaatctcttacttctcttcagcgcctgaacattgaccgcggtggtgctaggtaaggtacctttctttttatatctccaggtagccattatataataagagtaaagtaaaactagtcacatgtgactgcatgtcacatgttggagttttctaccaaatggattaagatgggtggctctcaggtgacacttgtgagggtgttaaagaagtagcactgcagaaatcgcttcaacatatggaaagcggtcttagctcaggtgggagagcgtcagactgaagatctgaaggtcctgcgttcgatccgcggagaccgcaattcctttttaatctttaacctttgagcaggaaatactatgtaaggatggcttcaatgtgcagctttatcctgcttttgctgagttgctgggtcatagatgctggtattacttcagtacttatattctacacttggggtaaaaagctgtagttttaatttattttttaaaattagttccgatgcccttcctcaagacagttttgctacttttcaactttgattatccctcagcataaacaagtgaacaacaagcttacttcggcagaatttaatagtatagtgtttataattgtttaccctttgtaaatatgtttatacctataagtactgtacatttgaacatagacaccaatttctttctctcaactcatggcgaagagaagttcagaatgtatgtttatgcgtaaaaacactaaatgaatctccacagtattctcagcaataatgaaaacaaaacagaatgccacctctgtttgaaactgagggttcgaactagattgcagaaagggggatctcctatgtcgtcttttcctatctcaaatttaccatattcgcaactaaaaaaaagaagaagagctacatagaaagcgcttaacacatttgtgcatatatacccagtactgcgtcgcatcagctctcgaaatgttcttaccttcagtctaaactattgtttgttattcaagttgtggtgggtaagcctagtaaattgcattccgcattccaaattactcttctgcatttgcacggagtcatcatgagtgaccaagcacccttccccaatatcaattgaaaagcggtcttagctcaggtgggagagcgtcagactgaagatctgaaggtcctgcgttcgatccgcggagaccgcaattcctttttcctactctattttcataattgttggcgatattatccatacagtaaatatatatgttcatgtgaacttttgagtaacatgtaatatgcggtcttagctcaggtgggagagcgtcagactgaagatctgaaggtcctgcgttcgatccgcggagaccgcattacctttttcttttcttttcatctgcaagatacattttttttttaaaaataaattatttccccggccctcccttccatttccttttggtatgaggtcaaatgcccctttgcgactgtcagtcacaatgaaggataattacacaagattctgtggattactggcttttcctccagccctggtctatatatatctttgtaatgctattacaaaaaccactcccaaatcaaagttaaattagcaaggtatcactttttgtttgaatcgaaagtctctgctattaaacaggagaaacgctttataaataaccatcccactctgggtttcaacaaatagaaagcggtcttagctcaggtgggagagcgtcagactgaagatctgaaggtcctgcgttcgatccgcggagaccgcattcctttttctttttcttaaaatttaaaatacccttctaagataggaagataggaatacaaaaattagaagtcactttttatattaattccttggatggtcttcatggatacagttctagaagcatacttatttgattaaatttccaaggtgattattctattatagcaaactttatatcatcaagctctacgtacctacatcagtgagccatagtgagctttatttttttccctattcctggtaaaagagtacaaaaatgacattcagttcaaaacaagaagaaactaagaaaagagatgaatctaggctatagatagagtcagtgatagacttaatcacacatactttaaacatggatgttaggaagcaagtatatagagtatgaaatgaatctctttctgcctttgtcatcttcgtggtagcgctcatttgaattctgcgaagcatcagcgtctcctatattctttaatttgtttatattaaattaaaaaaatatacaattacaattaatgagtgaatatatgtaactaggctcaaccactctcaacaattgaaaagcggtcttagctcaggtgggagagcgtcagactgaagatctgaaggtcctgcgttcgatccgcggagaccgcattcttttttcctcttttcttcctttccccctttttcctttatctatccttcatctaccgtttatacgatgtcatacaagtcttaattctcagtcgtgtcctttttagtgacatagccaatggaagtgcatgaaagatctgaaaaggcatactgtgttcttttatacttgaaaaatctgggttgatggatgtatttagaagctgattgaagggtatttatctctttattttgtataatttatcgttgtcgtgttttaaaaagagaataacaagctaagaagaggtctaccaaatgatctgaaaaatgaacgaaacagagaaacgacccggtacttttgacacatgaataatttgggcaagcaggactattttattttagaaatcgaatccgcttttgtagagaaagtgatgcgaaggcacacaacttctatatagtttagtccatgaggtagattcgagaagcaatatcttctacaatccagtcaacaccatcaaccaggccctcgccggtcacagcactgcacggatgaatctgccagtgcctgtttttaaagataggagatccaagctcaagaacttctgcaatttgctcactcgagagtgcaccagctaagtcctgcttgttcgcgaacactaaaactgatgcccctgcaagtttctcttgctgaagcaaattatgcaactcatcgcggcaagtagccaatcgctctcggtccgcacaatcaactacccaaataagtccatccgtctcttcaaaatagttccgccaataagatcgaattgttgtctgaccgccaacatcccatacattgagctgatagccccggtgctcgagagttttgatattgaatccgagagttgggctgattgtgtcaatgtcttctccgttgaatttctttagaattgttgtcttaccggcattgtccaggccgagcatcaggatgcgcatctgcttctccttcagcttttgcttcttcaagattgtgagcaagcccattttgccaggcttatgctttcacctatcttcagccttcacgttgcctggcacttgtgcaagctcccttggatgcccaaccggttttggccaagtctggccctcactaccaaaccgtcgaaaaaagcaaagctgataggtttctcttctcggcacggtgcgatctaaaagccttccgtctcacgcggttctcttgatataaacaccacggccacgtagttacgtggacgacgcggtttcgcgctcgggcagttgttcgttcgattgagttttgctgttgggctactgttgaggctttatgcttctcttttcttctgcggcccttttgtttcttcgcttcttaaacttttatatagcacattctatcagacttctattcttcaattcgttcataaagaatagagtgacaaactgagcaaattgtcactcctctggcagagcaaacattgcaatcttggccgcggtgaagcaatacgcttttatagggccgcttggcctgactttaagcaaattttctcctgaaagttcaagagaacctctaggccgtgctatcgcaagaatcctacacgaatttcactttgtaggaggcacttgtggttagaataaaacttgaactagttgtgatggcttcctcaggactaggccgagctgttttctcggtctacaaaccgaatttcatgggcccttctccacgtgttgaggattctgtggaaatgcaacaacatgtagtgcgcattctaaagtcctttgaacggctgacaggtcgcaaactgacggaggatcccgcaaaggattggcttaaaatgcacaatgatgaatccattgcactcctctcggttggtttccaagaagaccctatccttaactacggtaacctaggcgcgcaaaagctctttgaggttaactatgaacagctcaccaccatgccaggtcgccttacggcgggtccgatggagcgcgctgagcgacaagaattcctcgaccgtgtggcccgtgatggctttgttacggactactctgggatccgcactagcgcgtctggtcgcaagtttcggattaaggatgctcacgtatggaatgttcttgaggatgatagcgagaaaacgtgtggccaagccgcattcttcaatacgaacatcgagtatgttgaatgatgtggcggctttgctgccagtcacctcaccttcggaatcaatcagaactcaattgtgcaaatttttgtt

SEQ ID NO: 119 - DNA, 21986 bp, Schizochytrium sp.
  source 1..21986: mol_type = other DNA
acttctccagctgatctaccgaaatcagagccttccccagctactcttctggggtcagagcctgctgcaactgatcgcgggtcctcgagacgcttctttggaacatcccttgccgactcttcaacgcacccaggaggtgtctcgttatcctttacacctgcgtcattaattgttgatgagccctttctgttttttggaacccagagacgcatgcgctttgtcttcggagttgccatgtcagggcctgatgtagctgatttgcctgaatcagagccttctgcaactgatttactgaggtcagagcctgccgaagctaatcttctggggtcagagacttctccagctaagctgccggggtcagagcttgatgcagctgatctgtcagaatcagagcctgccgaagctaatcttttggggtcagagcttgatgcagctgatctgttagaatcagagcctgacgcagctgatctgtcagaatcagagcctgacgcagctgatctgtcagaatcagagcctgacgcagctgatctgtcagaatcagagcctgctacagctgatctgccagcatctgatctgtcagaaacagagcctgctgcaggtgttgcaggttttgcgtctgtgtctatggcaattgatttgtcagagtccagttttctaagaaaaatcaccgcaaccttggtatttgggtgggacagtatcctcacaccaaaaagaacataactaattttgtcgatgttaagaataccttttttaggatccaagatattacccacttcaccgaatttggcaatttcttctactcgaaaagttaggaaaagttccttcgcttggacaggtaagcaaatgtgcaggttcacaatgttacgagtcgggcatttggatggtgcttcaatgaagtataaatttggaacaccgttcccaatagacaaaccacagctgtttgatgacccaatcagatctctagcccacttttcctcaaaatgtactggtagtcgttctgataacagctccccggccacgaactctctcatattttcgttagccataaagttgctccattggtatggaccgttgccagccacaaaaatcatcttaaattcatcattacaaaccatttgagtattctgccgtgacccaatcttcctcaaatatttttccccaagtgacctttcttattctggacacagacaaaaaagtgtatcctctgttgtacctgattgtttaaccgattcagatgattcaagatagcgaacattaatgtgtagacgtgtgactatattccccccggtcgccgcatcattgaagaattcatttaattggtttttttttggaataaggctttcccatttccgctttctttcttctgaatttgtcaatctcgaagacgcagcgtcaaatggaagccaaataagtattgccctgctaaaaattgactcaagtgcagaagcaagacttaattggtctccactagttttcattccctcacggataacctcacgttgtatctccagtattttatcctgtgagagtggaaggtgaataaatttgagggtagttacttcatcattttgtggcccgttgctgcgatgttgggaagccagtaaacgctccttacgttccttctgaagatggcttaagagttttttcagggtttctgcgcatagatggctttctgagcagagatcctcgagaagggttgtgtcaactctgtgtaaagaaaggcgtaactctttgatgtttgaacgttttattttattaaacgcgtgaccccacgcatccgcactaaggtggttgccagatagatcgagtaattcaagtttttctttgattacatctttgatgaaatccgccgtttccctcctgtcaatcaacgcatttttcgcggagatcgactctaacgaattaagttcatccgttagcttctttatttttccatgatcaactatttccttgaagaagccctcgtcaaattcaagctgtttgacttgatctgctcgatccttcactatatcaacaaagattcgctcgaggtcctgggcttcacagataggcaatggcagcttcttcaatggtgagcagtccttcagcaatgatagatatgtgttgaataaactgcgattttgcctttttagctcctggctttcctggttttgcagctgttctggagcctgagaataacccatgcctccgttctgcaatcccctcatcaccgaagtcgtgcccacagcgagtgccggtggtcagcccctccagcctcgacagtgcctgctcttatgtgccagatcgttgccctagacactgctcctgtataattccaaagactcggagccttcgtcatgaagaatgtgatctgacaatccatgagatgagagcacaacattcttagatccaggtgtgtatcgtatgaatcggtttatataccagaaacaataccaatcaattgagaattacttactttttgctaacccgctctcaagctaattttgtcaccattgctgcaattgatgttactatgaccaagcaaaggctaatgaagatgctcagtattccatcctaagaatatcaacaaacacctcgaacgagctggaattgcgatatcttcacgactctgttcattgcttcgctcatgttcgttgactggtcaatcgtgattgacaaatgaatatttctttaacttttttaatttaaaaaaggaaagatagagtatatagtgctacctaactttatgcctagtaaattcttaagaggaaaatacaagagatagataaccacctttgatagcgagaacaatccatttttgcttgcccatgacgtgaagaggagcaagcatgattgcaatcatgcataaaggttaactgaataaaaggggagattatttttctatttcatgtttgttgctttttctctttatctacttgctcatttgaatttacttctctcccataattcgtttcgcttagatcagtgctatctgggcgagacatactgcagtgaactccattcatattgagataaggtgccaacttaaacagagattccccattaaaatatttgtgggcggcttcgagaattgagtgaagcagttttacagttgctagaaatcgttgtacttccctagcttcctttgctgtcttcgtcactttatcttgaatgttggctatttttttcacttcattcaaaggctttttgtatttttcgttttttttagtcagccaagttatggatgcagagcaaaagcaacttcttcccagggtgttcatatgagaacacaagggtacaattctgccatttgaagcgaaaatatcatcacagttttcaggttcctggaaatagtgatatcgatggggatcttcagacttatcctcacttttctttgcagaaaggagcagaagcagctggaggaccctatgattttcagtcagctttttgactaaaccatgcttaaataggcaatcctttctccctccttgttggttgctacgttcttctaatggttgctcaaatttttctgaagctttatcccagtagagaagcccatatacatggtataagtgaatctcaattctgatttctacctctgtggctttaagtttgatgtcttccgcgttggactcagtcgaagtttccaaggaagtcctgtaatgtgccacagattctgtaacagcttcagtcatcctcgaagccaaatgcatcgtacgtctccttttgtatgatatggacatgatgtactgatgcacaggtcgcttgagctcctgcatgtctttactaatattggtcctataaattaacatttcggtaccttgaagtggtccgtgttccttcttaaagttctccgagaacgtttctaatggtttaggacagtctggttctgcagaatggtaattacaatcatactcagatagaatgtcaaagcatttttttgaaaatgaaatgaaatatttgaagggccccgcgcctccattttcgtcggttgaggcttctccttccccttcatctgaactgctgttaaagctataggcgtcatcatccgagtggtgatcatcgttcggttctggttccttattgttagcgaaatccaaaaatgttgcgtcggcctgactgacccgctctccgctgctgccttgggtttccgacatccctgactgatcttcttgtacaatatctatcgaaggacaggcttaagagagagagaaagggagatggcacgttcacgacaccacgttcaaagcaatccaggcggggatcgaactcgacgaccttgctggcctgtccaaagagtttcagaaactcctacgcgcagcccagctcacgcgcctccttggttctcaagacagggttccaggatgtgtgctcagagagagcggggagcgacgatattgttttgcctggtccctaaatgcacatcaccgctacgatttttacttaggctagtttgccaagctaaactatagtagtaggcagccgatggatgtcttctgagaaaagaaatagtcgcgcgtttttgttttcaattgcagtatttatttctgctacattcacggcaatgaacaaatcaaacgctaaaacaagaaacaaatagtctaattcgttgcatgatactgtagccatgatcaataacataatgaagaacagccagcatcaatcaacctagtccgtaactaatagtaaagtgttatataagaagaacttagaagtagtagtaatgctattctctaagtagaacactcctgtttatgatgagataaataatttatttggaatgacatcagcgaatatcaactaacttctatttgatgcatcttgtagacgtcgataatttatttctcgtagaagaacgttatttgggtgagacttggggcataaaactccgtacttatcgaaataaggtgcaatttcaaataaagacagcccatttagaaattcatgagcagctttcgaaatcgagtccagcataatgacaattgcttcgaattgttctcttgtagagttttgctgttcctgcattttttcgaaaggatttcgatacttgttcgaatccactgataatagccagttggtagccattttacatggtttaggatttccccaaatattcatgtgagaacacaaggggacaggaacatggacagtccctgcttggcgaggtgtgcgagatgtcatgttttcatcatgtatattgctttcaggctcagtaaaatatattatctcattgatatgacgcccagtaccatttcttctcgaccttaccggagttgcactaagaaataaaagaatttgtacaaccttggggtttctatggagcagttccttcaatgccgccttcctaggaactgttgatggtatttcgacgttcaaacgggtggaaccatcttcaactctactcatcaagtaaagaagaccataaacatggcacagatcaatttgaattttgttcgcaacccttaggcttgattcttgaagtgtcctgcggcatttatcaacactttctttaaataccgagtgcattctggtgtgagcccactctttatgtatctgttcaaactgtgcagatttgacatactgacacagatgtttctgaagatctgccctggctgggtgatcttctaggtccaaaatattatcagcaagccttactatgttgctaaaatgttgaatcgagctgtgttcacgaataaatttggtgatgaatgcattaagtcttctttcttcttgatcatttgagtttgatgacaacttatactctcggaacagtgtttcacatgctggtgagaaggaaagtacactcccactcgtttgaactgcgagagtgtcaggatcagtacttctattgacgggaagatcctcggaaactttttccaagttcacgtcatccaagttcacgtcatccaagttcacgtcatccaagttcatgtcatccaagttcacttccggatttacaatgaaagtctctatatcttttgcacctgttgtcctggaattcggccatcatctcgggctgatcttcttcaaggggttccgtccaaggacagttcttgaaagagaaagagaaagagagagagagagagagagaggtatagttggcgcgttacctagcgagaataacaccacttgaaaaaagcttatccagttcacgaccaacctcgatgagcttgccggccggaccaaagcgtttcaaaaacgcctaaacgccccctaactccagcacctgcctttctctgaacactggtttccgaggatgtgcgctcaaagagagctgcgagcgcgagcgatatggctttgcctgattcgtgattatcagaattcaatatattactttcaaactagtactaggctctattagtatttgatttcaacgcttcttcgtttcctacagaggtactgcacaatttaaagtaacggaagttgagggtctgcggaccctttttaattgctactgcagtataacatgatctagccttaagtcggcgacttagagcgggctcaagcaaacttgtgaagtagaaaccaaccaatgtcgctggattctcgatatcgaaggttgatattatttttatgttattttatttttcactgattataaaagtatttactcacaatgaaagaattcaggtagaagagactaagagttgtcgcgagtcgaaacaggatcagtgccgcgcaaagtcaaccttaagcgcatgtgaaatgaccagcctgaaaagtgttacacttccacatgacaagaaatagtggagttttgtcgttggatcgaatattaaaaaatgcgtcatttatgttgcgctcccaggatcaatcaatttgtgtgaagtggactgaagcactgagtccacttctcagtttgctgctgcaaaacgacagtagaacgaagcatactagaaatgaagaagtacatacggtacggtacgtacccaccaaaggatctaagatttggaatgtatttaaagtagtccaacttgaggctggcttcgttcaataataactccacggaattgcaaatggagcgatgaagcacagtatcgcccttgcaagttggagtatgaaaacactgcgatgttgcagatgagcgcttgaatcggaattaatgaactccaacaaaactgaaggcatctcgcatgaggccatcgcatcactgatgtagatttactgttcttggaagccatagcgtgaacacaattctgtgcaaaaatctactagcagaagagctgttgcagctcgtgctatctcaagtcgacagacaagagtaacaggcgaagcagagccgtgtcgcgcggcgagatattcaaggggatgtcaggcgctatcgtttggtactgcgatcagaggttggagtggaggaaactaaaccatggtactgaatgtggttacggtgcaagtggtagccagtttgcagagttgataagttgcactgatggtggaagaatttattccatatgatgtaaatgaattaaatcagttttcgcagaaccccgattcgctttggaggaggcagtggcactttgcaggcaccttcaactagcatctatatggaatgttgtgctgttctcgaatacccgtcttacctgtgaagcgcctgcgtgtggagagagagctgtttgcttgatgcgtatccgctctgttgctgcctcaaaagcaactcgtgctgcgcagcaggtcgagcaggattgagagcgtggctgctttgaaaaaaaaaaaaaaaaaactaacttgttactgatgctaataacttttccttacattgatgttcagcttgagcattcacaagtcacagtgcgtaaccaatttcccatgaccaacttgcttgatcttgtttgcttcaaatagtatgcatagggtcttgctttctattagtgcgaaaagcaacaaatttgaacaagtagagaaaatggtatattgaattgatgtaattaagcgttaacgtgaaaggcattttctgggtaaaacgttacattgagcattttgatgttatgatgaaagcattaaaaaataaataaattgcttttaatatcgcctctgtataaagaaaaaacaatttgcgagaccttgaccattacttctctattggtgatcctggtggaggaacagtaaggaatctgtcagattcatcagattctgaattcccggaatactcattattgtagggccagaagaggtttaagtcagagtggcaaagattgggggaatttctcaaattgttaaatggacttttgtgcagaaggaaaggacggttctctctcttgtaaagttcctccaagttttccgaaacctcagcgtggaagattgggcttacaccctctttcgaaaacgtcctgtgaaaaagatacattgcaacggagtatctagctttgatatattgctgcacgccagggaatgcattcactgaggcttctctggtcaattttaatatagcagaatgcgtgaaagtcacatcaggcactgtccaaacatctttgttgacaggtggtgaaagttcaggatatttgaggaagtgcatgaggttttcatttgtcaagacgatatattgactgaagaggaacaggttggtgatatagacttgcagcttgcgccgagccataggagaatcgagggtgtaaatgaaatgagtttcgtgcagaggtatttctggctcaatacatgtgcggtacatgcatttattgtagacggaggctctgacaagttctcctctcaagtagattgctcttcgggcattgtaatctccgaatatacgtacagttgggtaggcaccatcctcgtcggcatcttcagacgcaggaacaaattcaaagcgaattggcttggggttttggacattgaaaacacaaaacaaccacttgaagtcggtgttcaatgtggttacgattctgggataagagtttcttagcatacttctactgttttgatacctggcagcctcaacagcacggcagacttgagctaaaaaggtatttgtactactggtctcatcattttggcaatatttcttgctgagatgatccgtagatgccagcgaggatgtactgatggtcgtttctgttatatgagatctggtcgactttcctggggagatttgaggcttgacattggccgattttgagggcggtgtagcgggagatttggctttcggctgaaggaagagtgagtaacgagctttgacttggtggaaagaatggcacagtgcaacttacctttatgtgcttaggcgtccccgtcggcggggttgtccgggctttcttgcttttcggagtagagggactagtttccagctcggattcatctgatgttttaacttgtgggaagtaaacgccagggtgtcgttctttaagaaggttgacgatttctgcgatctgattagagatctcatcgagttttctcttgtggtcttcgcaattccgacatgcatttagtccggtggaaggttccaatgatagtgaagagccacgttttttaccagacgctctggcatgtttgtgtggcgcaggtcttgccgtcgaggtcgatgcgagacgcatagcggcgattcttttggacctgcgaggcatggtgaatgctcaaagctgtcgcgtgatgcgatggggtttgaccttgacttcgaatatctggttatggttttgcaccgagcgcaaagccttgagtgtgcttctgtttaagcacttctttattaactaactaaaattaatcccttcaatcccccccataaaacctttcgtgctattatggcatcacggcaagatcggcaaagatctcagctccttttcgactttcagccttgcttcagcaagaccacgtcctgcttcgaccagatccaccagtcagcgtacgagtatgataaacccgtctactcgatcaagccttgacacagacttctaacctgtgcaacgcaatttctcagcccagttcgatgacaaaaaccgttaaaatttcgataacttatatttcgatgtgcttgtttcatattaatcatatattatacttagttagatctttaataagaagtggaggttaggtaagaaaatggggaggccaaggaaccgccaagctccaaacactgcaagtggagcaaacctcgaatacaaaccagcaaagttctttcaccggaagtttggggtctcagcaagcgcccttcggggctgggccgatggcggacgcgtgcgctgcgcgcgcttccccggaggcaagcgcatctacgcctgcgacgatgttgggcgcatctttgattgcggttccaccggccgcgagcaacgcagctctggatgtaccgttatctacgccagagtgtcctcggccaagcaaaaggaggacctcgaacgccaggttggcgatctccagcgcgcctacccagatgcttccgccgtctacaaagacatcggtagcggggtcaatttcaaacgccaaggcctgtgctccctactggacgcctgtgaccgcggcggaatcggccaagttgtggtcatgcaccgcgaccgacttgcgcgaatcgcagtcgacctcctggaacaccttttcgaaagaaaaaatgtcaaactcgtggtacacggccaagatgcacatgccggagacgcagacaccttcaccaaagacctcctcggaatcatcaccgtctttgtggcatcgcatcacggaaaacgagcagcgcaaaatagacggcgacgacgcagcgaggaagaagcgagctcgcacgaaggcgcgcaagaccatcaagaaagaatatgaccttgtccgtgccaaaaaggtcagggtataccctactaaagatcagcgtacacagttgcttaaatggtttggtgtcactagaagagcctacaatactggcgttgcgtttcaccgagacgtggcgaagggcgaggaagaagccatcaaattgcatcaagaagcgtgcatcaaaaaggattccaagacgaagcaggttttagtagatgaagatgggaatccccaaacgtatggtgccctctatggagaaaagaaagccgttcgatctaaagaaaggcatgatgctcctgaatgggttctcgaggtcccacaggctatccgtgattccgggattctggatttcttcaaggctcttaactctggacgagccaaaaacgaagaactcgctgtacaaaagaaagttcatgagcaatctttttataagtttcggaccaagcgtgatgaatcacagattttcgaagtgaacgcacgtatctggaatacggagaaatcaaagaccaccagctttctaaaagagtttcgtacgcgcaaagaaaagttccccagtcagattaagaacgccatgcgtgtgcaaatgaatcgccttgggcatgtgtacttctgcttcttacgagaagaagaaaagcgtccaatggaccaggcacccaaggcgcaccacagtgtcattgctctagatccaggtgttcgctcgtttcagacgatgtatgatgctgatggccgcgccattgaatggggcacagggaaagattttagaaccatattctatctctgtcgccgcgttgataagatccaaagcaggattgataaagctcaagaaaataaaaagaaaactgcatacgatttcaacacccccttgaagcgcgccttctatcgcgcccaactcaagatcaagaacaagatcactgagattcaccgcaagctcgcgctttggctttgtgaaaactatcgtgttattctcttgcctaaattcgaaacctctaagatgagcaggaggatggagcgacggatatccaagaagtcagttcgaatgatgtgtcgttggtcccattttgggttccgccaggctctcattcataaggctgagatgttcccgtggtgcaagcttgttctttgccaagagagctacacttcaaaaacatgcaatgagtgcggtaccctccaccataaactcggggcatccaaggttttccaatgccctaatcccaagtgcaaccatgtagcagaccgtgatgtccatgccgcaagaggcatccttttacgctacctatccaaggacatgatttaaaaaaatcatttcattgagtcgcgggttagtctaactagctcgtgataaaggcttagctctatgaaatgcaagttttgcaaattttgtagtttaaaatctaagagttcccagttctccccatattacccttagcctaagggcgcctgctcgggggcatgcgctaactaagggcgcctgctcagacctctaataaaagacacacttttgcttaacttggtcacgaaattgcgactgttctctagatttgcaaatcttcattgtccgcagcgccgaaggtgcacgcccaaaccgggagcatcccctttacggttctggaacccggctgtttcattgcggagccccgaagtgacggagtaaatcctctttttctccaaagactgtgttggcggcgatcaatcaatcaaagttgcatgcactcttaataaacacactcaaaacgaaccattcgatcactacgaatcaaaagtaaacctaaaatgtctcgattagaggaatacgcaatgcccgtcagtcgataagctgtgccattcctccgcgcgtctcactcctttgcagccgagcctctcagttcttcatcgcacaatggatttcctccttggagcacggagtcgcagatgcgtgccttttcacgaagtttgcgaagaggttctgtaatttgtctattggcgtgatcgatttgcactttgacgcatctattcagactcttcatcgtcgttgttcttgttgttgttgttctcgtcgtcgtctgtgtctttgcagacgagcaattccgtggctacaagctcgttcggctctgctcgacgtcaacacagagccacttggttttctgtagttgaggccgctgccgtcgaggctgcaaccagcgaggacagcattgctccggaggcaacttcgccttcgggattggactcgtcatttcactcgggttggttttggagaaggcaggcgagacttgcacaatggcgatggccacggatctaagctccgggtttctaaattcaaggcgcgctttctgcagcaaatgacaacttagagtcaacgcggattgtcttggaaatgtgacttggcagcacttcgcgcggttgatggcaaagaccaaggaggcggaaggcgaccgaagttggtcttggagtgccgtgcgacaagcttgggcgaggcggagtgaaatttggagcatggtagggctccgggtcgcatgtggaatgctaatgaggcggtcgaagaaggcgaataaatgctggctggactccgtcattctaggccatttgaagggccgcaatgcagtcaagctgagagcccaatcgtgaattttatccttcagagagatgtctttgttcaagatcttgcagctctttggagctattcgctaaaagcttcagttctccatggatttcttgcagaattagcgctatataacactacgtactacaaagatctcgacaggtgtacatacatgcatacttaatgaagcatctgtccgggctcttgaaaatatgtcttagagcgatcgaagttcacatggtctgctgagatggacgggattgccattgtagccttcaattggcattttggagtagtaacaatttgctagtcacttttctatggcttttctaggtaaagctttcccctagcaccaattagccaatactggtacgagtgttacccacggctctgagttccgcaacatagaaaacttctacgagctcgacagaaccttgtcttctttcttgactgcaacagggaaaattgcacgctcaagctggactagaagtctcttcgcgagagtgctgtactcagaagccgaaacgagtacgactgaaatattaattctcaaagctgaaggaagtcttggttccttgccttcagatcaagaatcacaacaaatcacgtgcagtgctggataaagtcgaactgaagatcttaggttgccaaagcacacttaacaggcgcacagtcatgttgtggtggttttcatcgctgcgttggcctcaggaagagcttgtctgggacgtactcggcaaaactgctctagctgagcatattgaagttgagcaggacccccaaaaaagactatcaaattgtagatatgctctacgtcgggcctctgtggagcgccaaatcgcccctgtaccagttctctgcagggacacatacgtaggctctccagcaaatgttcactacatgtctatccaaaacttttgcaacttttgtgatcgcttgaagcagctcgacggccaggatatcagagatgcttctggacaacgaatgaatattatattgaaagatcgtttgggcctgttgaaggattatgtatgcattcaagatagacttgaatcagaagatgattttcaaagccgatttcgaagacttgtagatggtctgagggatattctgaaagaatatctccagccatttgacaaacagaagcctatcagtagtgcattttctacaggcaaacctgatgatctcattcgcctagatgatggtaccgatgaatgcccagctattctggtatgcgaagcacaacggccgtcgtactttggcaatggctccagagatcttaccacccgatactgcgattttgattgcaccatgcacaaacatgatcatatctatccaacgtgggaaaacacacacgctcgatttgaggatgatggtcatatacaggtctcgcccattcgccagctctacaactacatgctcatcaatggactctatttcgggctcctctactctttcaaccactacgctggcttcattcgtgactgcagcggaaacctcaccatcatcgagattgtccgaagcaccgacacagttcctgcagagccggtgtcagctatgcagtttctgatcatgtggattcgtctatcgtatttatatccgaatggatttgaggcaagacacaagtttccgaatttcaatgtatgcacacaccacgattgtgaaaagcgacacctgccaatgcgtgcagcacaacatgcgaaatatcttgtccctggcaatatgaatctaggtgccacaaatacagagatgacatctcttccttcgtctcgcagtagcgagtatctcccttcgaatagactgccggtgttcttcgcagattctctaaatcgtgtcgtgcatttctgtgatttttactttgaaggctggaaagcaggcgacgacttcaaggccattgagtgggctcgtctacaagagcaaacgggtcttctcaagtacatggaccttgcaaaaccggctgatcttggcgaatatcttattgagccactgagaacggagctgcaagcgtacaaggctcttgaaaaagaacaaggttttgcgattccaaaggtatatggtggaggcatgatggcggacatgctctttggaggtatatttcttgaggacgtaggagacagtcttgaaatgctcgatgacaaggctatctcagatgagtacatgcggaggactgtgattgcattggatcgaattcatgatttgggcgtcctgcatggaaatcttgatgatactcatatattgattgacgagaagaccggtgatccaaagctagtgggtttcagtcatgcaaagttcaagaagaatatgaaggcagaggaatggagtgttgctgttgaggaagagaaagccatgctgagggaaattcttgagagttatctaaaccgggctcagatttgtaaaggatcttgtacttctggcgacaatcaggattgttccggcaagaaggttagcaatgtgataatatgaagactagataaagctacacaaattaagaactattttgccatgattttcatactgttatgggcaatgttgatggcttgaataggttttagctttgaaggtccaggctcttgtggcgacttaacgtaaagcttacaagttataatggaacaatggtaagtcaagtaagctctgtcgtgttttttttccagagcaaacgttttgaagatagttgctagcaatgaaagtgttgctcattgagacaccaaagtttatgtgttggtcatagactctgaagcgaaagcgactcggatggacgttggtatgattcatcttgatttagacgagaagttcattctggactcttagcagatacctttgcattcgcaagaaactgattaaaaaaatgaaattctgtccactcgacttcaataccgattctactttggcccagttacttcaaagcttgctttatttggacttctatcgtctttagaaaagtctgtcttattccctgcttgtggtggttcattttgcaaaaaaagtattcagacaaaagttaatagaaacaattttacataacacagatcaggatggggatgacacagtagtggtcgcggaggtgatcagccaaggaacgaaagaaaagccctgttcgttcgtacaatgctggtcgcaaacgctggactcctgggttttggaaacgaccggactcctttctatcatcttgcttggttttgtgcagacatggtcgaaacacaccgtgccttgactcttttctaagagcgtgattccatgttgtaaatccaatatccacttcagaaactattttttatattgtggagctctaagatcggccccccaatgaatcatagtctatagaatagtacctattggtgttctctgcaatgccagctatcgcttcaaatcctgtggtccaagcacaccatcaccttgactcttttctaagagcgtaatatcatgttgaaaccactataaaaagaaaaaggaaaaaaaaggtgcaaaattctaaatgagccatagtctaaagaatcggatccattggtgctagctgcaaaggcggtcatcattacaaacctgtaacctctcgaatgccatatcgctccacgcgtacgcgttgcttgtggatctcagtacctatatggacatggcagggaaaagacttcaagtaagtatttaagtacttgcaaacccaaaacctcaaacatctaaaatcaaacaccaaagacgactagtaagaactacatacaacaattggtgaagatggtaaacaccccttcccaagacaaagtaatagaccctgttcagacattcacagttctgatggtgtacttcattaatgtattggagggatacttgaataagaattccaagttgtccttttcaacaatgaaactagctggtgaccttctcacaaaagaagttcgtgacagtgttgcagaagttagtgtgtacaaacgcacatgtgatcacgaaaaatatgacatagaggcaaggatagagccagcagaagttcagcttgagcatctcaaattggcactgggggaatcgatgtgggctacattgtgggaagaagcgcttcaaaaacaaaccctcgtatgcaagccacaggattactccgggtattacctccctatcttgcgtgggtcaaactcatggacaagggtcattagttgctttgacgacggagaaatgatgaagaggaataatgaacaatttgtcgtgcgtatctctaatgtcgaaaaggtccaaaacctttttctcgaaaattcttatgaggcgaacgccacgaactttgtttacaagccaaaattcgaagacctcaacgaaaaatggttattccacggaacttcaaatatctccccagatgcaatttgtctcagtacatgtggatttgatcctcgagtttgtaaggagacgaacttaattggtcgttctatacattttgcccttcattcgcacatccccgttaggcattatgcacattcccatggcaagtcagagtatcaaataatacttgcacgtgtccaactaggaaaagtttttgaaaccaaaaagatgacgaatgctattcgacctccactcttaagcgaccaaatatatgaactatacgactccgtgagagtatcagcaacacatctagcaacagacgccaacaaagccactatttatggggttttcgattctcgtcaagctttgccggaatacctcattacttttaccaaggtactcgtacccaaacaacccagtggctcgaaagaatctaatcaatcgtcatcaagaggatcaggtggattcggatcttcgtcaggtggattcggatcgtcatcaggtggattcggatcagcatcaggtggattcggatcgtcatcaggtggattcggatcagcatcaggtggattcggatcagcatcaggtggattcgggtcttcgtcaggaggatttggatcggcatcatcatcaggaggattcggatcatcatcatcatcaggcggattcggagcatcatcatcatcaggcggattcggagcatcatgatcatcaggcggattcggatcatcatcatcatcaggaggattcggatcatcatcatcatcaggaggattcggatattcatgaggaggatacagtagtaactgaacaataagatttattctgactttgattattttttcaaaacccgagagtcctttctatgctcttaatcttgaacatccaacgtccatacctcatccatcaaactcttgggcaagtacatacgacacttgacagcatgtccctaagtatttaacccataaagtgaggcccactcacaggtttaaaatatagtacacgaatcaatgacatttcttaaatcatgttctcaaattgtcagcgcaaagggaggccactgatggcgtgggtgtcacgattgtctacgtgcttgcatttggggcattcaaattttttagatggtccatgcttgttgtgaatggtacttaattcattgaagcgaacctctcagcaaataactagattacaccggggaaaagcttgactttgggagtgggtgtttgtcggaagccgcagtggcgccagcgacacatcattcgaaatgtcttttgatgggtcttgtaaacttgttcaccatctaaaaggtttcaaatttaggcaaaagattaacacggaagttctcacatagccaaagtgcagtttgctgtggatcttggcagtcttgttcttgatcctgaaaagtgctgcctttcttttgaaccactttaccacggattttgtcggcgcggcgacagggaaatataaatttttttatgccttcccctgtgtcctgaatggctcgatcatcgtagttcgacataagtgcacgtcttggtccaaagcaatcgtgctacggtgcaaaccagctgcctggtttactgggcataccttttcttcatgcaagaaacagaaatagccaacacgccgaagcagcctagaaaaacaaaacaaaaaagatacactataccctattctgtaatgttagttctcctacaatcatagtttctgaatagactttgcatctcctaaacgcactcatgctcacctagtttctcaaagattcgctatttcgtaatcttggacaaacacccaatctctgccacacacatctgcagctccattggcccttcagacgagtgggccccagcctagtattcataagtgaacttgaaagaagattatgaaatataaataattggggaaaacgctgtgcatctgcactgaggtgtttaccccatcttgctggttcatcagtagttgtgcttgagatttatactatcacattgttgtgcattttgtcacttgagttgacagacatttgtcttagcctcgtagcatttgcagaacttgcagctccaaagtacttcatgatttaggtctcactaaaactaagaatatgataagtggtaggcccgtctttgttggtagagtaatatctaacatgaagtgctagcacatcctgggtcaaaatttagttgcctcaacttctacaagctagacagagccttaacatgtatcagcctccacagcacaacaagagcaagagatactcagaaccttaacaagcgtgctcgccacggcagactaagagggtgctactcggtctcaaacaagcctacacctcgagtaactcctctcaaagctgcttaaagctccttgacttttgccttcagaaccaggagtacttaaggctgactcgacaaagcacgtgcagtgctgcatacattcgaactaaaggtctggaatcgcccaagcatactgaatagacgcacgatcatgttgcagtggctttcatcattagtttggcctggcgaggaggatcttgtctgggatgtgattggcaagactgctctagcagagcacatcgaactcgaagaagaccctaaaaagagattgtccaatggaagacatgctctacgacgggttagtatggagagacaaaagactcctctaacagtcttgggtgcggataaatacgtgggctcaccagcgcacgttcattttatgtctatgcaggacttttgtaacttttgcgatagactgaagcagatcgacggccgggatattagagatgcttctggacaacgaatgaattttatattgaaagatcgtttgcgggtgttgaaggatgattgctgcgaatatcaagaagaattaaatcacgagagtcgattccaagcccgcttccgaatattaatagtccatttgattaatcttctgaaaccatttctgacccctttcgaaactctccttggtgttgacgataaaaactctacgggcaaacctagtgaacttattcagttgagaaatggcatgacaatctcggtatgcgaagcacaacggccgtcgtactttagcaattactccagagatcttaccacccgatactctgactttgattgcaccatgcagaaatatgatcatgaccattcaacgtgggaaaacacacacgatcgatttgagtatggaggtcatatacatgtctcgcccattcgccagctctacaactacatgctcatcaatggactctatttcgggctcctctactctttcaaccactacgctggcttcattcgtgactgcagcggaaacctcaccatcatcgagattgtccgaagcaccgacacagttcctgcagagccggtgtcagctatgcagtttctgatcatgtggattcgtctatcgtatttgtacccgaatggatttgaggcaagacacaagtttccgaatttcaatgtatgcacacaccacgattgtgaaaagcgacacctgccaatgcatgcagcacaacatgcgaaatatcttgtctctggcaatatgaatctaggtgccacaaatacagagatggcatctcctccttcgcttcgcagtagcgagtatttcccttcgaatagactgccggtgttcttcgcagattctctaaatcgtgtcgtgcatttctgtgatttttgctttgaaggctggaaagcaggcgacgacttcaaggccattgagtgggctcgtctacaagagaaagtgggtcttctcaagtacatggaccttgcaaaaccggctgatcttggggaatatcttattgaaccactgagaacggagctacaagcgtacaaggctcttgaaaaagaacaaggttttgcgattccaaaggtatatggtggaggcatgatggctgacatgctctttggaggtatatttcttgaggacgtaggagacagtctcgaaatgctcgaagacaaggctatctcagatgcctggatacgaaaggccgtgattgcactggatcgtattcatgatttgggcgtcctgcatggtaatcttgatgatactcatgtattgattggcgagaagaccggtgatccgaagtttgtgggtttcagtcatgcaaagttcaagaagaatatgaagatggacgaatggagtgttgctgttgaggaagagaaaaatgcactaagggaaaatcttgagagttatctcaaccggacacaagttcccgattgatccttcattttcgataatcctacggattgtacggggaatatgtcgcggcgagacgattgattggaaggtaattttagaaaataattccacacaaaacatcatttaggcttgcttcttgttcttctcgttatatcgctgcgttttcttagacatgccaatcatggaatcatatgataaagaatatagaaggggcatggttggagtcaactaaaaaatcaggactgctatt

SEQ ID NO: 120 - DNA, 21995 bp, Schizochytrium sp.
  source 1..21995: mol_type = other DNA
acagattggaaaaattaagatcatcatcatcaatacggcctcgattatcggtgcgaacgacactaaatactgatataccttcaaaaaccgtgtttggggatactgtactgcaaacaattggggtattattatggtcgaaaagatgttttgtgtcattacgactcacggcaatagtgtaagaagaaggatcgctctttgcaaaatcgctgaacttacgaatttcgtagatcccgtagtcaagtatgtcgttgatgatgacaaatcgatgacgctctgtaagcaacctcgccctatcattatcgaaaggcgtgaaatcccttctgagtttgtcaaaatcagagtaagcgtagtttctatccaccgacttggagataacgaaagcgcacaatcgaatgtacagtgtgtcaactaggtcatggtatgtgccaaagtttggaatgcaagttaaaaccatactgctcatcaatttgcaactttcgttcaatgttgcaataagaatcggggacatctggacacgaatctcccccgagtttgacctactccccgtcttgatgatgctgaaaatggatgatgctgaaaatgccggaatgctcggctgcttcaatcgttaggtcaaaatgaaaatcctgattatttgtagaaccaagtgctgaattgaaattccaatttttgtaaagaggcatttcagtgatcgccaagatcaaaagaaccttcagtgccctgatcgagtaatctctaatgatagtaccacgttcacgtcccgtaagtggtgcatctgaaaaatcaatggactgtgctatttgtgattcccacgtggcgagagaaaagatactcgaaagatactgaatcatgtcgtccctcatgtggaaggtatcgataagtagatcgggtggattgcccaaactttttagtgcatcctttgacgtttcatcatgggggttctcacgcagagtatcattgtaaagattgatatcacgcatcttgcaacagaagtcaagaagctttctgccgtacgaccgagtaaaaatatgtctcagagcaatcgtgtaaaaccgtggatggccacctaattctgacataagccctacaaaatattcattgtcgaaaatacacggccatgcttccactctttcatcgccgatagatgtattatcagggtttgaatatcgaatagcctgaaacagaaccttctttacaaactgaatttccaagtctcgaagtgcatctttataaccaataagacttcctaaggtatagacctttgtgccagttagactacttacagtagtcacacgaccgtgatcagcttcacttgcctcgatataactggtcatgcccgtgataatggggtagacgcgcatggcatcgtccctctgaagtaaaagtatatcagtacatgcctgagtaagcatctttgagcccaacatatcttctctgtactcgtctaattgaagaaacaagagatctatttcgagttttcttttcagcatcgcgaggaaatcgattagtttgaagtcgtatgcgtgctgcataagagactgtgcttcttggccatcaagacctttacgattcgtcgcggcataaagcagaacagcgataatatacgctattctattctctttgttgtcacaatcattacttgtatcggtgaaaaacagtgcagaacgtaattggacaactgagcccatgcgtagacaaaaataagacgcattcttagaatacgttctacgcgttttatggcacatagtcctcgctatttcaaatcctagacgcgtcttaccacatccacttgggcccttgatgatcggaatcgccaagtgctgtggattgatgttaccttggaatatcgtagataaacgatcttcggtgctttcgaagaattcatgagtcatctccgtttccacataatcaaatgtgtaattgattttaatggcttggtcctctatcgtatcgatgtattcaaccatgttctccaactcgtataaagttgtatgcgtgttgagtgcaggttcaatgaagcacttcataaggacatcagtagtttcatgaatcaattctgttacagtacttgtgttcatttcattaaatgccccaccgcgttccacctcttgatttggcgtcataatggtaccaactaatgcttcgattcctagatcagggtttccttcggctgctgcgaatatgaattcacatagaccacggattgctttagctagactatgaggagatgcacttgcagcccagatagttatctgttgcgtattgtacgtcccttcaataatacgaaatcgattcgtatcgggatcgtgtcgaaagccttcagatatagcactctttataaagtccaatgctgttttggcgttgctaatggtatgtgtgtcgacgtattggagacaggtgtctaaaatgtcagttctctgtgcatcagtatatggtctttgtgtggcgcgagacgccttagacatgattgcagcgcaaacaaagccattctgtgtttgcttcgttcacaagcttacctaatcaaggaatgttcttggcgaagaataaggtattgaggcaagtaggtatgaatcgtctagctaggacaccggcactgatcaaatagatccctccctcgcggggctagtcagctagccgcctagctaggtattaagcaaacgatcggagcgccctggtaacacgggagaaaatagagtggtactgagagttgattaatctatgttctactagagcatgcacctccatggcgttgttcactctcgcttactctgtcttcttcccattttcgttttagtcgctcgatattctatgcatcaatctaaaacttccaacttcctttgttctacttatttgtatatcctaactttaatacaatcaagcctaatgatcaacccccccccccccccccccaatgatttggaatttctatttgctgcaacgacttgtcgcttgaatacaagagcctttcatgatgcagtcgtcgggctaggtttaggcgatacgagatcattcgaataacacttattttaaagtggtttttaaaatgcagaaaaatgagtcaataaaattcttgataccagtggggccagatgtaatgagagattgtattacttggtttcatatcagcataaacttgggtttatgaagatctgtgtcgagtagcatcgcgattgattctttggtattaagcataatttgccgcacaaaatgcaattcaaatttatcttggttactatggacaaatagtgttcagcagatttatttcaaaatagttaacatcgaattctccaaggtactcaccgtcgtcataaattcagtgtatcattatgccaggttcgagctcaataggtactttttagagattgagtatgtatataattgattcgattgtacctcaaacaagaaaattgcttagctatagttgaatagcttcttttacgtagatcaaactcaagaagatgcaatagcttactgaacttttcgtagcagagaatctgcggatttaattgtactcctctgttctacaatagtacaggcaattgtataaaaaagatgataaggattagttcataaaaactttcatgagcaaggccacttcattacaatcataatcagtaagtacgtgctgtagatacatgatcatgtcgtcgtctctgaattcgttttgagtttccttttactttcctcggtgcctcacaaatctccatggcgatcgtttcttaagtgaaatagtcctctagcagtatccaagctagttatttttattcaggtgaattatagcttctattatcaatcaaatacaatttctcttctgatattacatttggaatctgcttgggagaatggtcgcataaatactaatgtttgtgctcctcgcgcactcaacagtggcccttgtcgattctaaataaaaatccctaaacaaaaatttacacgctcgctcattccttgaacaatgcctcagaggagatcatgaagaatctcgagctctactatgagcctatgactttttttgcagatgggaggataggactacaataagggtaagtaaggctagtctatctagctatgggatacaagagagcgcgtggactttaatttaagacgtgtacgaaaagaggatgagggaataaaatacgaggattattaatcaagagtttgagccacaatgagtgattgaaaaacgacgcccaatgcggattccgcggcaggatctttagggctttgacgacggcccacggcgcttcgaggtgaaagactggtgacagctgcggcgactgtgcagtacaaactgatagtcgaggccgtggatatcgagctgtgcgactggtgcacgaatgggaaagaactggagatccccaaagtagtgataaacgttttttgactgaccctgtgcctccgtttgtgctgctaggttgattgctgggggcgaacgcgtgcggaaggaatagcacatgaaaggtgtcgctgcgagatcataaagtaaaatatacactctagtactgcaacgaaacaagctctggagttaagaatggaaactccgcttctgggagggcccgagggcaatgtcgtgaacgagatcgaccggcaaagaatgcgagtgattaatggctcagcaaaattcgaacgctaccttctcaaggtcaaaactcaaaaatggttcataatttctttttggacaatccttactgctcttgggtttgtttatgcttcaacatttacaaaacttggtactgatcatttacagccaccagcatcatcgaaagcagctcaggccgtggctgagtttcagcaaagatttgaacttcaagctcagcaagtccctcttattgtgcttgtggaatgtagacctcaatccaactgcactgacgttcgccagcctgaactgaaagagtttcaccaagcgctggtggatcgcgccgaagaatacaatgaaacacattacaatgtgattgacattatgggttactatggctttgagggaacacttctggataatttaaagtcaggatttgtatcaaattctggggatgtaatgtttatcaccgtgatggtccgcacgtcaaatgagacttctgcgcgacgtcattttgtcaattatcttgatgaggttgttgacatgcttaacccagatcctggtcaatatgacatcggcctgacagggtttgatgctctcaataatgagaataccggagcttcatccaagcaaatcgcgcgtgtcgacatggttaccattcctcttgcaattctagtgctttggtatatggtaggctcctggcgacttttactccttgctaccatcaccatggtgataagtattctttcaggtatggttaccattgtattcttcattgagggtcttggtgcaccacaacccgagcctacaactactcaactagtccaagtaatctcgttggccctaagcgtggactataatcttttcctcctcgggcgattccaaactgaagtcaaacagggtgtatctcctccactagccatatatattgccatgcacagagctggtcatgtggttctgatgtccggcgttaccatttttctcgttatgctaggctttgtgattataccaacacctacaattcgcatggatggcgttattctttccacgggtattgcttgttgtatcgcagttaacctttcgttagtgccagctgctttgtacgcttggccaggtttctttgcacagaatggggcacactgtcgtacaggtgcgccagtataccagcaagctgatgaactgtctgaaatctcaatgggctatgccccccttgaatcctcctcacaagtccacactctggaaggcgtgcatcccatgtatcgcggatttcgattcaaactcacgaaattaattgtacgttggccgtacaaccttattgtgatcattggtctatatgccttggttgtgcctcttgcaattcaggtagcacgcattgacatgaaccaaaatattttacatctcctccccagaggctcgcagtctggtgctcgcctgtcgcgcatgtttgatgactttcctggaggcacttttgctccatattatattttaatgactgttcccaaaggcgaaagtgtcgtccgtgaagatacattctctctagctcaacatatcagtcagcgcattgtggatgaaacatcttgcacctcttcaggtgttatgtctcctgcttctgtgggcgggcttcacatcgggccccttgaagctacgggatttctcacccttgctcattcgcctttttgtcatttaggattcgtccgtgaacacatggcctgggcatgtcgacgcgctgtggagtactcttatctatggtcgaaggcggtcaacccgtcacaagatgcgcttcttatcgacattacagttccttttttccctttcgacgcccacagcagaagcttcatcagccatattaataagatgctagaagaggaggtgtttcgtattgctccaactaaagttgagctgtctctgaacggattcgaagtacttcccaatgcgattgaaagcgaggttttgagtatctacccgttgctcgtgacgctgactttgcttgctgtttttatcacattaggtgtgatgcttcacagctattttgttccagtgcgtctactactcacactgtttcttcctcttgcgtccgtatttggatttgcggtacttgtttaccaggatggaattctgaaatggacgggtattgcctcactttctcctgcgaatggcttcttatggtcaattcccataatgattgtgaccatgatatcgggacttgctttagactatgatgtgttgcttattagtgcgattgtagaacatcgtgccggtggctatgatattcaggctgctattgtcaaagccgtctgcgaaacaggctcgaccattactgctgctggtattatcatgttttgtgcttttggaggtctcttgctcagtacacaaaatgtgattaaccaagctgggtttcttctctctacgagcattttggtcgatacctttgttgtgaacacgctgcttgttccagccttgatttctatgggtgataagtttgcgtggcagccaatggagatgccttatgatcgtctcgtctcacttcgagctaatgaatttcctcaagatgaaaccccagagaactacaatgacgcttattaacgactcctgttttgttttagaaatgcctcttaacctcgcattcccaactatctctttaaatagatatcttcaaacaagaggatggtttttgctgacatctaatgagggtgttccactatcttttagaagaagtgaaggtgtatattttagaatgagaattgaattacaggtagaagtgccatggtaaatttgaacaaatttcaaaagaattcgaattaaaataacgagacagcaacgatctccaccttgttttctgcaccaatcgatactgtaactaccatatcactataccttgcaagacgcttttggagtgggtaacgtagcttcccttacatattgggaatctagcatcctggggcaactatgtcgcataataatcgccattgaagcaacgtagaaacaagagacgaagcaatcacagctattctctccaattacaagcgtggcagtggaatatttattttaaaaaaaagcgacactttgaaaaattaagatagcatgccaacatgtttatctgattagctacgttttatggctaaacctcggcgactttagagagcgaattactctgcttccttctccagaaactcgcgaacgcagtcgtgctcatactgcgtcttgcaagctactacgagttggtccatgtcccacaaattaagctcaggctcgcgtgccgcacgtgccagcacggtagcaagtgcccgtgcagactcgcgaacagcctcgggatcaccgcgaggaagattaccaagaagtggcaagaccaacgtgtggatgtgtctctcgttcctggcacgatcaagtgccgcgaggtagcggtcctccagagtctcgcgagattcacctcccctcgagctgacgatgtggatgatatacttgcttggcagttcgaaggcaggcgtggtgatgaccgtcccggtctcgagcatggagatccttcgctgcgccatgaaagtctcgcacgaaaccgctaggcgcaggcctgcctggaggaaggcttgctcccatactccacccgggaatgaattcacgaggcttggggggcacgaacgcacaacgcagtcagcagccatgttagttggcacgccctgccagacgcagatgcggctgcagagatccccaaaaaggcgccagaggggctcatgctgcagcatatgatctatatccgaagccgcctgagttctgacctcgttcatgcgcatgcgctggtccatctcgtccctcaagctgttcaggctctccagcgactcgtgattaaaggtgtttgctggactttgcacagacctcgatcttctacggcctgagggtatgtcctctggagcctcatctgaattactatcggagccattttcatcagaatctccgcgcgaagagtcctcatccaagtcgctttctccatgagaggatcgactgcttcgacgcgacgactccgctgtgatgcgaacacaatcttcgagctcttctggagaaggaggaggatcctgaagaggagcctcatcgagccactcaacagtgttctcaaaggtcgcttgaatctgccaaatgcggccatctggcaagatctgaccggccttggcgaggcctgatgcagggcaccggtacgtcacatagccaaacttgctcttctcgtgaccaggagccaagaaaccgtgcgtcaatgcagctacccgaaggactcctgcagactgcgtcgagaacgaagtcatcgtcttcgaattttcaggagattgcacctgcgaggtttgcgaggctgaagaggagtccgaggaggagtccgaggaggagtccgaagaggagtccgaagaggagtccgaagaggagtccgaagaggagtctgacgactccgaagagaatgaggagtgcgacaacggtgacgaagaaagcgaaggtgaagacatcgaagcaggttcttcagaagacctcaggaacagcgagttcgaagtcttatacgaagacggagatgaggacgcagcgagagagtgagcagtggaagaaaattcacagagggtcgagccagtggtcatggaggagcagcaggaggccatgggcgcaggccgtcagcctggccgcctcgcgtggtgccgacgggaaggcaccgtggcgagaagcgtcgtcgggagctgaggggcgtcagcgtaggtacgagcggctgcgcggtgattgtggcggaggctaagagcctgaagagttccacaggtgcaggtgcaagagcaactgccttgcttgcgggcagcgagggcgactggagacgcaagcgcgatcgggctttgcccttcggacactcagtctcccttttactattcgcagttcattccatttcatttccatttcttttcacatttgaggaaattaattaatcaattaattaattacactaatcagaaagtaaactctgagtcagttcagtttcattttgattttgtattaactaaaattaataagcgcatgaacagtagggtcaaaaaacgtaaaagttcgataacttatatttcgatgtgattgtttcatattaaccatatattatgtttagttagattattaataagaagtagaggttagataagaaaatggggaggccgaggaaccgacaagctccaaacactgcaagtggagcaaacctcgaatacaaaccagcaaagttctttcaccatctcattggaaacacgctagtcgcttacttgatgcttcaggtgctgacgcgtgatttgcgggggagtattgaagtaatatacagctactgtctaacctaacctaacctaacctaaccaagccctcatgtccgacacatcctgtgtatcggactgacatcatacattcattcctgcctgtatccagacctgaaaccccaataactcatatatcatcctctttctctttctcctgagttcgtcatccttgtcagactacctctccacgcttcacagctcaggctactctgcaataggaagtttggggtctcagcaagcgcccttcggggctgggccgacggcggacgcgtgcgcttcgcgcgcttccccggaggcaagcgcatctatgccagcgacgatgttgagcgcatctttgattgcggttccaccggccgcgagcaacgcagctctggatgtaccgttatctacgccagagtgtcctcggtcaagcaaaaggaggacctcgaacgccaggttggcgatctccagcgcgcctacccagatgcttccgccgtctacaaagacatcggtagcggggtcaatttcaaacgccaaggtctgtgctccctactggacgcctgtgaccgcggcggaatcggccaagttgtggtcatgcaccgcgaccgacttgcgcgaatcgcagtcgacctcttggaacaccttttcgaaagataaaatgtcaaactcgtggtacacggccaagatgcacatgccggagactcagacaccttcaccaaagacctcctcggaatcatcaccgtctttgtggcatcgcatcacggaaaacgagcagcgcaaaatagacggcgacgacgcagcgaggaagaagcgagctcgcacgaaggcgcgcaagaccatcaagaaagaatataaccttgtccgtgccagaaaggttagggtatatcctactaaagatcaacgtacacagttgcttaaatggtttggtgtcactagaagagcctacaatattggcgttgcgtttcaccgagacatggcgaagggcgagaaagaagccatcaaattgcaccaagaaatgtgtattataaaggatcccaagacgaagcaggttttggtagatgaagatgggaatccaaaaacacatggggcacttggtggagaactgaaggccgtccgatataaagaaaagaatcctactcttacatgggtgctcgatgtcccccaggctatccgtgattccgggattcgggatttcttcaaggctcttaactcgggacgagccaaaaacgaagaactcgctgcacaaaagaaagttcacgagcaatctttttataagtttcggaccaagcgtgacgaatcacagattttcgaagtgaatgcacgtacctggaatgcgaagaaatcaaagacctccaactttctaaaagaattccgaatgcgtaaagaaaagttccccgaccagatttcgaacgccatgcgtgtgcaaatgaatcgccttgggcatgtctacttctgcttcttacgagaagaaaaaaagcgtccaatggaccaggcacccaaggcgcaccatggtgtcattgctctagacccgggtgttcgctcgtttcagacgatgtatgacgccgatggccgcgccattgaatggggcacagggaaagattttagaaccatattctatctctgtcgccgcgttgataagatccaaagcagcattgataaaaagaaaactgcatccagtgataaagacaatttcaacacccccttgaagcgcgccttctatcgcgcccaactcaagatcaagaacaagatcactgagattcaccgcaagctcgcgctttggctttgtgaaaactatcgtgttattctcttgcccaagttcgaaacctctaagatgagcaggaggatggagcgacggatctccaagaagtctgttcgaatgatgtgtcgttggtcccattttgggttccgccaggctctcattcataaggctgagatgttcccgtggtgcaagcttgttctttgccaagaaagttacacttccaaaacatgcaatgagtgtggtaccctccaccataacctcggggcatccaagattttccaatgccctaatcccaagtgcaaccatgtagcagaccgtgatgtccatgccgcaagaggcatccttttacgctacctatccaaggacatgatttaaaaaaaatcatttcattgagtcgcgggttagtctaactaatccgcgatcgggtcttagacctgctatgaaatgcaagttttgcaaattttgtagtttaaaatctaagagagcgaataatacagagaccatcaacgaatgcccttccttcactcatccattagctccgcagcggcgagggaggtctcacaattgcaaaagaagaaccttgcacacgtgggcatcttgcccagatcttcattcgtttgcttgcttatcgctgcgacttcaggtccctgtttggtggccagtctcgaagtgaggctgttgcagtctgcctaacaaggtgctatggactcctactgcttcgaggaggagctgtaacccaattctgagctgtgaaccaaagccttttcaggagtctgcaatgacggtggttcatgaggagctcagacaatagaggcatcgggcgctgggccaagcctgggctgcctctcttcgcagcgccgagtggtctcttcgctggcgcatgataaagtctttcgctgcgtgctttacaactacaggtgtgctttgctcataattattggcatacctaacttagaactttacttttgtttgtttatttgtttggtaaagaaaagtttacgtttgtaaagcatactattattggctctaggagccgcctagcgttttctaggctcccggtttcgctctttcttagtttgatcagaatgaaatgatgctttggtttggattgtagacaagtaagtttaagcaatctgaacaaatggaagaaattatggttctctattgaagggggaaaatacttcacttgcgggagctgaatagttcacttgtggagggaagaggcgactgttagggcttgagaggaacgaatccagagcatccactcttatgctccgcgcacgcgtaattcagcccagactctagagaagacaccgaggaagctcaagagagcactaatcgtgggctgtttggtctttatgagatgttagttatgaagtggaaggcggaggagttcctgaaaaaccagatatgaattgctttggttgaccaaataggtacataacgaaaatccataagtcgaacaaaggaattttgtaagtgaagtatatggaactcacaagtgagacaaacatttattatccatagtaatggttatctctgtaaatgggttatagagaactatacagggcgcgattccggcgtataactgatttttcaagataacatgaacagcaaattgaagagcgcaaaacatcatcgcggcgcgagcaagtgctctgcgcgcgaccaaaacacctgagggattgcgtgagatttaaacccttcaaagtgcctgcgaccatggacaacgacatggaatactacgggtcggcctcccaggcagcgtcagactcgccgtcagatgtgctgcgagacctcttggcggctagtagtgggcgtaacgacagcggctcagccggtgctggtgagactagcgatgttgagctcgaattagagcactgggagagatttgtggaagctttggatacgagggcgaatgccaccaaaaaagctgtccaaaatgtgcttgtgggacaccaccctgaatttgcagacaccttttcttgctcgcaagaagttggagcccaagtaggcaagcttcgcgaggatttgcgacaggctatggacgaggcatcatccgaagagtcctttcagggagctggcgttcttttcttggaggagaaaaatcgcattcgaggccagctgcaaagactcagtggactcatcgaaactcttgaagaaatgcaagctgtgcaagcttcacttgatcttgtggacaatgctattgatgcaggttctcttgcagacgcaggaagtggactccgctctgcagaggatagtctggatagtatggtgcgtggaggcggcaacttcgtggactcaaaagtcagtagggccgtgagagttcttgtacgaaggaaaaaagccaagcttcaagctgctgcagaagccctcgttcgagcaagcctgcgcataaccgaacgcacgattagtgtatcttcagttcgaggtgcattcaaaatccaagaggcatttgcagcactcgatgcacttggcacgctgcgcgcactagctcggaaagagatcggcggtcctttgcttcaactcgttctcagacccatcgtagcagatggcactctgaactctacaacctcacagactgaccgaagcatagagatattctttgcaaaatcaacgcagaccgaagaagcacgtgctgcgtcgcctcgtagccacgacatggagctccgactcgaacgtgtcttcgagcacgtgctggagactcttcgttttattgatgcaaatgtctttggcggcaacgtcgaatggatggctttactttctgacagtgtctggggccaagctgacccagatggtcctggtggattggcagctttgcttcgtgaaaccctcgtcaatgctttgcctgaagatccgtcactccttgcctcataccagggtctggcactctctgcgaaagaactcgaagacgttttagacgaaatgggacttgccggaaacggccaacgcccgttattggcctatctaaatgatctccacggtcaccttgcaaagaaacgtcgttcatattaccttgagaaggcgagaacttatatgttggaggagtacagcactgcagaaagatctttggacgaagaaccggagtctgaactttttgaactcttagagaggcttagtgaaactggagatcagggtcctggtgtgtttcgggtgcctgatatgaaggtaacacagtgtgcaaagtctgtccttcgcctatgctaccaatgtcttgaagaagcagttcgcacgggaggtagctcggaaactgaagaggggacctctctttcgtcagtattggtgcacacgtgccgtgatatgatcgaacttttcaggattcttgtcccggcaagacataaacgtgccctgtcagattccagcaatggccgcctggctttgctcctgcacaacgattgtatattcattagctgtcacttggttgttattgggtttgtctacagacacaggcttcctggcaagatgcacgaggcctttcttactgtagatcttgtccctagtttacgtgaactatcagcaacacagctcaatacacaacttcgtctccaatccgagcgtttggtacgggagaattttacggattctgcgccctcttcaccatcctcgcctctttcaagcagcaatcctgcaaaaggaaagcttcaaaccccagtggatacgattgcagagcgtctcgaggcgtgccagcgtggcattcaggagctcgcctctgagtttgatgagatccttgaggtcgatcttgccgctcaaagtttagcatctgttgtgaatagtgttgtggagggcttcctctcttttgtgggaagtaacttggcatcgtctcgagcggcagctgcgcgcgcctcacccgattcagatttgaccctctcttcaaacgagatcagctctcttcgtgaaagtctgcaatctttcaaggatgttgtgtctagggaggttttgcagcgcctgcgtcatcagaaggaccgcaatgaaattgatcacgtttgtcctggtattctagtcctcacccaaatcagtgcatgcttagagcggtttttgtctattcatatttttcaagataaagtcaaggctggcgcacttgcagccctgaattcccgccaggtccgcggcctcacgactttcttgttcccttctgattctcctctagatgcgcattaaattcatcactgttcaccgaataacccaccctagcgaaaaacgttcggattctttggaactggttcacagaagaggcgaccttcatcacgaagaagctgcctcaatttttctttgccttgggctgaattcttaccatttagaacatcgtttttgcgtatcatactaccgttcccaaaattgctaaataaaccatttcgtattagctttgatggtgtgctcttctttttaaagaagatggcgtttttgatgttttcatgtctggactagaaaagggcattgcaactctttcaaggttcaatcatcttcgttttcaatgaggtaatgtgaaaaatgtttaggagggtgcattatcaaggggctaacgcagactaatattactgctggaaaagatccaatagacgtgtgtgatgtgtcacagccatagaatgacatgttccactcactgctggaaggagatcgaatacgagccagtgctgggatcctgaacagccttaaagttgtcaagactcaaaccaaacttgcccaaaactgtgttacccagatccttgagttttcccatcatctcttctttaagtttttcattcttttcctttacagcggcatcaacacgcttctgctcaagaacacctgtacgaaacgaggggtcgatttccacgacttggttaagatctgtgagagcatcgtcaagttgatccatttcctcataaatctttgcacggcgcatataagccttaatgtatcgtggatcaagttcaatagcgtctgagcagtcatcaagggcatcctcggtacgatcaaggtgcaacagacaagcagcgcgattgttcaaaaagatagccttgttcgccttaaaggtctccgtttcaggtgcatactcgagagcctctgtataaacatcaatcgcctccaggtattgcttccgcttgaacaagttgttgccttcctctttaagctcatttgcgcgcacaccattcttctccactagacggactgatcccggatggttgacgtactacgagtattaaaatggtcgccaatatgagaaatatgtaaattgtcagtattcaggaaactcatattatgccgtcctctcggaaggctttcacaaatgtttaaaaggtgcccaaagtaagccaacttactgtttccaaatggcgttccggtattttagtgtcaccaaggtttgctggatgaattctgttttacgaacatcacgcaggactgccacgtcagtcatttctgaaatcagaaacgatatatcaatcgtctttgcacaattaattctgtacgctcaaccttcttcttaaatgccctttgctacaaagctcaggcttggagctgcttttcgtgtaataaaattgctccatgctggctcacttgcaaaaaagtcaaaatctcccatgccacgtcgcttttgctaatctttgacattcttgtcacgatttcaatcgacataaataaccatattccctttctgcccatggtttctctccgcccttcggatcccagaggtagtctacatacgatcccttccgagcaagcgacgctcagagcactttcgtcgattgaccatgcacttacttttcgatagagatgttttcggtgggcttttctgccggctgcacctcaacctcctcctcctcctcctcgaggacgttgtcctcttcgtccgaagacggtaatatctcgatctcaggcatcttgctcaaattccaatcgcaagcccttttctccttcgctttcttctattcgggtctggatcaccgactttcttcttctctctgttttcgtcttctttttctcttctgttgttctgcttttattcttcttctttaaacacatctaggcctagtgtattgcctagtgtctacctattagggtaaaaacagcgaatagacgtttaatttattttacttgcagaacatcgatcaagccttgtaagacatgttcacgtaaactgtgactctcacgctcgaaagattgtatccaagcctgccttttcagctctggcagcaacaaaatttgacggattttgtttgggttggcgttcgtttcttgcgagattgaactttcttggctttcgattttatttcgttgattgtttgttcttctagacggatataatcatcataataaaaatgaaaatatcgagctcacgaagaaacacgaagaggcaatcaaatccttaaataggatccctggaaacctcgattccaatccggagacgagacttcgaagagactcgcggtgctaaagatgactctggaggactggcctctcttccgccagaccgggtgggcgccacccgatggcgtgaactatcttgctttgggcctcggcttcatcgtggcagaacagacgctggaaatcgtgctttctctgcgccaacgaggctatttgaagcgcgacaagcttccggagaagctcgaaaatgaggttcgtgccatcgacgacgctgctgcacctgaaaaggctgctgaggcacccaaggtccaagatatgggccgcgaagaaaaagacgctgcacccaagactctcttggagcagctgcgcgctaagtttcacaagtctcaggcatacaatttggataagaacacactctccttcgttaagatggcctatggagtcgtcttaagcgcaggtatgctgcttagtggctttcacgtctggctttgggaccagtctgagaacgccgcagctagcatctttggtgtggaccctgcttctagtgagctccttgtcggtagcttgttcttgctcagtcagagtatcgttggatctgtcatgtcgctcccgctctcaatttacagcacgttctgggttgaggcaaaacacggttttaacaagactacccctggactttacattagcgacctgttcaagagccttactatcgagaaccttattgttattccacttatggctggtattgtcaagcttgtgcgctggggtggagagtacttttggttttatgtatggggcttgttggtctgtttttctatggttatgatcaccgtgtaccccaactttatcatgcctctcttcaatgagtacaagcctcttcctgatggcgagctcaagtccgcaatcgaggcattggctaagcagctcaagttccctctcaccaagctttacgaagtggatggaagtaagcgctccagccactctaacgcttatctgtacggattcctccgtgacaagcgcattgtgctctatgatacgctgctccgaaacaaggaagagcctgctctcgaatgcaccaccgaggaaatcacaagtatccttgcccatgagcttggccactggagtatgagccacacagttaagggttttgttctacagaatgtcgtctatttggttgccttttatctcttcggcaaatttctccatgatcctgacatgtaccgttccttcggttttgtgcaacaacctgttttgattggtctcaacttgttctcttacattatggctcctctgggaactgtgttgacctttgttgtgaacgccatgactcgtaagtttgagtatgaggctgatgcctttgctgtcaaactggataagcttgagggtctcaagtctggtctttgcaagatttctattgccaatcttgcctcttttgaccatgacccgctctaccacgccatgcaccattcccacccatctctcattgatcgtctccgtgccatggatcgtgtagcatacgaaatgcccaagaagaagtctcagtaaacaaacggctcagttgcacgagtctttaaataaagcctatcatgtttcgggccgtgccttcatttctatcactgctctgtcacactcttatgatcttcaaactccaaattatttttgctttttcttatcgtttgacatttttgttaagttatctcatcgtacaacgcactatcaccattaaaataaaaaaaaagtacaatattccaagaattagcattgcggtactgcatgtacacctcttagaaacagcttgctccagggtaatgtatctaagtctgcttggaattttacccaagcaaaagtatcaatagtgcctttgagtggtccagcttgtataaattcattcttgaccttaaaatacaaagtaagtaggtaagactagccgcatatagcagtgcctacctgtttgtagcttatacttcaaacagtctttctctgataaaggaaagcgccaaaactcgaaccacatgacagttcgttgtctctaagtttgcagggtgtgcagatggagccaccatctgctataacagccctctcggctaccactagcaatgatagtgacaggggtggcagtttgcttctatccgaaagaaccagccttcttgaagatcagggtggcttcacgataaacatgaccaattttgctgatgctggaggtgtacacgaaaagcctccgtatctccatatgcttctacctcaagaaacacccaaaggttacaaagccgagaaagatatgtttatggataacaaaaacgataacttgaacggtctcggtactgaaaactatgtggcctctactggggtttctgggccctttcgacagctctttgaaagttgttgcggaaaaagaaaggggaaagtatcggatgcgtgctggtaaaaccattgaagctcctgggaaagtatggagactcctttacaacagcaaatggaactcttgatatatctccgtctgtatcgtctaccgagtccccccgacatctgcgataaacacgtattctccaagatgtgtaaataaacagttttaaattataaattacgtgcctgttgacgacacaaaccttgtcaacttctatcaagagaaaagagtacaggactgctataatttgttgaaaacaaatagtctaacgttgcaaaggaagcttgactttcttgaaaaggtgagatttctatacgtgaaaactgcaggcttcatcgtgattacacaagttcgggctaagaaacttgcccaaaattgctttccagtctcacgcaagtgagacagcaccactgcttgcatctaaatttcacatagagctctctgtctttcttgcaactgatctaacttggacattttttggtactacggtaatttgagataccccacaattcaagaaagaagtcggcgatataagaaatagtcattgctggcattttcttgtagcctgtggcctggatcagatagattaatttctttagcatcataaaatatgggggggggggggaggatctcaatgtggtacggtttgctgatgcaatactcaccgggccgtaacatctgcatgcagttttcatgttctcatggattttgacttgaaagagaaatgtagcattctacaaacccaagcctttgctttatcattggtataccatgggtattcatttaattttttggaataactctgccggactcttattgtcttccaggaaaggtttcaattcaggctttattcattgaatgatggtctctctcgcagcagagtgagttgaaaaaagaggtgagcccctgatcagccagatcccatttctattagagcaaggagaatggccagtatttattcactgatgtggagagtacttggcagaaacacgacaataagcatacttttgaccccgctctttccaaaatgttgatgatatctgtcaaggcagcacatctcggataagccgattcttcactgtccacaaagctcccgagcggacgatgtgctaatgcatagcgtgtccccgagactaattccgacaacttgcaatgggacatgtagtcacagaggtatggctgcactatgaaattatcatgagatatttgtctggctccccacatactgctaaatgttcaagtgaacatcaacaattagcctccaagactggttgtctaagagctgaggtgttgggaatttcgctcttatagacaatggtttggtgattttatctggtctaagaaaagatgatgttctttcctctattgcgagttgcagagttatcaagctcgacttggttatcccaataataataagacaatggataggtgtgtactgggacatatgcgaggactcctttgtctccattgcttaagagtgatatccgtatgatttgaccgacaggtgttgggcgtgagcaatcgatgttatggacattgttgctgcaccaatgataaaaggggcgagcggatgcggttgaagtcaaggcagaattcgttgagccgatgccgcaccccaacctttgc

SEQ ID NO: 121 - DNA, 21995 bp, Schizochytrium sp.
  source 1..21995: mol_type = other DNA
cgtatctctttcttgatgctagctagcaatgtttgcgcagcaaatgctttaggtttagcatcttaagaagcaacatttgcgaattgatgtacaagtaggagacctcgcctgggctgatatttctccaatagtagtttgctgtgtatggcctacgcaaggagctgacgagctggaacattgagattcaatcgcgggcaagttcaacaaatatccgcctatcacatactacctattgcaactcttcatgggaaaatgcaagtcataaggagatgtagtacacaagagcgaatatatcctctgagtactaaatgaacgctgctcgaacaatccttgcacataggatcagcgattatgagaacacgcactccaaaattcaaaagctttcagagtgcttatatgggtattgccgcccgagcaatcctcacaaataaaaccaacaattataagaacaggcattccagaattcaatcttgatttccttctctgctgagatctaacatgtctctggcatagaagtatgatcatcctaggacatgcagtctgcgaaaggctgggcccgaggtagccctgcaagattcctaaatccataataagctccttagaatggcttgtatttttgagcttataattaagcttctgctaacctcaaagtccaatttagaggtgggcttatttacgcacgttgaatagactagcatacatttacccttctttcgctggaatgctcaagtgtgtttgtcgctgttatcacatgtcctagcatatctatccaacatgctcagatattagctatcatcaatcgggcagttaaggtacatatatataaatgttctccctgggcttgcatgagcttgccaagagctcctactacatcttgtttacatggtcttttgatgtgagatccctggcaggcagagtaggctcactaccttgctgttcctagcttaagatttgtgtcataaagagtatcaagatagcaagcattttatcaaagagtcacctttgagcattggtatttgctctccagagaggaaagctcttgagcttgaatacttagaaacgcgcgcacagttcaattatcgtcaaccatgaagattgattccgtatttgttgcaaaaatatggtacaaccttttaaataagccttagacaaaataaggatgttctctcgaagctaaagagtatgagagtgattgctttctctcgcaatctaaaggtcttcatacacattcgttcctgtcagtctgaaaggtatctacctctccacacgcaatacctagcccccaccgaccaaagtagtaccagtgctataagtatgttatactccggtcaagacgctgcctggcacaagcaaagcagttcgcagacgacgccaccgcagcgaggcacaaacgattcggtcagcgagaacgacaccagcaactgctatagcatcctcagagactatcataaattacactgttcaaaatggcgtagcggaccgaggcgacaggagccacctgtccctgagctggacgaccccaccgacggagaaacggaggaattgtgcagcaagatacgcttctatcggcgaaacaaaacacaaaacttagagaaggactcgaagagcttgagcttgagcttgagcttgaacttgaacttgaacttgaacttgaacttgaacttgaagaacctgggcttttagacctgaacttgagatcaaagtcgaagaacctggaaacgagatgctcctggctgaggctggctggcccaggtctacccgaatcgacgacctgctgaagaagggaaagctcgcccagccgtttcgtaaatcttcagacgccgccgctgcgagctttcaacttcgagcgctcggcgtttcgaattgcaggccagtgagggtcgtgatctcgagcgaggccctgagacagcgcagcgagcgccgcggtggcaaaggtacccgggttcgccgacggaggcgtctcagacgctgtcgatcgccgccagttccaagctccaagtcagtcgcgcagagaatgaatgaacgaacgaatgaacgaatgaatgaatgaatgaatgaatgaatgaataaatatcttgcgagatcctaccttgaccgtaggcacgcatgccatgtgcccagccgagcacggcatcaatcaaaagccgggcaagccgcacgccgaagctgccctcgacgtgctgcggcccaagtttgtggagctggaatggtttatggcctcgaaaaaggtagtctgcagaaggatttttcaaactgcgcggagaagagaatagaacagaagagaacagaagagaacggaacagaagagaacagaacagaagagaacaagataaggtaggataagatggaacacaggaaagagaacaaagagaactagcggagcactcagtgggcggtagcgggcggtagctagttgaaacgctaggcagggagaggaatttggtcctgcgagaactcagtccgcccggaccagcggagaaagatacggcttcgcacgctccaaaagtcaggcagttagtttgaaggagatttacagtgcttgttttcaggggcctggacaggaccatactggcagggtccaggagccacgaatgccgtgtggttgatagaaacatgggtagatagatggatagatacatggtgcgtgatgttttggacctcggaagaactgcaaaatgtggcgaaggaaagattccgaacttgaagtttgggctgctctgcgcgactttgagggacagaaaactgaagctggtttgcaagatttgtcgacccgtagtcgatccgttcgtttgtgtgaaagtgggttgggagggaacgacttcaagtgctcgccgaaagatttggcttggacagtaagtacctacataaagacagagatcagagaagcgtgcctagtagctaactggttatcaggatggttgcagtgggggtaggactcggaagctagaaagatccactctgctgtctagcattcatctaagcaataaaacttgctggaaagggaatgactgaagaaaagaacatctggttttcaagatgctttagaatacgacaaagtgcaaactcggacagcagcaaatccaaaacgtcaaggcgcagctcaacgaaagcagtgcgagaacactcgaacccgaggcaagcaaagctgtaaaagagaggaagtgaaactcaattaaagagaatctaaagccaagatgagcgccggtgccggacaattcgcaatgtatatcgatggcaagcccgcccagggtagccaggagccctttaatgtcattaacccgtacgatggctccgtggtcgccaaggcccccacatgcggaaaggaagacctcgacagggctgtgagctccgctcgtaaggccttcaagtcgtggtctactttgggctttgatgagcgcaagaagtacctcgctaagatgggcgatgtgctcgccaagaacaaggattaccttgtagagcttcttgtccaagagcagggcaagggacgtatccaagctgaaggcgaggtcttggcaagccagggctggatccagaatgcccttgacacgaagaacccgaacaaccttcaaggcgatggtgacctcaaggtacaaaagacataccgcccacttggcgtggttggctgcatcaccgcctggaactttcctatcgctcttgtgcactttaaggtttcttttggtcttctcgctggttgcaccttaattcttaagccctccgagaacaccccgctttgcacccttgagcttgcccgcctctacaacgaagtgctccctcctggtgttctctctgtcgtcaccagtgagaagaaggagcttggcgaatggcttgtcaaccacccgggtatcgacaagatctccttcactggaagcactgccacgggtaagcgcatcctcgagaacgctgctcgctcccttaagcgcgtcaccctcgagcttggtggtaatgacccggctattgtgctcaaggacgctgatcctaagcaggttgccgctggcatctttcaggctgccttctataacagtggccaggtttgcattgccatcaagcgttgctttgtgcacgaatctatctacgatgccgtccttcaggctctcgtagagcaagctaagaacgccccgttcggcaatggccttgacaagaacatcatttatggaccgattaacaacgccatgcagtacgaccgtgtgcgcgagcttctcattgatgcccttgacaacggtgccaagatgcactgcggtgaggtcccccccaagcgtgaggatactaagggatacatgatcaagcctgcggtgctcagtaacgttaaggaaggtgtgcgtattgttgatgaggaacagtttggccctgtacttccagtcatgccttacaagactgttgaggaagccatcgaacgtgctaacaataccgagtatggccttggtgccagtgtctggacctctaacgccgaggccggtgaggaagttgcttcccaactcaatgctggaactgtctgggtcaacactcatggtgagatcgatggcaccgttgcttttggtggcgccaagtgcagtggcatgggccacgagggcggccctgagggtctcacggcttttatgcagcttcatgtgatcaagacccgccgcgcagctgctctttaaattgtcaattttgatctgtctcactagacttgcctctgcggcaattgtccattgggtcctgcaatttcgtaaggactatcctcatctaggatcctctcatttttatatctaatttctaatatctatttccatttctcctcatcctagcttcgaacgttttaatgttgcgtattttcaaattataatttatacgaacctaaactatgcactgaaagtttccaaagccagttaggtgcatttgtgcattagcaccattgtactgatctcaaaaaaatgctttctgattttcttgtaaatgcgggtcattgacgagggttcggacaggcgctttcaataattctcattttctaagctctctctcaaggaatgtgtcgaccagaactttctcgcccgccatgtttttaatccaactagattttctcacttgctgtacaacactacattctgttgcctctcgacctctcttcaaacgtggttagtagcactctgtccattcgtagcacttcctgagtcacttgtagcagtctttcgcactaatgttcgttccttctaacctaaactataaaactacgctaggtgctatgagcatacccaattagtagcaccacccattactatctggtagatactgctacctggcatctttttagaccaaaatggctaataaatcattatagctggcgaagaagaatgcttcgtacaagtcttcagctgcagaagcaatcccgatatcgcctcgcagttgcctcgagaggaagctgtgtgcatacttagtgagtagtgtctccgtccttctcatcgtgatacgggtaggacttggatattctgagagagtgtgagtctgtgaggtacgggcgtcaatcccactgttgtttgtacttccggttgccaggaaagggcggcttgagccggcagtgtagacggtgacgaagacttcaaagcagtaatgcagcaggttggcaaacacttggcggcgcagggcagacgcgcgatgattattggagggaggcaagttgcgggcagtaaggccttcgatgtgatcaacccgttcgatgagtccgtggtgggccaggctccgtcgtgctctcgcgaggagctcgacgaagctgtgaaggaagcgcgcaaggcattcccagcgtggtccagcaagacctttgaggagcgtaaagaatatttgggcaaaatgtcgcaggttctcgcggataacgcggattctctgattgagctcctggtgaaagaacaaggcaaaggcctcccgcaagccaaaggtgagctcctcggtagccaggggtggctcaaggccgccatgaggctggacaaccccaataaactacatgcagaggatgagaagaagaagatccacaaagtatacagacctttgggcgtggtcggctgcattacggcttggaacttcccgctttctcttattcacttcaagatttcctctgccctgctttctggatgcacggtcatcgtcaagcccagcgagcacaccccactagccagccttgaagctattcgcttgttcaacgaggttcttccccccggtgtcttatctattgtgaccagtgagaaaggagagcttggcgcatggatggttgagcaccctggtattgacaagatctcgttcactggaagcaccccgactggcaagaagatcatggagaccgcagcgaaaaccctcaagcgtgtcactcttgagcttggcggcaacgatccggccattgtgctcaaggatgtagaccccaagaaggctgccaagggcctctttggcgcagctttcggtaacagtggtcaaatctgcattgctgccaagcgtgtctacgtggatgaggctatttacgaggatactcttcaggctcttgctgagatcgccaaaaatgcacccttcggcaacggacttgagaaagatgtcgtgttcggccctctcaataacgcgatgcagtatgacaaggtgcgcgagcttctcattgacgcgctcgacaacggcgcagaaatggtttgcggtgaagtaccccctgcgcgtggcggctcttctaagggcttcatgattaagcccgtggtgctccgcaatgtcaaggagggtatgcgcattgttgatgaggagcagtttggccctgtgcttccagtgatgtcctacaaaaccatcgaggaggcagttgatcgggctaatgactccgagtatggacttggcgctagtgtgtggactaaggatcttgacaggggagaggagattgctaaccagctccatgctggcactgtctgggttaacactcactctgagattgacggcagcattgcctttggaggtgccaaatgcagtggtgtgggtttcgaaggtggagatgagggtctcctggccttcatgcagctgcatgtcattcgcaccaagcgcaacgccaaactctaagtcctaacttgagtttgcatcgcctttgtaagctttccacaataatagtttcttcaaataaaagcagtaataacgtttagatggaggaattttagagcccaagaagtcaattttgatgccgataattttctttcgtttcttttatattaaaaataatatattcttcagatttaacattgccgtctggctatactggccgtgttattcttttaaaaaataaggtgatttcttcctatcaattggcggggttttctgcttttaaagaataataaaaatattcatgttgaaaaagttgtttaaaaatatatatctaattgtaattgaaaataaataaaaaatagttagttggccattttttaaatgaacgaagaagatagattctgggcgaggagtcttcttcgctcatacactgaactatttattatgtaatgaaaacttgctaaacaagtcagggaacattggtttgcataatttccaagaagacgacccattgagttcttttgaactcactctacgtgaaaattcactatatggcaccgttcgtgacttcgggttgcggttggacactgtccttccccacccgttcattggttgcaagcatcttatccaaatatgcttcatacatgttgttcagatcgcgcaccaccttgattttatcattcttagtttaaaaggcatcctgattcacgtcatcgataatattttctttctgcttaaaacgctcaaacttatccaaaggtttcgaatcggcaagaagctgttctagttgatcgtgatactttttggcctcctccatcatcttgtaaacgttgtccacaacatacaattattagtatggttaatgtatcaaagatgagaggcgtcatgaagtgcgtccacagccttttgtaaggtggctttccgagctgtgtcaaggtccggttccagtaattttctctcggaccagataatgagagagggcacaagggcatcgccctcggctttgaggtccaatggattgccgcccatacgttctatcccaacaggctctcaagatcttcgaggaatgcaagacggtgcgtttccatagtttcatatcttttttattcaggaacgggccccttcaaaaagaatgatgtttctataataactttcgcaagtctgctgctctcacgagaagtatttgtccactaccctttgtaaaaaaatatatatgctgcgatatgaccttaactgagcttctctgtgctgccaaaacaccaccactggtcaagctctcaatctctagccccaggtggctatgctatgcaagcacttaaaacttgagtaagctttctggtacttcatactttcctaacttggtgaagagataaactgtcaggatggtactcagcaacgacattttgtcaggtggttcttgctcgctcaaagcagatttcattgtgaaaactgagcttacctattatgtttgtatagaagaaatcagtttggcaggctctcttgcgcttgttctttagcatcataccttagcacttaatagaaagcctcgtcgaataagtctgcgagatcagatatgtgggtgcttcctctaattcttcaacaccagcgctcagacagagccctgctgctcatttaactctcttcgctagctcatgctgcttatttactattgaaagcctggttctctaaaggcttgccttgctggcgcaaaggtaatagtgcgccccatcgataccaaaagacaatcgcaagcctccgcccctattttcaaaacgagattcgccaagcacattttgaggtatgctagataacatcagaaagcacgtttctttcctgccgctgccagaaggagggcgtgcatcttgagcagtaaggctttccagcatcctttacaaattgcagagactgccgcacattcccccctgaacacaaaatgttcttcagatggcctcaaatgcacatgaagcaggccactatcttttcaagggctcattcaaaagagttgcaactactcaggaattgggcaacttggaagacgagtatatatatttgcaagtgcattaggccttctttattgggacgaagaccaagtaagtatcttctcttctctctcttcgcttctccatttcataattaattgaaattaaaataatagtaataatagtatttattattattttatttattttattcttaatatttagtagaatagaggcaaactctttttgaacttgggttatcctgctttagacgacgctctgattggggtttacggggagtttcaaagaaaagtgttttttcttgtttaaaaaactgtcccaaaacctatcgattaaaaaaacagcttcgagcttcgcttggcgcaagtaatatcagtcgacgccctcacacctgagcactttgatcacccagcaagtaaaagaagaaagcctatcgggtataaaaggcactttgtgatttgtaggactctgacttttggtttgtttttgttgcaatgcgcaaagtatttcccgccctttcttttcttatctttttcttgaaagttttacaaatgaaaatagtgaatcgcacacactaatcagacagtaagatcaaaaaacgtaaaagttcgataacttatatttcgatgtgattgtttcatattaaccatatattatgtttagttagattattaataagaagtagaggttagataagaaaatggggaggccgaggaaccgacaagctccaaacactgcaagtggagcaaacctcgaatacaaaccagcaaagttctttcaccatctcattggaaacacgctagtcgcttacttgatgcttcaggtgctgacgcgtgatttgcgggggagtattgaagtaatatacagctactgtctaacctaacctaacctaacctaaccaagccctcatgtccgacacatcctgtgtatcggactgacatcatacattcattcctgcctgtatccagacctgaaaccccaataactcatatatcatcctctttctctttctcctgagttcgtcatccttgtcagactacctctccacgcttcacagctcaggctactctgcaataggaagtttggggtctcagcaagcgcccttcggggctgggccgacggcggacgcgtgcgcttcgcgcgcttccccggaggcaagcgcatctatgtcagcgacgatgttgagcgcatctttgattgcggttccaccggccgcgagcaacgcagctctggatgtaccgttatctacgccagagtgtcctcagtcaagcaaaaggaggacctcgaacgccaggttggcgatctccagcgcgcctacccagatgcttccgccgtctacaaagacatcggtagcggggtcaatttcaaacgccaaggtctgtgctccctactggacgcctgtgaccgcggcggaatcggccaagttgtggtcatgcaccgcgaccaacttgcgcgaatcgcagtcgacctcttggaacaccttttcgaaagataaaatgtcaaactcgtggtacacggccaagatgcacatgccggagactcagacaccttcaccaaagacctcctcggaatcatcaccgtctttgtggcatcgcatcacggaaaacgagcagcgcaaaatagacggcgacgacgcagcgaggaagaagcgagctcgcacgaaggcgcgcaagaccatcaagaaagaatataaccttgtccgtaccagaaaggttagggtatatcctactaaagatcaacgtacacagttgcttaaatggtttggtgtcactagaagagcctacaatattggcgttgcgtttcaccgagacatggcgaagggcgagaaagaagccatcagattgcatcaagaagcgtgcatcaaaaaggatcgtaagacgaagcaggttttggtagatgaagatgggaatccaaaaacacatggggcacttggtggagaactgaaggccgtccgatataaagaaaagaatgctgctcctaaatgggttctcgaggtcccacaggctatccgtgattccgggattctggatttcttcaaggctattaactcgggacgagccaaaaacgaagaactcgctgtacaaaagaaagtccatgagcaatctttttataagtttcggaccaagcgtgatgaatcacagattttcgaagtgaatgcacgtacctggaatttgaagaaatcaaagacctccaactttctaaaagaattccgaacacgtaaagaagagttccccgaccagatttcgaacgccatgcgtgtgcaaatgaatcgccttgggcatgtctacttctgcttcttacgagaagaaaaaaagcgtccaatggaccaggcacccaaggcgcaccatggtgtcattgctctagacccgggtgttcgctcgtttcagacgatgtatgacgccgatggccgcgccattgaatggggcacagggaaagattttagaaccatattctatctctgtcgccgcgttgataagatccaaagcagcattgataaaaagaaaactgcatccagtgataaagacaatttcaacacccccttgaagcgcgccttctatcgcgcccaactcaagatcaagaacaagatcactgagattcaccgcaagctcgcgctttggctttgtgaaaattatcgtgttattctcctgcccaaattcgaaacctctaagatgagcaggaggatggagcgacggatctccaagaagtctattcgaatgatgtgtcgttggtcccattttgggttccgccaggctctcattcataaggctgagatgttcccgtggtgcaagcttgttctttgccaagaaagttacacttccaaaacatgcaatgagtgtggtaccctccaccataacctcggggcatccaagattttccaatgccctaatcccaagtgcaaccatgtagcagaccgtgatgtccatgccgcaagaggcatccttttacgctacctatccaaggacatgatttaaaaaaaatcatttcattgagtcgcgggttagtctaactaatccgcgatcgggtcttagacctactatgaaatgcaagttttgcaaattttgtagtttaaaatctaagagaactgtagaagaggaatttgcatcgggtttgcgacaaaaggttcggactgagtgctatgggtagctcgaaaagggtgttgtgaacgatcttcacgaagatggcaaagagggcgcagagggatcgatttggaagcggattactgccaaccccttctaaaacaacatcgaattgaaccctggcaagtggctgtggcttcttcgccatcgtttccggtgatttataaaatgtcgtaaacctgcacaggcagctccagctcctcaagttgcaagttgcgcaccaattccaacctcgacttgatgatcgctctgcaaaacgtgaacttcaaagcccgggataaaggacctgaaagccgctccgagtctcaatacgaaggctccggcaccgctagtatgacaggctcagccaggctcagttctggactgtggcgctccgcagcgcgtgtttcttggctcgtcaagttcgttcacatgtagacgaataaatcccagagtgctggcggtcgagacctcgagcagcttgaagcaagcgacttgctcgccaaccttttgagattgcgccacaatttgcgcatggcatgagccagccgaatgccagccgtctccgacaggctgaagatctgcgaacagcattgattgaattgatgggaaagtgcgccgcgctgtctgagcgatagcagtatccagagtgtgctgctctctaaggtgacatgcgcgacggtatccaggtaggagttccagggcgacagtaaggtttgggcaggaaatggagcgaagacagtccggcagtgcgggatatccatactggcaatagcagctcgaaggggaaaccctattagagaactcgcccggagaggacgacctggttgcagttgagtcgagcgaggtgcttgagcaagcaagcaagcaaacacggaacttgcaaagcgtgagaaagggcgaattgataaaggcagcagaagaattggaacgcagagggaagatagtagaggggaggtaacaaggggatttgagcagaagaagcaaaagcagcaacagcaatcatgagtgtcaccacggcagccagcggaagatttaatatgaccatcgatggaaaatcgcatgaaggctcggaccagccgtttaccgtgtacaacccgtacgatggctccgttgtagccgaggccccgacatgctctaaggaagaccttgatctggcggttgaaggtgctcgtaaagcgctccctgcctggtctgccaagaccttcgaggagcgtaaggaggttctccaaaaaatgtcggccattctagacaagaacaaggaaagcctgtcgaagctccttgtactcgagcagggcaaaggtcttccccaggccgagtttgaaattatggcaagccaaatctggttccaaagcgcatttaagatggaaaatcctaacaagaccctcaatgactctgaacaggcaaaagttcaaaagacttatcgccctctcggtgttgtgggctgcattgttccttggaactttcccttggtcctcttccacttcaaggtgcctcttgcgctgctcgcaggctgcacgattgtcttaaaaccgagtgaaaacacccctctgagtacgttggagctggcacgtctttacaatgaagttttgcctcctggtgttctcaatgtagtaaccagcgagcagcgtgatctgggcgaatggatggtcgcccaccctggcatcgataagatttccttcacaggtagcacatctaccggaaagaaaattcttgagaattctgccaagcacctcaagcgtgtaactcttgagctcggtggtaatgatgctgcgattgtcctcgaagatgcggaccccaaatctactgctgcaagcctctttcaatctgccttcatcaacagtggtcaggtttgtgtagccgtcaagagagtttttgttccagagtcaatttttgatgaagttgtcaatggaattgcagagcatgctcgtaatgcacccttcggcaatgggctagaagaaggtatgttctttggaccaatcaacaatggtatgcaatacgaacgtgtgcgagaactgctcgttgatgcccttgacaatggtgcggagatggttgttggcgaagtgcctcctccgagggatgataccaagggctacatgttcaaaccagtcgtgttgcgcaatgtgaaagaaggcatgcgtattgtagatgaagagcagtttgggcctgtccttcctgttctttcctacacagacattgaagatgctatccatcgtgctaatgatactgaatacggtcttggcgcaagcgtttggacctcaaacgaggatgaaggcgagaaggttgccagcagactcaatgcaggtaccgtctggattaatactcacgctgaaatggatgggactgttggctttggaggcgcaaaatgtagcggcatcggatgtgaaggtggttcggaaggtctactttcctttatgcagcttcatgttcttcacacaaaacgtgcttctcctcagcaataagacgaatatcgcaggtcctgggctaagttaagtaagaaaggcactacatgattcaattttgctgcatcattcagaacgataaaagtcttacacaagcttatgtagaaactacattcatgatgaaagagacatcaagccctttttaaaattaagtaaacgtattgattatattcaaaccattggattttgcaacttgaagtacatacaacaaaggttatctcattctattttcaccttgacattctatatgcaagaaagagttggccaaatgcaacagacacttgaatatgtccctggaattggattaatgatttgacgtgcaaagtgcacaagcaagagtaatttagtggggagctttagaaggtacacgtaattctatttaaatttatttatgagaatttttggtggcaagaatggctttaatgaaatcgcatttggcaagatcaggaacatcctccgagagtacctgaagactaatgcgtacttcttgcttagcaatatgttcattctcattcatgcccaagacaacttctgtctgcaggagttgggctccttctctggtttcgtctgactcttcatcaagtatgtaaagttttcgcaacacctcaggccacaatggatgagcaaatacattcagtccggctgtagaattacaaaagtccaagactagagacacaagaggctgcatttgatctgcactgtttttggcatctccaatagctcgaattagaggtccagagattgtctgaaacatttccttccacacaaacctcacctgatcctcatcttgagcttcctctgtctgtaaaaatgataggagtaagtggtgaacaacatctgcttccccagactcaaggaccttgttgaatgaatatccgtcgttggaattcattagtgaattgagaattagagctgggtcccaggaccgcgccacagctacatgttctttggcagcttgcgtgactgaatttgtggaattgataaatacaccatatgactcaggttcaacagaacccaacatctcatggcgcccttcaaaactcatgtttgctgcgcagcaaataaacagagggataagagactctctttcatgaagcaaaggcgcaagcatgcaacacagaaatttacatgcagactctccaaatgtcccgtgctctttcaaagcttcatgaagcaataaagaatcattcgcagcaactgcgagccttgcgagttgaatacgtacttcccaccacgaatcagaagctagtgctgccgtttggtgcaacaggtcgggagttgcaatatcatccactgtgtcgacacgctccaaaatacctgccagaatggcaagagcacaagcccgaacacttggactacaatgcgataagttttcgacagcgaggtcaacgaggaaataacatactgtatcacttgaagtgaacgaaaggtcccgctcagcaaggttcataaaggtaacaacacatgacaagagagtcttttgtttgcgaatccgcttttgcagtgtacggagcgagtcatactgagcgatcaaatcatgtggtggacagtatgctgcgtaaatcgccatggcggtagccctttgttgaggcattccattgttcatgatcacctccaaagcgggaagaatgctatcgaaaaagaccgcgcgagctgcacaggagtcctcatctgcaagcaaacctccaacatcagctagaatctgcccagctacgcgattgtctcggtagataagtactgtggcaagtctaggggcaatctgaacccattgctcaagatgctcaagcacacatgccatgagaatttctgattgtgcatgtagagaatcgacaaagtgattaagttcttcatcagacaacattgggtttgcaacactccctggtacgaggcagtcaaggtctgctagcaaatttgggatggaaaaaccggactttggccccagggtcgcagctacagcttcttcaagaacagccatgggtgacctggaggaagaactcgtggcaccggatttggattcagcagttgagccttccagggtcttagattcgtcaatgagtgcatcatgtactgcaacagatcctccagatcctagaggttcaatatgactttggcgcttagccgcccgcaatgacataatgtcagactctacagatcgaatgttcacagcacctgcttttacctgcacttgactagcaactttggcaagggggcggttttctccacgtaacagcttcgatgggccctttgatacagaagcggttgatcgaccactaagtgcaggtgctcttgcagagctatggtctgaaccgtctgtaggtcccctaggtgaggcacctgacttagacattggagaggacaccttgctttcttccgttcttgaatcgcttatttctgaaaatcttttgctcttgcgttcgcgctcacgggctcgattccgtaatgatgctgctgtcacgacacttggagcagtgtcggtacaaatttcgcgtgctgtcagaaatgtatatgctgcattcacaagctggacagaagcccctggagcgcttaccatgacactctcgattagtttttcttgattatcgactctgaagccaactttgtcaaaaactaattcaagttggtgccaattatcctcgcgagctgcgacccgaaggccattatcgtaggagtgcatgttaatcagttttggaaagtatcgcgaaaacatttcagccacaagaaatccatttgaaaagtccctgcgcacatttttaactgcataggctaggtcaaggccttgcaaccaacgcaaaacctctcggctcagctgctggggagagcttttcgttgctacatggctcattttattacagttgtatgtaaagcgggctcgcactataaccgcagaatttaaattgcacgcgcctaaattttcgtcagtgagctgcctcaagagctaccccgcgaacctcgattttacgaaaatccgccactactcctcaattagcacaggtttggagttcacaaatatgctgctcttccctcttctcttctagagcttcccaaaccgtcaccttgaggtgaggcaagctctcatacagtttgccacacaagtatatacatatacatgaatcgttgccctcgcgcgtcaatggtgtcgccaagcctattccccaaacccaaacaagcacctactcgcgaactttgccacgctagacttgtgcaatttgcacaggtgtgcatcatcaacggtccttataaattcggcgcaaattagcgccgcagtctcgtgcacccctctttccgcctaaagtttcatcactaccatggtacctagcgctttgactaggcattttgtctagccttttttttcttttcaaagcctaaatcgaaaataaatgtgattgcttcgctcaactcccacgcacaattcattaatcactcagcttcagtcaatgtaggtatctctctctccttctttctactctctccttcggctttatctcctttacgaaggtatgtgcaatcaacctactatggaattgatcatgtgctctctgcaccttagagaaagaaagtgtggcactaactaagttttgtagaacagagaaaacgaaagcaaacaccctccaaaagcaaacgacagcaatcaatgacgggcatcatacctccatcaacacagccaacgctgcacacattgcgctcctcacttgtgagaggtgactcgtgcacaccatgtccgcttagcgctgccgaggaaacgaaagcaatccaatttgtgtgcttcgaaatgggtgtttggtctccgttgttcatttctctctcaatgtgcatttgccaaagagaacacacattggcatggatcaaaaaccacgtcaccatttctcttcacccaaatactcccccggtgtacctcaatagttgcaagaaatgtctcaaaatagaagtcgatgataggggaatatgggacaggcatgggggcacaggggacgtttccatgtgaaagaagatttcgggctctggcgcaatccctgatctccaagccatcgcagggctacagagactgttcgacctgccccacgagcgcctctaatcgctcgaaaggctctgtgactcctgcgacccgcgcagagacgggcacagagacttggatagtgcctgaagcacgagaaaggagggaagaagcacttttcaggtagtaggtacctgctacggtaagaggggaatttataaatgcaaagagagtaaaaagagaaaaccagaaaagagaaaaagctacagagccaatcctcaaacgcagcgcatccctccccggcggcgcgaactccggagcgtacgggaccagaccacacgcagcgaccgaaagtacctccacagaggcacccgctgcaaggaaagcgcaaggcagaacgccgctgcgaccagctcatcgacgaggtagtgtgcacggagtccaacgctccgtcatctatctatatctagtcgcgtgaaacaccacagccttcttgcgtgctaaactttcgcgaaaacccgcacccgctgcactcaaactgtcatttccaacagaaaaagactctgcctgtggattggactcaactgcagttgatcaacgttcctggagttgtgatatttgcgtagtgcaatttagattagcggatcaatcatcaaatattgcttgtgcagcaaatcttgacaaacaaagcggcaattgaaacagccacgacaacaacaacaacaacaacaactcgtccagaaaatcttgaccccgtagcttctaaatatcactacgatggatattggaggcgcagacccgaaccagcgccgtcggtcttcgacggctacgagactcggtaatttgatggcaggccaggctgggtctagctcgaacgttgtgcgccgtcgtggcaacagcgcgcagaacagtggcgatgtgaaaggccttgtgcctgatgacttctctgtggaaactccggccagcttgaactcggcaccgctgtctagcaaggacaagtttcagacatgcctgaagaataagtggtgcaagctgttgctcgcgcttctcggccttttggtggcttacggaattttcgccctcatttttgatgcaatgcacagcgaagacccatgtgtcgtggcacgccgctctttgcacaccgtgcgcagttttccgcctcggcaggatgttcctgaggacttcaagcaggagttgcccaagatcattcaccagcagtggaaggacacccatatcacgaaccctaagtacgagctatggtccaagcgctggaagaccctctttcccgagcctgagtacaagcacattctctggacggatgagacccaacgccagcttattgaggagcagttcagctggtttttgccgtactatgatggctacaaattcaacatccagcgtgctgacgcctcgcgctattttatcatgtatgcctttggcggtgtctacgccgatttggattatgagcctcttgtgaacttttgggaccacctgccgcaagaccgtgtcagtctcgtggagagtccgtaccagtacaacgagcttgttcagaacagtcttatgagctcaccgcagggtgatcccttctggaagcacgcctttgagatcctcgtgaagcagtttggcaagcccgtccttgccgccactggacctgtctatcttgatatcaccatcaagaccaacccgcacccgtggtacccgcttccttgcgagaacttccaccgtattcctcttggcgagcaggaccagtctcccttccttactctccttcaccgcgaggttcttggccgtgtattcccgatgaagcaatgtggtgactacaacgattttgcctgccaccaggctaaacaccacaacacggctagttaccttgcagacactggtcttttcaacttgttgtggacctaagctaaattccctttatgccaatgcaatgaatcaagaataaattccgccgtatcgtttgcgagtaagcacattgtatggtcgaatttcccctacatgtggtgtattctttacgctagagcatggaaatcaagacctgtttttcctctcagaacgcaatctgaccgaaaatcttctgagatggcagtcaagacttatcagatctacatcgataccgatggttacatacagattcatcgaacggttgcgccattgctgttgtagaggatcaagctaatttcttttggtaggttcctgacagaataaagagggactcttactctcagccctctatctacacttacattctagacctgattcaagctctagactttgcttgccattcgtattatttcaaactgttctggcagtccaaacttaacaacttaaaacactgatatcaaaaaaggtaataaagaaaattgaacaaaaacacaaaacacacaaaaaacaatgctctactacaacttcaaggattatgcctacatcgaaagtcgaaaatacaattctttcgaagggttggaactaatctaatatgaatcggttctggaggaggttttgtgactgcagtccatgcagagtttacgtacagttggcatccacctccataacaaagtgtacgccgaatgtttactttttcactttgtagtttctctttctgccttttctcctgctgctaatggcctctcttgctaatactgttcgggaaagtacccttcagcattaaaaacttggtgtagtcattgaattatgattcaatcttgaaagttcaattctgatagcaacagattcccttgcctataaactatttgaacagcatgtgctcttggcgcttttctttgcgccatgattactttgacagagaaagctatgcaatgataaatgaaataggggaagctaagaaagaggttacaacggactagtttatgcgaatttctttcgcagatgcgcaagcattgcctggtgcgattccaaaagtgctgatgatgtggcagaattaatcacagacgtgggaatccaaccgttaaggttcatattgttgaccatttcatacttgaacgtattgtcgccaagggatgtaatcctcatacctccgcccggatgggaggttcctagcacgtatgtcttatctggcttgagcacattagcgagccatgttttgtctttcttagggtccaatcctacagttgccgaaattgaaccattgtctggagcaagatgatgctgcgtagaaccatggtatttgacacgtaaatcaaagaactcccgtgaggaaatcgctccacctgctgccgcattagtcaccatacgagcaatcgtgaagtgctccccaaaagatttaacaatacttccctcctttagagctgtgtcccaccccttggcaccaacacggcggtcaaagtccataagctccgcttccagctcttgaagagattcagctctacaagtgcaggta

SEQ ID NO: 122 - DNA, 22400 bp, Tetraselmis sp.
  source 1..22400: mol_type = other DNA
tcggacctttctctgtcttcttttcaggatcccgatgtgacgaagcgaccctgaacgcgtgtggtagtccaggccgcccaggtagtcgcttttcaggtcgccgcgacgatccctccacgccatgtagaacaggttcaccacacccatatcgacaccgacgtcgatcgaagatacagtagcttcaggtgtgtagacatgcttcctccgcgccttttgctctttctcggtggctgcaatctgggcactgttcttcaaagtcgcacaaagcgagtacccgtcggtcttgaaggaggagttgggtacccacccttggcgcgccgatctcagtttggcgataccgaggaaagtcgcgtgcatcaaagccgctacgatctctgggtcgtccagaggttgcgtagatgacatcacgccatgccttttcagtcgcgggacgatgtacatccggtagaccctctcgtcgatcgtcacatgccgtcttcccattcgacaattcggcgtgaactcgaactgtttgccgccccactggtgtatcaggccttgaaggtgggaaaagatttttatgttggtgacgaactcctcctgtgaaccgattcgcaaaccgtctctcatcgacgtcaagaaaactcgaagggcctccagatgttccactacggtctcgtgcggcgtaatggcctctgggacggaaggacgttcgcccatcgcatatctgcatgcctcaaagcaatgacgcttctgccacgcccgccgcattctcggctttcccaggtaacaaaccagcagagagtgcacggctctgcgtacccggacgtcgagattgagaaggaaatggttctttagagcggtcttgtactgccgtgaagcgtaagctacagcttggccggatcctcgactgtccagatccccgacatttaccgaagggagaaactctggatgaagatctgtgcacctcttgaggacgggttcggcgctgcaggaagaagcgtcgaagcaggacctgaacgcgcggtcgaagaacgtatccttcgaagcaaagtctgcgggcagggtacccgttgccacagcgtcgcggatggccaggcctatgaacagggatcccgctcgactgatcttggagacatattccacgagatcgtcaatcgcgcggatgacaacatcgcgttcttgttgggcgactcgagacagcaagcaacacttcacggtcgtgctcctctgttgcttgttttccttgcgccgttttgcataggcttcgccgcgacgcgaagtggttggtatgactgcatgatctttgtcttcagggtctggttcttcgtctgcctcaggatccattgcttcaggtatacaaaccggtattcggcgttgtcttaagcttttcaaactgtattttgtttctgggggatcccttcgcgtgtacgaggatgcacgagaagcgaggacgtgtgtacaatacggttttttgagttgtcttaagcttctttcatgtccctgatatccagggtgtcggcgcacaaggtggagacgtaccgaagcatatgcaggtaacagttacgtgttttatcacgggtgacaatacagagggcggaggaaaggtcccctcgtccctgcctgatatggttcttcagaaacgaaaaaacgttctccacaaagttgaactctggtgaatacggtggaatgtacgcaaacacgaaaccttttacttgagcggcatgcctaacacatgcagaatggtgaaacgcaacattgtcgagagtgatcacgcttcgagtaggggcatctatatctaaaacgaactgctcgaatatctcagtgttggcacttccgtcgacgattttgtgagacacaaccccgcgagtacttgaaacggccaagatgagggtcacccgcttaggtttctttgacgacttcatcctcttcacgacacgtgtacctttcttcgaatatccgtgtattgggaccgattccaaacacaagctggtttcgtctacggatatgatctcaggcgagcacgacatacaattcaaaaagtcggatgcctgttgagaagatacaggttttttacaaaacctgtgctgagctcgttttcgactgtaatcctgtttcttcaaagaccgatggacgctgctctgcgacatgttgatacccgcggttctcatttttgccactatttcggcttgggttacaaaagcgtttccttcaacgagatctcggattgctgcatccgcgtttcgcaaacgccgctttctgttcgatttgactactgcagattttgggcagcaaccattccccgaagaatctacaaaacgcttgacccacctgaacacggacgctgcggaggtgttgtacaccttcgcaaccttgcggtacgacctgtgaaagtacaaataatgtatagaagccctgctttggatactttgtggatacatgtactgtttcaaaagattttgaatagaactataggtttttgaaaccctgtctgctcagtcatacggtggacaacgctatttcttgtcgtaggaccatcagctctttccgcttgcggcaccaggcggtcttgctgctccatgctcatctgttgattgagcgcatcactgcggagtattgtagcgagtcagacatgagctggctaggcaggtgtgcaactggatagtcgtgaagctcacctgcgcggttgcacggcgcggagttgcatctgcagaagtgtttctgccaggacttcagcggctctgggtgcattgtaaacagtttctcccttgtacagccgtcgccagtggggatacaaccactgatacttacgacgattgggaggacctgccttccgatccgaaaactcatgcttcggttttggccctgattgcacttcgcgagctcacagatgaccccaatacaagattgttttcttggttatactctcttcacctgaaggcagctgacccgccatttagcacgacccgccatttttcacgcttaactctctgttgatgcatggcataatggacaacacggcgagtggcagcacggtagaccctcctcagcccgtagaagacgttgtcatgcagcaatttggcggctctgacaccgagtagaagtgtaaacaccctgtaagttccaaacaccctttgggatccgcccgtactttacgctctttcccataaaaattacacagtgggaaaaacgatcatcttagtgccgccaccttatctctgatgagggacacctcctgttccatggctgcggtcttgaactcggcttccgctcggcgtttcgccttctccgccatctcgtacttcacgagttctatttccgtggacaattcctcgatttttgtttgcattctcagcgactccagctccttagacagacggtgcatgtccacgtggagtttgccttggatcatccgcgcgtgcgactcctgcttggtcttcatctcctcggtgtcagattggttgtactctttcatgagttcatcgcgagtcctaagaaggatttgatcgacggaatccggggatatttcgtggtatatttcggacctcgctttacccctccacgtgacctgtacgttatacggagtgagtcgctgtttcagctccgtttccaaggctcttgattcttggaattccacaatggaccatatgtgctcgatatcgaaatcgtttgcatgttctttcaggcgtcgcatgatgctgtcggaacatccaacttttacgtacgatcccccgtgtatcagaatcgacatcacgtacaccacgtgggagcgggagaagtctccgacgaaagcgccgttatggcgcggagcctttagcacgcgacaactaagcatgttcttgtttgaaagaacaggaggctgatataaaggattttgattggactccgccctctccgcgatctcgtccacgagggtcaggtcgccacaaaggtaacgtttcagaatgtccatgcttttgtggcggaagtccgcagctcgctgtccttccaggaggttcacgatatgcatgaaccctgtcgagtcgcacaccggcgtacaccgttggcccgctcccggaaactgatggtgttcaatcatgtttgctacatcggggtagcgatccattacttgcttgaggatcctcgaccaagccgaggagtcgtggtttgggtatattattttgagaacgtcaatcacggacacagtcataacgttgtctccgcgtttgaatagccgtactcgattcccttgaaatatacggtccacttcatcgccaaaagtgaagtacacttgagcagtgtcatcgtcaagtgcatcgtgtactgcaacactgttacaaatcgcctgtgtggtgtcggagagtgggcattccaaagcatgttgtgaccgaggtatggtgaattccacatgacctgaggcacttttctgcatatactcccatgtgtacccatacttggtggcctttcgtttgcacaatcctgctacactgttccgcgcgtaaacctgtgaaaatactattcaattagatcaactgacgtaccagatatgcagatgggacgcactagaggttgcttcccctacaacagaccaagtggtcacacaaagactttttggccagaggggctacaacatgagtcttgtatcggagttcgactcaccatagcggagcctcaacgagcagcagtcatgtcttttgaaggagcgggtggaaccatgatggaagtcccggcaggagtcactgtcgctagagtgatactcggtgctgagcgagcacgatacatcggagttgaacttccagatgagcagtttttgcagccagttggcaacagggtcttcaccgtttttccagagcacaagtatgaagtgaggctgcgcggagatacggttttcacgcttaactctctattgatgcatggcataatggacaacacggcgagtggcagcacggtagaccctcctcagcccgtagaagacgttgtcatgcagcaatttggcggctctgacaccgagtagaagtgtacagtcgttcccaaaactaatgcaacacccagagggtcgccgaagcaaaccgccgatgaaattgtctcagtgaaaactatgggaacaattgagtcgttcaggccttcgcctgcagagcaggcacaggaataccatttttggggcattttgaacaggtatgcctccggctttgaggacattttggttgatgaactgggttgcatcggaggcggagatacaccagaggagattattgaggatgtgaagttcaaggtatgggacgaaatcaacaggctacacagtatgggcgagcccgtgcccgtgtacaccaaagaggaggcagaaaacttcgcagagaggttgtgcgaggaactgcgaggcgatgatgaatccagagtcgaaagttggagacttgtgcgcatcacggtggacatgaataccccaccacctggcctgccccaagaggagcttgatgccatagaggcccttatgtgggaatcgtgggcaaaatgtttagcggaggcggaaaaaacccagccgaaatgttctgtcacgtagtcggtaccgcgcgactatgttctgtaagaaactattgttccgattattttcccattattttcccgtcgtcgctgaaccgggttcctggaacacgggggcacatgttccatgttgaaaacttgcaggtgatgaacgtttaatgcatgtacactgggaaatgcgtcaatgtatcgcgccccccgcttttgtatgctgaatatccttgaaacacattgtctcgaaacacatctccaaatgcatacaggaactcccctgaacctctgtttacatgaacacttatctttgtatattcacctggagcatctcctggtatgtgcatttgtatgacgactttgtcatccgccgcagtacagcttatgctatccacgaggggtatgaatgaggggtccaagttctccatttaaaaacatgtccatgacaaaaactgtccgaaaaaaacgcggcaacgccccagtacaaaagggttccgcttggccgaatcacccgtcattttccagccacttccttccgcagattttcctgattttttcttacttgcgtttgcgcacagtgttttcgtttctccttcccatggcacaagcgatgtcagagcaccagtctcaagcccctgctgaaggcgagggcgccaatctcatcactttattcaagaagcatctcgatgacatgcgcgcagatcttgatttgccccctatttcgctcactttcgacgagtctgtggcaactacattccaagactctcacagtctttttgtcaaaatcaagcccggagatcatatcgctgttcgcgatgcgggtggcgaatattggcaccatggcatatatgttggagatcacaaagtcattgatgtgtgggggttgaacaaggatcaagccgagatacgcgagcgcgagtggggcgcatttgctgccaagaaaaccgattttgcttgggtacactacacaggcgtggacggtgtcctaccactcgatgagactatccgacttgcgagatctgtcgagggacaaaagtttcgccctttcagtaattgcgagcactttgccacatttttacgctgtgaaaggtgggaaggtccatggttgaaattatgtttgttcttggagcgatacatgccctctcctctcccccctggactaaagtaatacatgttttgcaatttctacaggtgggagtcaaaagcaagtttgcgctttctggcttgcactcaaagagacgcttgcggctgcatttggtagcgactctgcgaccagtaccatgcagcttgcggcggtagctgcaggaagcttcggtaccaccacgtgttgaaccagtgttgaaccaccgcgcgacaaaaatgtaaaaccaccacgcgactaggcgtctgtgggagggaacagtgatcgccctggctgccgaagttttcaataactgttccctcgccgatctctgtgccacacagcacacaaaccgccagtctccacactagccttgacgtcacctcgtcagcggttccagtcgctttttcagagtcatatccgtcacctgcagggcgcgatcgactacgcatcgcttgtttttttctcttccttggcaaacgtggttttcaccgaaaaggtttactattacctgaaggccaacgcgcctcaagatgtcgtcgatcaatacctggagtacaacccacctccgaaaaagccaactaccctgacagaggctcttgcagacgtgaaagaacagagcgcggcagaacagagtcagtctgtaggcccttggtacggcctcagacaccgtatcggcctcacctgcactcaagaatatcgtatggagcacatactaagatactatttgtgaacacagggtttttagggttttagggtggagtgacgtgcgaccgtatgactgcacaggcagttgtgaagagtgccgttgtcacatggaattcgcgaaatcgtctacggccagacacccactgttgtaagagatcctgtccagctcccattgaacccaatagtttccgtttaatatgacaacacctgtgtcccttaacaagaggtgcatgttcgagaaatttctcggaggatgacgatgattcttcatgtcttctctgcatgtgagcaacccacattcatgaaaatagtctgaccgtttcagcctatgaatgctgatttcgttacattcatttcggcggactgggcggggtgccggggtaaaaccagtaattgcgagcactttgccacatttttacgctgtgaaaggtgggaaggtccatggttgaaattatgtttgttcttggagcgatacatgccctctcctctcccccctggactaaagtaatacatgttttgcaatttctacaggtgggagtcaaaagcaagtttgcgctttctggcttgcactcaaagagacgcttgcggctgcatttggtagcgactctgcgaccagtaccatgcagcttgcggcggtagctgcaggaagcttcggtaccaccacgtgttgaaccagtgttgaaccaccgcgcgacaaaaatgtaaaaccaccacgcgactaggcgtctgtgggagggaacagtgatcgccctggctgccgaagttttcaataactgttccctcgccgatctctgtgccacacagcacacaaaccgccagtctccacactagccttgacgtcacctcgtcagcggttccagtcgctttttcagagtcatatccgtcacctgcagggcgcgatcgactacgcatcgcttgtttttttctcttccttggcaaacgtggttttcaccgaaaaggtttactattacctgaaggccaacgcgcctcaagatgtcgtcgatcaatacctggagtacaacccacctccgaaaaagccaactaccctgacagaggctcttgcagacgtgaaagaacagagcgcggcagaacagagtcagtctgtaggcccttggtacggcctcagacaccgtatcggcctcacctgcactcaagaatatcgtatggagcacatactaagatactatttgtgaacacagggtttttagggttttagggtggagtgacgtgcgaccgtatgactgcacaggcagttgtgaagagtgccgttgtcacatggaattcgcgaaatcgtctacggccagacacccactgttgtaagagatcctgtccagctcccattgaacccaatagtttccgtttaatatgacaacacctgtgtcccttaacaagaggtgcatgttcgagaaatttctcggaggatgacgatgattcttcatgtcttctctgcatgtgagcaacccacattcatgaaaatagtctgaccgtttcagcctatgaatgctgatttcgttacattcatttcggcggactgggcggggtgcgcctacaggatgcgttttttcaagtagtttctcttcgatatttcttatgtcctttgagatgctgtcgtcgtctagtctagccgtgcagaacccatcaccggtttgttcctgttcacccggtcctgtttgaataacatacaaaatgtccccttgacttgctttcgccatatctacacatttgtaaactgttttccatttttttctgggacacttataattgttctcgtcaatgcacggaagcaccctccgacatcgtgcagccattcactaccttcatttcgacaggtcgctaaggagggttgcaaagatatatggggtcgggaagtcgtctgtagcgcgctgggcgcgtgctctggaggttccagagacgaagggtaggaaggttaggcaaagcgccgtcgcgagactaaaaccgaaaatagcggagcatctgcaacagaatcctttcctgacagtaggggcgcttctcaagaaggtccgcgaacagggtgagaaggtcgggatgaccacggttcatcgagctatccgtgccgcgaacttcagcagaaaaaggacacgacctcggttcgccccaaaggtccccaccgcggaagaagggcgtactttcctgacctgtctgaacaatgcgtctgaagtcatcgccgtggacgagacgagcatctacgtggacgactcaccgaggtacggatacacgctgaagggaacacgttgcgtgcaccgccggaagtgtcctgtccgtacaggacgcgtgactctgcttttggctgtctcaccaacgcgcggcgtcgttcatcacgaagtggtcaaaggctcggtcacatcggatcgctttgcaggattcgtacggaacatctccgcgccaggcagcacagcgatcctcgacaatgcggtattccacaaaacggctgctgtgcgagaggccgctgaaggcgccggtatctcacttttgttcacacctccgtacagcccagagttcaaccccattgagggatgtttcagtgtcatgaaacaggcgctccgcacgcccggtgggtgcttaaacggggcgttagcgacgctcacggcgtcgaaaatctccgccttcttccgacattctcaagcgcacgttgaaggagttgccggaaactagcaaaaagcttaacgagagcacacaacagaagtaaataaactccgcttccggatctcacaacaagagcttaaggctacgccactggaaggcacgcaacacaagaaacgccgctgtcctgacaagagcttaagaagacgatcagcacaaaaaaacccgatggagggagacggaaggagccctgacgacgaggaggacgaagatgcgggggccgagctacgcgtcgtcaagcgatgtttaaggaaagcgctaaacatgtccacggacgagaaggatctgttcgtctcaagggtggaggagctggtcgtcgcggtgtccaggttgatgcaccacgggtcgcttctggcaaccaactacgtcctccaccggatgaacgacgggaaccctccttccgacgaccttctgacagaccagacgttctacaggcagtgtatgacgtactcttcttcttcggtacgttctggcgcgtaccctgaagtgaagtcgttcgccgacacgaagaggcacctcatcccccacacagagcaggtcccgtactccggaaactgtgtcaacgcagccgcgaggaagctgaaatcttccgttctcacgatcctgtcgcaccgcttccaccagcgcgtcacctccgcggtccgcgcaatgtttcccgatataccggaccgtgccaggatcgccataaaacagaggtgcctcggcagacccggagggcctcccatcgcactgactcgagaggcgtgggccttcgttgacgcggttagaggagacatcttccacggagccgacgtttattcgaccgcggtagaggaggccgtttggaattgtcgaggaatcaagaaggcggacagagaggccgtgtgcaccgaactcctagcggggcgaatgcccgagatggacagtcttaagggctcgggccgtgaggtggttacccatgttctggagttcctccccgcttgcagagcacacagaggagcggtccccgacgaagaagttaggcgcctcgtggccgcggccgcgggacgcgttttccggagggcgaccgatgagcagaagcaacaggtagtggaggatgtcatccacacaacctcttcagcagacaggcgtttcgggaggttgataagcgcggcgcgcagcatgctacgcttcgctggagtcatcagcatcggatggttgaagacacacccggcgcgggcgttgatcgccgtccgtcggatgatgctggaggtggaggatggcatccgtctcgccgagaagctcggaaagaaacgccgtcccaagcgcttccctctcctaccgatcttcgggcagaggaggcagatggtgacgttggatgccgacaccctggtgggtctgtgcaaggccgtgggtatactgccgagcggagcagggcggaaagccctgactgaagacttcaagcgatccctgcttagggttccagccggtttcgttttcagcgacaaaacgtccttgcagagcgacggcgtcgccatcgtgttgaggacctcaaagaccaaccctctcgcctccgcagaaatggcgaccaaggatgacctagaagacatcgtctttgacagagtgttggcgaacgatccggggcgggcagacatcgccaccgtcgtcgagtggacggacgaggaagggctgaagaggggatcgacgcgtctgacgcgcaaggagtactaccagcaggcaggcataaaccgccgtgcaaggaagcgccgcatgagggacagagcaatatccgaacacctgaacaaatggaaggaggccagcatcaagacagccgacccagaagcttttgaggaggctctgagggtcagaatgagtccgctccctggctccgagggcgacccctcaatcgaggttgtgtggggccaccaactggcccggtggacgtccataatggacatgaccgcgttcgccgcgaaacgcagaacactggatcgtttttggaggcacaaggttggtctcgaggcgcgacatgatctgagccgcaccgtcgtggtgtttggagacgggaagttttctgcgtcgggaagaggagaacgagccgtgcctcggaaggcgatggaagcctctgcggcacgatttgcggcgaaggtcgttaaggtcggcgaagcctacacgacgaaagtgtgttcgcgttgccatatgcccacattttctgtcagaatgctgaggtcgaagaagactaccgaagggggacgaatcgagcggatggtcgatgtccgggagctgcggcgttgttcatccaacgcatgtcgcgcatctccttacaagtcgagggacaaagacgccgccatcagcatccttcagattttcctcgcgggaatagagcgcccgccgtgctacaccaagcaaggatacgaagctgcgcttagagccatgcgacagggaccgcaacctcatcccttggtctgataggaaaaacctaacccccacggctgtgtcgtgcgcgtcgatggcggcacagtcgcgctgcaagggaaacccccagggtaaccttgctagcaggtccccgcgaggggaccataaaataccttgcgttttgagggacggacttagcggacctatggtgtcccacaatttctggattgtagtttatatacgtctcatttacttattttcgtacatttatttttcataaattaacgcaactaattcaatgtcgcggttgtagcggacgctgtcaccatcgaccactcctgaccccgcctccgctgtcacgccgttgattcccgctgccgaaaaaaccctcaaaacggacgcgccccagtaaagaacgggaaaccctgtaagtggaccgtatatatatatacgtctcgtttacttattttcttacatttatttttcataaattgccaaaaacacagtttacaccacgcgcgtttgcccaccgttgaaaacatctcaataggtacgtaatgagtagttgttcttcggatatgtgcgacttgtgtgtgtgcgactgtagttatggttgcgaatgcgaatattgcgaagattatgaggacaaggtggatttcactgtgataagtgtgatgccgaaatgcgattccatggaagctccaaacaatcgctcctcccaacaagaagtgattgaagatgtccacaagtacctgcaataccgaaagcttattccaggcactcttcattcaagtgttgttcaggcggaggacactctgagaaccgcggtggttcgagctgagaactttcactacatttcagtgaacgccaagtttacatttgtgagagatgaagtgcaacactatgcgaaacggagtcgagtgcttcttctaaactttcgtggtcatggaaatggtcatggctttcggcttcatgacaaaagtatgacgtccgaggacattgttgattggttgaaggaagtgtccttcaatgggacagtcatatgtgtcttcaactgttgtgacacagatcctatgcaattcccggtttcggataatgaaatcttgccgtcggattgggctcttgggctcccttttgactgggtttgcatcagtggaagcagatgatgcgcagtatcctatagttatattcaaactgttttgaatagaactttagggttttgccaacgggttcagaccgttgcccatttggccatcaggtacgcgttcacggcgtccaactccacttcggtcatcaagcggtcaaccaggatcacctcgcccacctcgcccgcgaaaaactccgtgctctgaccaccctccgaccctatcgcaaacttcccgtcgctgccgctggtggtgtcgttggtgttcacaaacttcacaccgtctatccacgccacttgtgcgttggtagccacctggcacgcaaccacgctccatccatccggtgacggaatgcttcccgcggggtacgatgtctggctcgtcgtcagctgcacgtgcgcgtcgcggatgcaaaagtgggatcccgcggccgaggagtttgccagcacagaccgcgtcacgcccgggtccggtgtccccgcgggtttgaacaccgcgaacgccgtcattgcgacggagctgaagcgcgaaacgttgtttatgactagcgactggtccacgccaccaaaacgcgcgccggtcagatggtccgccggaagatacgggcccgccggcgccgcgccttgtgtaaaagtatgtggcgggtacgagaacttgtgccgctcgtaccacttctccacccggctaccgtcgttgttttggaattgcgcggtatacatagcgttgtttccacctgtaccgtcggcttggatgggactgtacaccgtgtccatccacataacattcgtctgttgaagcacgtccggcccccggggcgtcgtcagcacctcgatccggtccaccgcacagttgagcccggacagagcctcggcaccagcaacgattctcgatacgttagagagatcaattgaacccccgtccacgattcccacaaaaggaacttgccgttgtagagaagggtcggggaacgcacttgccactaaccaaggaaacgttccacttgaagttctaacacgatacgccctgacagtatacatatactgagttcccgccccgctgctcgcgtcggacacgaacgtccgggattggagccccccgtttgacttaatcaagcctccggcgttggcggagttgtccgcgaacctgccgcctccgagtattgtcccggggttgtccgcatcgtacgcgacgagggtcaagcgatcgctcgccgaaaagtcggcaccggtgacgaacgcgcggatgacgaaatccggtgtcaacccgtccgcggtcggcaccgtctcgacgaatatggggttcccggacgagagtgagtggggaacggtgagaatcgtttgcgtcgcggggtccgtggagtcgtacagagtttgcgtgaggggatcgaaccccatgaacggcgtcagcaccgaaccgtccgcgcccaagtactcgtcggggatatactgcgggtagtacgcgtactccgtgagcgccgcctctgcgccgaccccctccacgcggaactggacaatccagtcgtctcccgccgcatgcgtgtccgtgacgctgctcgcaaacgcctcacgcgaatcgaacacctccgttccggacgcgtcccatacctggcctatcaacacacccgcaccgttgtcgaaacggagaatgtaggtgtgcgcctgcgcttccacgctcccgtaataagcgggcgccacaaggtcggattcggtcgagccgacctggcgtttgacgtacatggtgtttgcgtttccgccgctcgagacgttcgcctgaagacgggtctccttgccggtggggacgtgacgaaattgcaaataaaagttaaggtccgacgtgtccaccgcatacgcgcggacgcggagggtcgctccggacaccgagagggtggtggtgtagtctagatccaccgactgtgagggtggcaaagtctgcgggaccgataccgtgtgctccgcgtcgaagccatccgtgtgcgacgtgctcaccgccgcgtccgtgctcaccgtcgcgtctgccgtcgcgaccacggccgacacgttcccggccgcgtcgacggccgtcgcgcgcacgtagtacggcgtgtcggcctccaggccggtgacggcgacgctcgcgtccccgaccgacgccacgctcgcgctgagcgtcgtaccgagcgccacccacgcggccgtgtccgacgccgagttcccgaaaggcgccgtcgtgccgcagtacgcggtgactcccccaataccgctccccccggcgtcggaccacccgtccaggcccgacaccgtgatggcgtcgctgccgctcgcggatgctgtgagagtacccgagtacgtgggcggcgtgcggtccacgacggccttcgcgcctcccgcgctgatggcgctgctcgcgtttcccgcggcgtccaccaccaggatgtacgcgtacaggtcgggcgaggcctgcgtgatggccgtgaacccgaatccgaacccgttgctgtacctgtcggtggaaagggaaagcgcggtgatgtcgaaggttcccggggccgatgtgtacgcgtgatcgagcgccttctcgccggtctggaggttcgccccgtccgcgcccgcgatcgcctggatatcccccgcgcccagactcgcgctcggcgacaggacgaggaacgcgtccacgtacccgtccacgttgtccgccacggtccccgcggtcgccgagaacgtgtaattctcggtcccggcgccctgggagacgtcgaagcccgagattgtggggtcggtggcgtccggggtctcggcggagccgatccgcacggcggccgccgcgttgccggccgcgtcctccgcggacacccagaggtagtacggggtcgcgtcgtccagcgacgacagggtgaacgcgtcggaggccaccgccccgcccgtcaccgcgatggcggccgaggtcgcgccagtcagcgtgtcggagatgttgtggtggaccgtgacggtcgccaggcctccgccgtcggtgattccgctcaggccggtcacctggaccgaggtgctggtcaccataccgataccgacgccgtccagccccgcggggggcgtgtagtcctgcacgtggtcaacgaactggctcaccgccgccatgcggccgttggggtcctcgaccaggatgtggctgtacacggagtcgccctcggcgaccggcctgaaagatcccgcccccgagtcgtgcacgttgctggttccgagacccgagagggcggacaacgacacgctggagttcgcggcgtaggccgccacgctggcgaccccgaacccctcgccgaacgcggtgacgatattcgataagctcgcggcggtttccagggcggtgctcaccacgtggtacaccgcgatggttccggacgcgtcgtccgagacagtgcccgcggagggcgcgaaggtgtacgtcgcgggcgcctgtgcgacctcgaacccggcgacctcggggtcgcgcacgtcctgcatcgtgactgtgttgccgcggtagctggcgatcttgccgttgccgtccacgacaaggatcatgggcacgcacacgtcgttgggcgcgagcggcgtcccgtcgaaaaacgtcgcgttggacatggcggggacggggatcacgggcatactttttcaatagtaacactatttcgccgtgtgccgtttcgatcgatcgcacgccatcggtcaaaagaatttcgaaaatgcgaagggagacaaggtcgactggctcgttgggcgcggactaactcgttggcgcgtttttgtcgacaattcaactctttgagcgtccacgtgtccacgtgccacgtgtgtatgtgccagtgtgtggcagtgtaatttacattatttccagttcggggtgccacgtgtacacatgacagatatacccgcgtcccgcgtccacgcggatcccgcgagtctttcgaggccttgtcaggtcccgcgcacccgaacttcattcctttcattcccctcattcccctcgttcccctcgttcctatcattcccctcgttcctatcattgccgcccgtctccgcgcccgtctccgcgccagtgtgcctttcccgacgcctttcccgacgcctagcatgcatcgatctaaccgtcgaccaatggcctggacggaggttcgagcggatcgcctggatgcgccgtttctggcgcccgaaggcgatggttgtactgccgcagccacaggcactgccactgccactgccgcgagcgacccgtcctggcggttctcgtggctgtaccgcgcctccgccgaccctgtccggcggtacgagattgtgctgcgtccccgcgcctttttcgtcaaggacgatcgccagaaggagcaccttcggaagtcttccgcgaaggccgaggtcgcgggcccctccggtttgttctcggggtacgaggtgcacggcgttctcgcgttcgcggagggaaagacggggcgcgtgcgggaggacctgcgttcgcggctgacggcgtttctgcgcgaggcgaccgccttcgccgacgccgagagccagcaggacgagaccgcgaggcgcgaacaggaggcggttcggaagctcttcagggcggtgaaggaggtttcggcggatctcgccgctcagcggatatgcgacctggtcgctaagcagctgtccctggacccggtcgccatcggagtcggcgacggagtcggcgacggcaacgaagacggcgacggcgacggcgacggcgacggtgccgcgtcggaggagatgcggcgagctgtggcgcttcagcgggttctgccggcccactgggtcgcggtcctggacgcgtgcgcggaggcgtttcccccggaccggtccgacccggacaagttgagaagtcctttcggcgcggggacctcgacccacacgctcacggtctcctgctcctcctacgacgagcccgtccacttctacacgctgatcggcaacgggtccaaggagaagatggaccgggtcaccaagaccatactcaacaccgcgcacgggatcctgcggtccgtcgcggacgaacccgacaaactgggcgacatcgtgcaggtgaccgacggcatccgcgtcgacgggttcaccctgaccgagctcctgcttccgcgcggcggcgacatcaacgtcacgccctccgcctacgagttttacacgtcgtacttcctggttctggcggtgatggcctgttggcggaacatcaaggaccttcgaagggttttctgtacgtacaagaatgccgagaacagtatctacatcgcgctccagagcgccttcccggacaagatcccggttctgaactgcttcaaggaggcgtggttcaacctgatcaacgcgcaatacaacgacgtgctagtccggaggaagcagaagagcctcccgtcggccaggaccgtttacgtcgccgacattctgctccacaccgcgatctccgggcacgagatgacgcgggagaaggctttggcggtcctcgccctcgcgcacagccggtgcatgggggggtgggcatccgccgctcgcccggcggacgtcgcgaacaccaggacccccgacttcgatcgcagcaccacgcgcgcgaggcacaacgtgatgtttctctccgacaggtccgatatggaccataaaaaatactacctttacattttgcgtttttggttactcaacgcggttgtttgtgttcacagggtctgggagatctgtacgtggaagaccgacaagggcgccacccacgcccaccgggtggttctgcacgaggacctggtcgcgcttctcgttctttactatcacagcgcgcgccccgttctcctggaacagtttctccgagccaccggcgaagaggatcacaagttcttcttcgtgcgtcccagcggcgcgcccatcatcccccggaagaaggacgggaccctggacatcctccactcgagcgacgggcactccgcggtgatcaccgcctacaagcggagcctggagtttttcctgcaggttccggcgaagtcggtttttttggatctcacctccgccaacaacttcaggtccatcttcatcaacaagtactccacccccgaggcggacgacgtcaacagcctggtggacctcggcatgcgtctcgagcagcggcgccgcaacaagtccgtggtcggcctgaacagtctcgttccaaccgccggggtccagaggttccactccatccaggcgcggtccgcccgaaccagcgaaacccacatgggcgcgagctactccgccaactgcgtcgcggacgatcacaagttcatggctgagcacctcgcgtacgcgagggcgtacgtctacgaccagctggaaaccatcaggaccaaagactctcccccggcggaatatacatgaatagtgatttaaaaatcgacttaagcgtccattgcgcgcggcggacacaggcacgggtccgtcggtcggtcggtccgcccgttgggagttccccaaagtgttttgtttttgagaatggggcgtaccgaacgcgggcgagggcgtaccgaacgcgggcgcgcgatcgtgaaggagctgggccggcacggcaaacggatggatggtctggggtacgcggcgaaactgcccgcgaagggttcgggatcgggttcgggacccggcccgggaacccgaaccccgacccgcgcgccgcctccgcctccgcctccgcctccgcctccgaaggccgctgccaagcccgagacatcggtccgggccgagggcgcgggaccaacgccgtcgtcaacttcgacggggcgcgcgccgagacgtgggcgcggtcgaccggatattcgggatttcgggatcgcctcgcgcgggacgcgcgcgcgtcggaggtgaacagcgtgttggccggactgggcgagcttcagcggttcgggtcgatgttcgccttccgggactggacgctgatggccgcggagtcccggttcccgcgggaggcggtggcgcgcgtggaatcgtacgtcgagcgcggtgcgggttgtgttgcgccggagggcatgcggcggtcctgcgcggagcttacgcgcgccgttaagcgggagcgtttgcggcggcgcgcgcgcgaggtggagctggcgcacgcgctccgcgcgaaggggctgcacaggcggagggactcgaggctgtgcgcggcgtttttgaacggcaccgtctcgaagaccgcgttcgaggtcgcggaggtcatggcgcggttcaggttcctgtacggggggttctccccggcgttcaacgagacactgtcgaactacgtgatcgtggacgcgctgtcggacgatgacgacgagttggggtccgagttggagttcggggacggggacggggacgcccacggagacggggacgccgacgccgacgccgaggccgaggccgacgggcggcgcgagtacgtggacgaggagggcgcgcggttcctggcgttccccgttacgcagaccgagttcgtcgccgcgcggcggcgggaggcggagtcgtggtcgcggttccccgcggtgtggccgtggctggaacacaaggtcgtgcgcgtccagcggtggtggcgcgagacggcggcgaacccgtacacgcgcgcggggcgcaaccggatgcttcgcgagttcgaggaactcctcgcgtacgacagtgtgtaaaaatgacagtaaaaaatgagtaaaaacaaaatgctggttctcgtggtcgcggtcggggcggtggtggtcgcgtactgctctctgaagtgccgctacggcttcgacgacgcgctcctcgtgcgcccggttgttcccggcgtggacctgtggggcgtttcgcacgtggtgatgtatttcgtcgcgggcgcggtgtggcccgaccggtggggcacggttctggccgtgggcgtcgcgtgggaggggctggaacacctgctgtcgatatcgcgcatcgagtgcaaatcgggaaccttgggcgatatttggtacgggcagtggatcgatctcgtgttcaacgccgtggggtacgtttcgggatcggcagcgggccgcctgtttcgcggcgtctcccgtgaataaaaaatgaatggttcacggcgatcgtctccagaatatctatctcagccagcagcgccccgcaccgccccgcaccgccccgcacatctccgcaccgcaccgcgcctcgcaccatgtcgatgccgacgccgacgccgttgcaacgcgccccgcgggcgtctatgacggtccccgaccttcggacgctgttgcgcctcttgagggctatgggcttcctcgccgacagtgtggacagccgaattcgccagtccgacatcatgaagtttctggccgacatcgggttcacgctgcaaccgggcaaggcgtctatcatggagaatctggcaaagtacctcgcccaggagaccggcgtcgttgtctcagccgacgaactcggcacctggttcaaggaacccaaggcgtcaaagaaggtgtggactcctccagaagaattccgtcagcgcctcgagcacgccatccgtcccaagggcaacctctcccaggtgaaaaacgttttgggcaagccagacacttcaataaccgactctttgcgcggggtcatgaggtacctggtggcagccggtgtcgtcaggcctccagcaggggggaagttcctcccgataaacaagatgacccagagtgatgtcaagactgtgttctcttccctcgggttcaacatgccgcagggacgcggggctttgcagtgttcgaccattgcattagtgaccctcatcttcaacaccgttcagaccacgaggattctgaccgtgaaagaggtcaaggcttggttccgcggcccacgctgcgagagcggtgtgagtccggatgccgccgctttcgtcgcgtgccatctggccggagttgtcgcgtggctccctgtttccggtacagcgaaaggttcgccggtttc

SEQ ID NO: 123 - DNA, 22400 bp, Tetraselmis sp.
  source 1..22400: mol_type = other DNA
cgggaccctgccccgggatctggaccgacatattgctgtacaagcgcttcgaatcctgaagctcctccctgccggacacgcgcagaccgttcatacgcagcgggtccgcgggcgcgctccccacgacgcgcgcggggttgccgaaatagttctcggccgaggcgcccgtcacgcgctcgttcggaagagcgcgatcgagcgaaaaaagtgcgttcgggtcacgcccctgtcccgacaggctcaccgatcccgcgtgccgcatctccgcgggcgtcacgcgcccccgcatctggtactcgggccgcgccggcgtcggctcgttcacctccgcgcccgccgcccccatgtactctcgcgtcgtctgcggtccgcgacggaaactgtgctccgtgttcgggcggaccgtccgcgcctggacggggcccgccgtcgccaccatcccgcggtcgcttatgtcgaacagagtatcctgcttgttcttcgcgaacgccggatccagagcccgctgctcgggagccgctccggggatcacgcgcccctccagctgcggcttctgattcgacagcggccgaagctcgtccaccgtcttcggaagcaggtactcgcggtcctgcggctgcgtgaacccgcccgtgggaaccgccgtgtacccctggccgaccccggggcccacgcgcacctgctcgaacgggagcgagttgttctgggccaggggaacgtccgcgcgactctggaaagcagtcgtcgtactgggaaaccccgcgtaatacgcggcccccatagcggggttgaaaaatgattccacctcacgcttcggcatgctgttgcccacgccgggggcgcccgtgtggtcctccagcttggactcgttcatccgattgctcgaatactgtgtcagcttggacccgtagaacggctgctcgttcaggtggcgaaagtcgtccggcgtgaactcccggtccgcgaggtcgctgaataccggctcggtgatcgagaactcgtcgtgggacaaccgccgcgagttggcgtcgatgacgcccgagtccaccgggtaccgcgcggcgcgcgccatcctctgcgcgtttcgccactcctcatccttgacgtccgaaaacgtcagcccggtctcgtacccctggtagtccgatagctcgcccctccgaaagtcccggctcttcaccgggacggggtctggagtaagcgccttccgtttcgaaaatattgtccccaggccgaccagggccaaaatcgcgtatgcctccattttgttgttgaaacattttttgtggtcgccttcacggcacccatgtcgcggcaggggtgccgtgccacaccgattcgcatcgcctcgcagcgtggcgtggcgtggcgtggcgtggcgtggcgtggcgtggcgtggcgtggcgaaaatcgcgcaaacacccgccccccgattttcgctcgaaacatgagagagggagacacagatgtacacgaaccttgtcttctccggcgggggactcgcgtgccttgcgtcattcgcgtgcgccaacgccctcaaacacagactccggaacgtgaccacggtcgtcggcacatccgcgggggcgctcgtcgccgccctcgtcgccatggaggccgacgaagcgcaggtgtatacgcagatcgttcgcgtactgggcgaaacgaaacccatcaaccacgccaaattcacaaatatcttcgagacgttcggaagcatcaacagcgaggccgtcaccaggccgctcattaccgcggtgttcatgcaggcctacaacatgaccgaaatatgcaagggtcgcgaacctaccacccgcccgcccaccttcaaggacttcgcaatcgtaaccgggaaaaaccttgtcgtgtgcgctgtcaacgtaacccaggggaaaccggtcttcttcagcgttgacacccaccccgaccaggacatcgtccaggccataaccgcgtcgtgctcggtcccgatcctcctgtcgcccgtcaagatcgacggcgacctctacgtcgacgccgggatcaccgacaacctcccgctcgcagctctcgaccacagcgtcgcgctgccgcaccagacgctcgcgatcgacacgtacctgcccaaccacgccccgaaccagatcacggacctattctcctactttcgcgcgacgctgctcaccgtcgtaaacgaggccaacgacaggaaccagttccggttcgagtgcgacagaattgagatggactgcgggggtaaacaggcgctccacatcgacagtctactagggaccgttgaccaggccgccctcgaccggctttacaccaccgggatacaggccgccaaagcgttcgatcgggaatcgtttcccgcggtccaaaaaacaagtgatccaaaacacaaatgaaaacccttatcatgctcctcatgtttatatccgcgttcctgataatatccggaatccacgaccagagactggagtccgccaacaggaagaaaaaaatcgtttacaggtacatcccgcgatccgcgctggacgaacaatactacggaacccaggcgtccgcccacttccagggcatgttcaccgagcgcaaatcgccgtggatgggggccagtacgcccgaggaagaagggaaacaatcgttcgacttcgaccgcagggtccacgccaacccggtcaatgtgggagaccgccgggtactgggaggcggcgccggagggggagcaggaggaggcaccgattccgattccgattacgattacgactccgaacacgtttctgattcggactctgactcggactcgtaagcggactcgtaagcggactcgtaggaggaatcggattggggatcggattctgaatcctcggtcggcccggtcggcccggtcggcccggtcggcccggtcggcgcgttggtcccagtggtcccagtgggaccagcgggaccaggtggctccaggaacagttcctcgccgtcgcactggcccgtcaagtaccccaacaggctcgcgtagtacagcgccacgtacatctgtatcataacaccgctcggatcggtcgccggggtgcgccgggggagtgcacggaggttctcgtgacaataaacgcacctcgccagcttcgcgtcgcacgacgcgcacaccacgctccgccctctgcacgccgggttcgcgcacgcccgcgtcctgcggacccgttcgatcccgtcgtagcacacaacacactccattcggccgatccctacttgccctccggggccagaaaatgcatttgtcttctgacacaacaagaaagaacgcgcgaccgatgacggaacccgaattctacgcctccgacatgactgtcgaacacgtctacgacttctccgcctccgaccaaaaaaccgggtcgcccgcggtcgcgcacgcccccgccatcgccgaccagtggcagttcagggcgttcagcattcgcgactgctggaaacggtggggcgtccgcggcgaggggaccagggtcgcggtcatagactcgggcgtgcgcgcgacgcacgtggacctgcgcgcgtgcgtaaaaggcaatcacaactacgcgcacgacgggtgcccgctatccgaagagaccgaccacggcacgcacgtgtgcgggatcatcgggtccgcggacaacggcgacctcgtcacgggcgtcgcgcccgggtgcgaaatccactcgttcaaggtgttcggaaagaaaaagtcgtgcatcgcagccaacatcctccgcgcgctcagggacatcaagaacctgaagtacgggaggttcgacgtcgtaaacatgtccatcggatcgccccaacccgaaaacagcatccggctcgaacttctcgaactcgcggccatgggcgttatatgcgtcgcggccagcggcaacggcggggaccacaagtcggaaaacgcccccaggttcgggaccacggatttccccgcggcatacaactccaccctctgcgtcggcgccacaaacaacaccaaccggcgaacccagttcagttccaccgggccccgggtccacatcatggcgcccggagaaaacatcctctcgtcgtggcacacgtccgacaccgccatggccgcctgctcgggaacatccatggcgacaccgttcgtatccggcgtcgtagcgctcctcgttagctactgcttgaaacatacactgaggaaacccgccctcgacgaggtgctgtactgcctcgccgcgtccgcgaaaaacatggaaaccgccgggttcgacaactttacagggttcgggctcgtggacccgtccggcgccatccagaaatatatcgaattaaacgaccgaaaaaatcctggggggtagaattctacgcagccaggtacttgtacgcgctcttcgcggcggcgttctcggcggccttcctcgtgctcccgaaccctattcccagaatgttatcccgccccgtcttcgcgaccgccctgaactcgccgccaccgtcattcctggtcaccacgaactccggaccggggcgccccgtccgcgcgaagtgcttcaccagcttgtccttgtactccaactcgtcggacaggagctccgcgatgttaacgtacttctcgtagacgcccaccacccacctctcggcctccgcgtacccggcctccagaaacaccaccgcaaccagggcttcgaatgtgtcctccatcacgtccgggtgcgttcgcttggactccgaccccgaacccatccgcatgtacgcatccaggccgagactcttgccgatctcggccatgacctgaccgcacaccaggcggttcctccgcttcgtaagaacgccctccgaactgtcgaagtaccgctggtatatgtacttcgtcataaccaggtccacgaccgagtcccccagaaactccagccgctcgttgttttcccggtgcgaacccgaacggtggacgaacgcctttttcaaaacctccggcgacacgcgcggcagacccaagcgtcgaatggtatcctgcgtaatatccattctgaataccacacgctccttccccggaaaaaaaaccgtatcgtatccgtttcagtctccgtctccgtgcccgtatcaatatccgtatcgtgcgcacaaacgtgctcgcgcaatcccgatttcaaaaacgttcccgcggaattcaaacgttacctccttggagtacaccgcgcctcctccaacgcgccgcgtatttcaaccgcacgcaacacgccccgcacgcaacacgcaacacgcaacacgcaacacgcaacacgcaacacgccccgcgcccgcacccgcacccgcacccgaaccccttctcgcaccaccatggcggaacccccacgcgtcgccgcgctggccctcgagatgtgcgcgtccggggagatgatggagatccgcgaaccgctctacacgcttagcgaggggtccccgcccgacagccccccggattcggtcgtcaaaacgtcctacttcttcctgcgtaaggcggcgttccaccgggtcctgccggcggtgcagaaacggacgaaggaggtacacggaggagcacgcctcgtgttcgccgggcgagccgaggacctcgccctcgccgtgctatgcaagaccccgatcccgctggaagtgacccacgccataatctacgtctctcgatcctacaacgactaccgaatggtccggcggtccggcgacctcttcttcaagttcttcagctcgtgcgaggaggcccaccgggaggccacaatacacaaacacatgttcaacacgttcccggacaaggtggtccccttcgtcgacctcacacccgctccccagatactccacaacgtccccaacttcgccttctccgagaacgagttccccctttgcctcgtcacaaaggcacccccggaaccctttattttcctcagcgacatcaccgacttccacgaggccagagtagcggtcgcgaaggtcaaggacctaatcgagggtctgtaccgggacctcgggttcgtccacggcgacgtccacggcaaaaacgttatactcgcgcgcgatgactcggtgcttctgctagacttcggcatgtcggagattcataacaaagatctatccgaacgactcaacgcagaaggggactccgcagatgtcgcctacaacaacttctcggacagggacgtattcctccacctgatcaatgacagggacaacgaacggagggtgtcccgagcggagtacatgcacctttacgacatcggcagagccattcaccgaggcgcgcccaggttcgaggccaggatggcgcgccacttcctccccgacgccaaggacgaccccgccgctaagcgaatcaaggcccccgacttcagaaaccacttcttcgtcgcgcacaaaatgatcaacctcaaatacgacaacctcgccaccaggcgccttcgcttcctcgcggacaagacgaactcccattcccaggttcacgcacgtgcccaggcaccctccgacaagcacaagcacaagcacaaccacgcccgggggacgacggccatcagggtgtaatttagatttcacgacaaataaccgccctccataagctgcacatactgcggtttcagggcacccgacctatcgggtaaagaacacccgcaggggtaccgaagcgacctgtgtggaaccacgctcccttgtaaatttccatccaaaaccaccgtcttgacccgcttctgcccaccgctcgtccagcggaaggtgacgctcggcgggaccgcgcgattctggtcgaggcccgcgtggtacgagtttgggcgttccaggtgcaccgaaaaccgcccgtcgccggacacggtcacggccccccggtttacgcccgcggcacccccgtcgaacgcctgcccgggactgtggaacgggagcccggaccccgaaaagctgtacccaacgtagaacggggcgggagcctcgtactccagtcgaagatcgtccacgccgcctgtcacgacccccgacaccgtcacgctcatcttcttcttcttgatgtttactgcatatatgaatgaactcgacagcaccctcccgcggcactcctcacccgaaagtgcgtttgtcctcgatttttttttacaggacctaggcccaacaacaaccatgcctatcccgaacgtcgctaaatccgcaaccacatcgcttgcagctcgcgcgccaaagttctcgtgccgtctcggagggttccacctcatcatgctcgcggcgtttacgctcttggggttctacgtttgcttcaaccaaatcaaagccctcaagatcgacgtcctctccctgaaggctctccttcaggactcccagagatttaaggcccccgggctcgcggaacaggcgacggtcgggtctgcggggggcggggggggcaagggagtaggaggagtaggcggcggcggagccgacggagacggcgacgggatcgcgtatccaccgcaggtcttcacgcgcaaccagaacggccatgaccacggccacggcttcgaaaatgtcgacaaccccgacgccgaggatctccaagacgcgggtctccgggacatgctttcggaccttgtgaacgcggccacgtcggaggagggggtcggaggcgtgacagtcttcgtgggcacgggtcccgaccacgcccgagagggacgcgacgatacccgtgcccacgagggaggacattacgctagcgaacctcgcgaggtcgtcgccgacatccaggacatcaccgatgagtccctcgcctcgggagacatcgccgatttccaggaggtggacgacgccgtagacaacctcgagaacttgaacgtaaaggacctcaaaaccctcgcggccgaaaaggggatcgttgtaaaggccggaataaaaaaggcggacatcatcgctctcatcagacacgccgaatcgtcggaatagtttttctacttcgttgccaacatgttggaggttatcgctcgggtcgttcacaacggtctccgaatcacgcgctttctgggccgaatcgcgaacgccccgcgaaccgcgcttatcaaacccctggacggactcccgatcaggctcgacgtcataaacaccaggtgcgcctccgaaaagcgccgggtcaggaacatctacagttctagaaacctcatcggcctcatcgtcacgaggttccttgatacgactcgaaggcggcttcacgtctgggacgttctgagagaacagcctatcagcgcgtcgctcctgtacgtcctcacgtacagggggggagtgcaaactatcaccaggacgcccgacgtcgagtcggcgtcgcggagcacctacttgatatcgggcaccgagtctatcgccggcgtcacgggtgttcgcaagagacgcgtcatcagcgcgttcgccgacaaccacgacgtcacgcgattcatcaagaagatcgaaaccagctccggtttcgtacgcctagggttctccgaagttcagcactacctccggcttcgggggttcaatcacccgatccgatccataaccattctgttcgccgacatgaaaaagatgcatcttgaccgttgcacgggttttcataaactacaatccagaaattgtgggacaccataggtccgctaagtccgtccctcaaaacgcaaggtactttatggtcccctcgcggggacctgctagcaaggttaccctgggggtttcccttgcagcgcgactgtgccgccatcgacgcgcacgacacagccgtgggggttaggtttttcctatcagaccaagggatgaggttgcggtccctgtcgcatggctctaagcgcagcttcgtatccttgcttggtgtagcacggcgggcgctctattcccgcgaggaaaatctgaaggatgctgatggcggcgtctttgtccctcgacttgtaaggagatgcgcgacatgcgttggatgaacaacgccgcagctcccggacatcgaccatccgctcgattcgtcccccttcggtagtcttcttcgacctcagcattctgacaaaaaatgtgggcatatggcaacgcgaacacactttcgtcgtgtaggcttcgccgaccttaacgaccttcgccgcaaatcgtgccgcagaggcttccatcgccttccgaggcacggctcgttacagctcgtcacagcaccctccgacatcgtgcagccattcactaccttcatttcgacatgtcgctaaggagggttgcaaagatatatggggtcgggaagtcgtctgtagcgcgctgggcgcgtgctctggaggttccagagacgaagggtaggaaggttaggcaaagcgccgtcgcgagactaaaaccgaaaatagcggagcatctgcaacagaatcctttcctgacagtaggggcgcttctcaagaaggtccgcgaacagggtaagaaggtcgggatgaccacggttcatcgagctatccgtgccgcgaacttcagcagaaaaaggacacgacctcggttcgccccaaaggtccccaccgcggaagaagggcgtactttcctgacctgtctgaacaatgcgtctgaagtcatcgccgtggacgagacgagcatctacgtggacgactcaccgaggtacggatacacgctgaagggaacacgttgcgtgcaccgccggaagtgtcctgtccgtacaggacgcgtgactctgcttttggctgtctcaccaacgcgcggcgtcgttcatcacgaagtggtcaaaggctcggtcacatcggatcgctttgcaggattcgtacggaacatctccgcgccaggcagcacagcgatcctcgacaatgcggtattccacaaaacggctgctgtgcgagaggccgctgaaggcgccggtatctcacttttgttcacacctccgtacagcccagagttcaaccccattgagggatgtttcagtgtcatgaaacaggcgctccgcacgcccggtgggtgcttaaacggggcgttagcgacgctcacggcgtcgaaaatctccgccttcttccgacattctcaagcgcacgttcaaggagttgccggaaactagcaaaaagcttaacgagagcacacaacagaagtaaataaactccgcttccggatctcacaacaagagcttaaggctacgccactggaaggcacgcaacacaagaaacgccgctgtcctgacaagagcttaagaagacgatcagcacaaaaaaacccgatggagggagacggaaggagccctgacgacgaggaggacgaagatgcgggggccgatctacgcgtcgtcaagcgatgtttaaggaaagcgctaaacatgtccacggacgagaaggatctgttcgtctcaagggtggaggagctggtcgtcgcggtgtccaggttgatgcaccacgggtcgcttctggcaaccaactacgtcctccgacggatgaacgacgggaaccctccttccgacgaccttctgacagaccagacgttctacaggcagtgtatgacgtactcttcttcttcggtacgttctggcgcgtaccctgaagtgaagtcgttcgccgacacgaagaggcacctcatcccccacacagagcaggtcccgtactccggaaactgtgtcaacgcagccgcgaggaagctgaaatcttccgttctcacgatcctgtcgcaccgcttccaccagcgcgtcacctccgcggtccgcgcaatgtttcccgatataccggaccgtgccaggatcgccataaaacagaggtgcctcggcagacccggagggcctcccatcgcactgactcgagaggcgtgggccttcgttgacgcggttagaggagacatcttccacggagccgacgtttattcgaccgcggtagaggaggccgtttggaattgtcgaggaatcaagaaggcggacagagaggccgtgtgcaccgaactcctagcggggcgaatgcccgagatggacagtcttaagggctcgggccgtgaggtggttacccatgttctggagttcctccccgcttgcagagcacacagaggagcggtccccgacgaagaagttaggcgcctcgtggccgcggccgcgggacgcgttttccggagggcgaccgatgagcagaagcaacaggtagtggaggatgtcatccacacaacctcttcagcagacaggcgtttcgggaggttgataagcgcggcgcgcagcatgctacgcttcgctggagtcatcagcatcggatggttgaagacacacccggcgcgggcgttgatcgccgtccgtcggatgatgctggaggtggaggatggcatccgtctcgccgagaagctcggaaagaaacgccgtcccaagcgcttccctctcctaccgatcttcgggcagaggaggcagatggtgacgttggatgccgacaccctggtgggtctgtgcaaggccgtgggtatactgccgagcggagcagggcggaaagccctgactgaagacttcaagcgatccctgcttagggttccagccggtttcgttttcagcgacaaaacgtccttggagagcgacggcgtcgccatcgtgttgaggacctcaaagaccaaccctctcgcctccgcagaaatggcgaccaaggatgacctagaagacatcgtctttgacagagtgttggcgaacgatccggggcgggcagacatcgccaccgtcgtcgactggacggacgaggaagggctgaagaggggatcgacgcgtctgacgcgcaaggagtactaccagcaggcaggcataaaccgccgtgcaaggaagcgccgcatgagggacagagcaatatccgaacacctgaacaaatggaaggaggccagcatcaagacagccgacccagaagcttttgaggaggctctgagggtcagaatgagtccgctccctggctccgagggcgacccctcaatcgaggttgtgtggggccaccaactggcccggtggacgtccataatggacatgaccgcgttcgccgcgaaacgcagaacactggatcgtttttggaggcacaaggttggtctcgaggcgcgacatgatctgagccgcaccgtcgtggtgtttggagacgggaagttttctgcgtcgggaagaggacaacgagccgtgcctcggaaggcgatggaagcctctgcggcacgatttgcggcgaaggtcgttaaggtcggcgaagcctacacgacgaaagtgtgttcgcgttgccatatgcccacattttctgtcagaatgctgaggtcgaagaagactaccgaagggggacgaatcgagcggatggtcgatgtccgggagctgcggcgttgttcatccaacgcatgtcgcgcatctccttacaagtcgagggacaaagacgccgccatcagcatccttcagattttcctcgcgggaatagagcgcccgccgtgctacaccaagcaaggatacgaagctgcgcttagagccatgcgacagggaccgcaacctcatcccttggtctgataggaaaaacctaacccccacggctgtatcgtgcgcgtcgatggcggcacagtcgcgctgcaagggaaacccccagggtaaccttgctagcaggtccccgcgaggggaccataaagtaccttgcgttttgagggacggacttagcggacctatggtgtcccacaatttctggattgtagtttatgttcaccgcttcttcctcgcgcccccccgagtccgcgcgcgcatgcgacccccgcccttgacgatcgcgtcgatctccgaagccgcgcgagccaggaacccgccgcctccgaagagaaacgcctcgtcgggcagcggacgcttctccgataactcctgcgacttatcgacctgcctggacttgtcctccttgttctccttgtcctccttgccctcccccgcgggcttctcatcctcggacgaccccctgccctggccctggtcccgcgtcggagcgaccggctcgccgaaaccgaacccggacgggctcggctgcgagggtttgtcccggggtgggggccgggggttgtcctcggacgaaaacccgaacgccggagccggcgccgtagacgcgggagcgggggccgttggggacggggacggggacgggacctgacccggaggcggagccggagcgggtctctgcgcaccctccctcctatcgaacggctgtttccgatcgtcaccgaactcgcgctgcggcctgggcgggcgctggtcgaactcgcgctgcggcctgggcgggcgctggtcgaactcgcgttgcggcctgggcctgtcaccttgcaccgtgtcgacctgtttgaccacatcgtcgatatcccgctgaagctggacccgaccctcctgctgctgctgttcaagctgcctcatcgggaaatccccgatgtgctccttgctcacctcgatgatcttatccatctgcttcgccatgagcttcagtctgtcgtgcgcgttcttgtggacagtctgaaccgtctttctcatctgcacggcgtcctgcgccgggatgatgctcgccatcgcgtccagcaaatccgacacgtccttcgtcgtcagcaccgcctggttctccgcgacctgcaccgaggcgctcgccatgagctcgaacagtttctgcacaaactccgtaaagttcatgaacaccgacgacaggtggaggtacttgtactcgtaatatttttgcatgacgatggccttgttggtccggttaagaaccgactccgcgctggcgcgcatggacgcgtcggatatctggctcaggagcgcgctcgtgtcgtcgccggacaaccgcgtgaacgcctggatgttcttgtacaggctgtcctccgaggacacgtccgcgttgttctcggatatgtacttctcgaagttgccaaaccactcgcgttccgcgtcgcttatatccttcatggaggatgcaaacccgatctggttcgtcatcatcgtgtccaacagggtactgtagttcttggcgatgtccgaaaccgtgccattcacgacctggctctgttgcgcacccattttctccgtcactaacaaaaaaaagcagactgtaaaaccaaatggtcgaagtcaccctgttagtcacaagcgtcatatccgctatcctcgccggcattggcgcggcggacctaaagaaatccgggatcgacttcgatcccctcgtcgcctccctcacgtccgccgtcgcgtccgaccccgaccaggtcatcgccagggaggccaaggaacgcaacaaggagaccaggacccttcgcgacgcggtcgtcgactccagggggcgtgcgttcgtcaaggagacgctcgacgaaaacaaacggttcgcggacgacgcggacgacgcggagcgccgcgacaagggtttcgacgagctgatggagagagcgatgcgacaaaacggacagaccggatgggacgaggacgaggacgaggacgaggagcaggatccgcaggatccgcaggaagcgaaggaaactcgacggatccgacaggagaagcgaaaagcccgccttgagctaaacgccggatccgaaaaacgaaaggaccgcatcccggacgaccagatggtcttcccggaccccatggtcatcgactacaacgagctcgccgccagcgtgccgctcatcatcgacaccgacgaaatgggggcgagcctggaccgcgcaggaaaacttaccatccaaaacaagaccgacgaaggcttcaaagcgtacatattcaacaaccgcgtcagcaacaataacgtttaccatctcctggacgccatggtcaaggtggaccgggccgacgcgctcgccaacgccatcacgctcttccaacaggacctatacgacggactgtcgcgacagaaacaaggaggcggttcaaaaaaaccgagaagcgtgttaaaaaccggtgaattatacgaagagcagcgacagggacagggacagagacagacgttgacgcagttaatgacaatggttcagcaacatgaacccccggacacccccaactataacaactacatccagtaccaaacagaaaacaacttgaatacagacgaagactccttcgacattaccaacacgtccggggacgtgttacgcgccgtcacaaacccgtacgctccgatgtggcctccggcggatttggagctgggtccgtccaccaagaacgttttcgaatacgctctaaacgccgaagccggttctggtaaagagacgttcctatacaccgtctccggccccaacttcgaaacgcaaacgctggagcgcgctccggccgaggccgaggccgaggccggtatacccgaggccgaggccgaggccggtatacccgaggtaaccaagcggtatatcgagcgcgttttagcgggcgacccgcccgataccatctactgcttttggtttacggcggataaggcgggtaacgaatcccaagaggggggaaaaggttttttccccaaaatgttcttgcgcaaaaccgccacggacccagaccaagcccaagaacccgacggtgacgcaccgaaggagggtgtagtaaaaaggcttggaaaacaaataaagggcaggatcacaaagtctgcgaacgcgaacgcgaacgcgaacgcggacccaggccaagtcgacggttcctcaaagaggctaacaaataagatcaccaatacagtccagggtttgaaggacaaggtttcgctccgcttggaaaaaaacaaatacgataaggtcatacgcagtgcgttggatcacatacaaaaacccgataacgtcaaatgggatgaaacaactggcatacaatcatccccgttttacgcggagaaggtcatacaacaggttgaaaccgataaaccaaaatcgaccgaagagttcgtcggtattattaaaggcctaggcggctctagcgacaaaaaactcatggatgtaacggaaactgtcttaagcctcgtgaatgaaattccggaacagacacccgaaaagatactggatttggtcacggaatattttggcccattgacaccaaacgaacaggtcatacaggatgtatttaaaaattcgggaggagacacaaacctacaagagttcgcagattacgcgacaagtgtgataaaggaatttgcagaggaacgaccaaatacgactggcggggtcatatattatatgtttaccaaagtaggcatcccgggcgacgaaaatgtaaagaagttttcggaatatgtcgtacaacgcgtgaatgagattccggacaagacgtccgaaacaatccggagtttggtcgagaattacttcgccccgtttacagtacacgccggcaaaactttcgatctgtacacgttcgggtccgcaaaaaataacaacctaaaaacgtaccgcgagacgtggacggctcttatacgtgcaatggatgccgacgcaaaagggctgtcgacggcggtcagcgcgcgggacttgtacccctattactacaggcaccagccgatccacccgatgtttttcctgccgcgacgcaagaacgacgggaccgaactcgcggaaacggggtctctcccggataaccttcaaagggaatggtacctgttcgcccccaacgcgatcgatccgttcatggaggtttcggacaccgccttcaacgctgtattcaaggacaggaaggcgttcctgctccgaaaacaaaaggagcgatcggagcgcgacacggtacccccgacccgggagataggaacaggaacgcaatcgctcgcacccaaaccgacgaaagaccaattggatgggaccaaccccgaccgagcaaatatggtccagagactaggccaagcaagtcgaaaaaacccattgacaacaaatgcaggtataacagtcaacacgctttcggacattcaaaaaaatcaactagaacggaaggggggcgcggcggaagaaaccccatttcaaatccccgtccccgatggggacccggtgttcctgataagcccgcccgtgaggccggcgacctcgatcgcggatatccagtcgcggtaccccaacatccggttcgacgtcgttccgttcacgggcgagatggtgtacctcgcgacatacgacgaggggctgcattcgcgcctcgccttccgggatctggacaacgatgtccacagggattcgcagagactcggcgagctcaccgcggcgaccgcgtgggcggcgatatccggtacggaggagtttcggcaggccgtggcgcgggtcccggagatcctcgacaaccatttccaggcggtcccgcccgggaagtctctgtcggcgattatcccgcccgggtacagcgggggtatcgtggtcaccgacgaggacgcggggaacctggagtacgtcgtcgcgggcgaaaacaggttctacgaagccacgcggaatcaaatggaagaaacggaagagacggggttcaaggtgggtctcgtcgaaaggccgaaaagacatacaataccgacagacaatacagacaatacaggagacgaaggaaaaccgcagaaacaggaagaggaggaggaggaggaagtaccgatcgaccaaataacgggacccgatgcaactgaaaccaacgtgtctgttgtaacaaacattgtaaagaacgcgttcgcggagaatgagaagactaaaaacatgaagctgaaaatagtggaaaacttgacaaacgccccccaagcggaatattttagaggtttagacctaccggccgaaacacttgcgaacttagaaaaagcccttaaccttttaagggaactcgtgaacgatccgaccagtcgagacttacttgaccagttagaatcttccatcaactttcgtgcatttatacctgacagtgacgatcctaccacctccaaaccactcacggaacccgagcaagcaacaatcagtaccgatatgaacacattcatagacgatcttgaaacctcgaagcctaccatcatatcaattgcgacaaaaaccattgtaatcgtctacaaaccggaagacagcggtgcaaccgctaagccaataacggaccaggaagatatactgtctaaactgaaacaacacgcaattgggaaatatatgaaagtcgaaaatccagacaaggtagacgacacacccgttttacaagtttatacggaaatttcagagctcgtcaaagcgatagaatcagaaatgaaaaacggagaacaggtttctccggtcgccttcaaaaaagggtcgataacgtttccagtaaaatcagatctgtttgatacttacaacgccattaacgaaaagttggagcaacaacaaatagtcctcgtattactgggcgacaatatcgaagaggcgttcacgaccgagttcgaatcgcatggcaaggagtttgaatacaaggagggagtaaaaacttttcaagaaacaataaatggcgagcttcaacccggaatagattacgcagataaacttttaaccaaagcggcgatattcgactttattgaattagagatgttgaagaataaaactgacgagtttattgacacatctgtaaaactcaggttggatgatagtatatcgacagatggtccttatatcgaaacgacaccagacgttatctcgtttgataatatactattcttcacgattcgacgtccgagcggtcggtacgccggaggagccgcgaacgcgtcccggaaggttgtcgcgccgacaccaacgcccgcgccgacaccaacgcccgcgccgaggccgaggccgaaaaccgtctcgctgcggtccagcgaatccgcggtgctgttcgccgtacagatcgcgcggtgcgcgtactatctaaacgcgtactgttcgttccacggacccccgcgtccgcgcgacggggattcggggcggatgggcacgggcgtgggcatgggcacgggcgtgggcatgggcatgggcatgctgccgcgggacctcgcgcggatggccgcgtgggacttcgtgggatccgtcgccgccgtctgggtcgtgtgggcggcggggctcctcgccgaggacgcggtaagtcgcgcgctcgtaagcgtcgtctcctcgtgggccgccgtaacgggtttctggatctcggccgtcgtgctcaaggcggatccgagctaccgcgtggcggcttccgccaccgtcgtcctcctcgtactcccgctattcttcagccagtagcgacccaacgaccagaacccgccccaacgccaacgccaacgccaacgccaacgcccgcaacgatcggatgaattatttcgatcgatcaagcaaacacaaatgctccctcccccgcaggtatgttcgtcgagggacgccggcgggtacgcgggggcccaggtctcgaacgtcccgatactgcgacaggaaggcgggctcctgtcgcaggtgttcttctcaaggaaaaacatcgacgtcgttcagaacagtctcaggtacagggtctaccgggaatccggcggccagttcgtcgtcgggcgccaaagcgatatcgagcttctgtcgatcatgcgcgacatctacgagagctcgcagcgccacgttcccgacgcgcaggtcgtctacgccgtgcagagactcaacgagcacgtccttcagaaagcggtccccgcggtactctcggcggttcggttccacgactactaccttcgcgacataaaccagccgaaccccgtgccggaggaccgtcccgtcctcatgtccagcaaagggtcgaaggtgctccagccattcagtcggctcgggtgaatcccgggcggaggttacctttgaacttttgtggcccttcaaataaaaacaaatggcgtcgccgctgaacgatttaactcttaacatcctctcctcgatcatcgtttccgtgatcatcgcaacgcacgccaggcgggacctcattttcctctctttcatcgtctacgcgatgtactttaccatcagcttcttcgtccccggcggcggccagctgaacgccgcgatcgcgatcagcgccgtgctgtacgccgtgttcgcgtggaccaccgccgacatggtcaagaccaccccctcctcgttcgtatcgcagtacgagaaagttcccattttcgagggatcggtcgtcatgaatgcccacacccataaagtcttcgacacgtacgacccccagaaccccaattaccggcgtctcagcgtttcgcagaaccggatgggaggcgcgcagttctcgtacagtttctgggttaacttcggaggcgcgatcgatagcagcatcgccggcaaaaccatcttcatgcgcggcgacaagaggaagtacagtccgtacatcaaggcaaagggcgcctcgtcgttccagaagtatttccagaacgttgaaggcagcgacgtaacgatcgcgtgcccccgagtgtatttcaaatcggaaaacaccctgggcatccaggtgaacaccgaccgcgaactgcttttcgaagcagaggtggggagcgcgtactccaaccaccacgcgcggaagaacatgctaagcctgataccccgacactgggctctaatcaccgtcatagtcgaggacaacgtccccatcaacgacttcgagaacggtatcgccatcaaaacctacgtcaacgataccctttacggaacctccgtttcccagggctcgttgcgaatgaacaacggcgccctgcacattctgggcggcgaccagtggcccgccgactccaggatgtccgacctcatctactacaactacgccctatcggattccgaggttcgcaggatcttcaacgccgggcccgacacatcggtgtccgattccatgaacgccctcggagggcgcaagagaaacgataagcttcaggtcggggactacaacaagatggacatccacaactacaacgcccacctacagaccttgagtttctaatccacgccggcctaaaccacgcggttgcgagcgttacaccggttcaccatatccgtgaaagggaaactcgcgtcggggtttagaaccgtctcgcaccgggagtccgcggactcctggttatagttcgcaaggtccaaagtccccgtcccgggccgcatcttcatctcggtcccgtccggaagcgtatacaccggggaacacacgtagttatcgctacacgagttccaggacctcgtccagtagtcgggacactccttcgccgacacgtcggatatcgccttgtgggcgtcctcgatgtcgttgtcgttctgcaccacgcgcagggtcgcgagtcccagaaccacgaaaattcccagcgcggaactcaccaggaaaatgcggatgttctggttgcccgtcagaacgacgaaagttatctccgcgacggcgatggcggccaaaagcactcccaacagtatcgacactacgctggagttctccttaagacccatttgtttttagcgtgtgtaaaaaatcttgcgtgaccgcctacgtgtgcacaaaaatcttggagacgaggtccgcccgggtcctgcccccgccttcgcaccgagtatcgacgaaaacccagttgtgggaaatcccgtgaagattgcccgccatcgtcgacaccaacatgtcaacgtcgtcgcacagttccgggtactcgatccaaatcggtttcaacggactcaagcacgggtacggcccgccttcaacggtaaacagcgccgtgcgactcgccgaaacgtcggcggcggcggcggcgtcatagtacacaggcgtcagtgtcagtttgcgcactgtgcacacggaggggacaacgtgcgtcgagaagtaatcccgccagatcttgtgcatcacatcgtctggaagcgatgacatgtttctctatatactctccaccttcttctttgcgtacagaaacgccgtctcccacggaaccagcgagtttctcgtcgcaatatcacgggtcttcctctgggcacacgactttgacgagaccaaactgtaacatctcgggaacttggccttggcgcggcgggccgcatacaagaacccggagtaacacgatatctccgccaaatcgtagttgcccagaccgaggatgtcgacgcagtgcttcagagacgccgcgtgcggggacatctcctgaagaatcaaggacagcatcacgggctccgaagacgtcatggcccggacctcctcgtacgacctcgccatcttcagggtcgcctccgcgacctcgtagatattcatgtccatcttgcgtcgatcctcgatgtagtccgacacgcctatctgctccaccgcggtaacggctcgaggcacgcttccgttgacgcccgccacgatccccgacagtttctccatcggcacgtccgggtacaacatgtgcaaatgttgtacacatttgggtcgcgcgggatagttcatcttcagaatcgaacacttcttgcggaacgtcgggtacttggaaaggttcttcgcggacgaggtcgcaagtatcgaaacgtccaaccccgataccgatgctaacaccaccgtccccaactgaagggtatcgtccagccatataaccttcctgctcttcttatcggaaccgggaggaggctcc

SEQ ID NO: 124 - DNA, 22400 bp, Tetraselmis sp.
  source 1..22400: mol_type = other DNA
cgccgcggcgatgaccgatccgacctacaactccgtcgtcgtcaactcggcgcacctgggcggcccgctctcgatcttcgaggcggcgtcccgcgtccgcgggtccgaacgcaaggtcgcgtgcgccgtggtctacctcttcgagacgccgctcgcggtgacgcacgaagggttcaaccgcttccggaactccgaccgcgcgttcaaccggttcaccttctcggggctcgcgcccgggaccgtctacagggtccacatcctggtcacccaggcgaccagcgcggacttcccgaacgtcgcggacgcggtgcgccggctggccatttcgctccgggggggcgacgcggcggcggcggcggcggccaggatacgggcggcgcacgtgtcggcgatggcgcgggcgtgggaaaccgcgatctccgtcgagccgcgcgtcgaggccaccgcgggcgaccagatcgaacagatcgagctgcagcgcgccatccggttcgcgcagtacacgctcatgggctccgtgcgcgacgggtcgctcacggacctcaaccccggcgtcgcgtcgaccgtcgacaaggacgggacgctcctgtgggggtcggagatgtacgtcatcccgtacctcctgtacaaccagagcaggaccgtgcgcaagctcctggaaacctccttccggaacctcgagaaggccaaggcgctcgcggacgggtcggggctcgccggcgcgctttacccgcacgtgaacccaaacctggactacgccgcccagcccttctgggacgtcacggacgcgcagtacgtgttcaagacggcgctcgtggggatcgcggcgtgggactacttccgggtcacgctcgaccgcgcgtggctcatccagaaggggtacgcgatcctcgcgggggtcgcggacatggtcgtctccaaggcgacgaccgtcggcgcgtcgggctcgggctcgggctcggggtcggcgccggggaccgtcgcgatgcgctccgtcctggacgccaacggccgcgcggtcgacaacgacgcgctcacgctgtacaccagccgcgtcgcgctcaaggccgcgatcgaggcgtcgtacgagctcgggtacctggtgcccgaggcctggaaaaccgttttcttcggaatcgccgcgccgcacttcgcgggcgcgaacttcgaaatcataaagccgaacgacgccgcggtcatcaccgattccgtggacattctgcacccgctggtgatgctgcaggaacacttctctgccgactacctcaaaaccctttcgctcgccaccaacaacgaacgcacgctcaacgccaacgcgctgttttacgggagtgcggcggggcccgggtacacgctcaacccgcagaacctcctgctcctggcgggcgtccacggcgtcctcgcccggtcgacccccgcgcacgccgacgcgttccagacgtaccttcgcagcttcctcgcggaggcgcagaacgatatttggggcgggttctcggacaagttctcctcctcgccgctcgcgaacagtcccgctctgtgcgcgcagttcctcactaatatcatgaccaacctctgcgggttgcacgtcgcgggcgggacgacagagtccgggttccggtacgaacactacggcgtcgtcgggcggttctccaccaacctgccgaacgccacgaacaaaatcaccgtcccgagtatcgggcgggggaaccagaccttttctatcacgaacgaaaggctgtacgttgtcaacacgccgtaggtaaatgctcgctggtcgaagcgaagcgaagcgaagcatggcaaagccatgcagatgcagattttactccgtcttgtgaacggccagggtagtgtagaaacacttaagagcgttgtaaaggttgtgaatcttcaagacaggcatcttcctaccgtttttgttgagcacatactcaccgttctcccttctggcggcgaaatccaggacggtcaagtccgtgtccaagacctgtttgataatgtcctttgtacccttgttcaaatgccaaatgaattgctttgtcatgtcttcctgacgtatggatttgttgttgttgacgctacctctctgagcctcgtacttctccagaaggacgtggatattatccaagtcccttgtcgtaacctcaagtagggtaccgttgatacggacgttttccttgaaattgaaagggtgcgcatattcgtgggtaccgggattgggagaccacttccccaacactgtctcgaaaacatacttgggtgcaacgggggcctcagccataggcttagtaaccttcttacccgaaacggcggtgaacttaacacgcggcgaggcggccgcggcggcggcggcggcggcggaggatgtcgcgttaccggtaccggtaccttgcagcttctgcaggagtttctcttgctctgcagctgccgaggtcaacgccaagagtcgagcacgacatgctgtaatctcagcctccttttcctgactcacgtgaacaacgagctctgcgtgatgagcttccttttcggctttcagcttcgagagggcatcctgctgcttcgagagagccttcttctgctccgaaagggaatcaatctgctgtgacagttccgcgatctcggacgctgtgttgaccacggctttctcaagattgtcaatgcgactaccttcctcagcgggaacgtcgatggattcctcttcggccaaatcggcccaggttgtcttggcctgaacggtgacctcggcggtgacctcggtcggcttaacggggacctcaacgggaaccttgtccttaaccttgttcgtattgagcggtgggaaggccgcggtgtccgtaaagttaacacgggcgggagtctggtcaacgggaacggacttgtcggtctctggtgatgatacaacactgagccattgcgggggcacgggcgccatggtgtgcgatgcgatgtgatgcgatgcgatacgatgcgatacgatgcgatacgatgcggtagttgttagtacgcgtgttcgtcgtctagtgagcgttagtgttcttaaatttaccaatttcagttttttcgtccggaccctttcgtcctgagccagtaccagtttcccgaaaacccaaaacagaaaaactgaaatagggaaaacgtgcaacggcacaacgcaaaaaccggcggtacgacagtactacatcgtgacaacgcgacaacgagacagcgaaacagcgcgacagcgagacagcgcgacactgtgacacttcgactatcgcaacgtgggtttattgaacatgaacagaacaccgcctttggagcgtgtgctcgaggtactgaaacaactcgatgaattttcgaccaacgatatgatagagttgctgcctgagatcttcaatgacgaatgcctcccgtttctaaaggacctcctctcagacggatatggagatctggacagcggtgtaatctctggtctcgttaaattgaagtatgaccttccgtacgtcgccgcgtgtatcggcgatctggacctcgtgaagtggtgtcataccaaagacatcgggtctactgacgacgtgttcgaaggggccgcggtgtacggtaagacagagatcatggactggtgcatgacacttgagaatttcaagattgataaggtcaaggcaaccaacctcgcgtacatattaaaaaaagtcgacggtgacaaaacctctatctgctggcttcgcaaactgtggaagtaaacttgaaccctcttatctacgcacgtacgcgtaaaaatgcgtacgcgtaaaaaaccagaaccaccgtaccgacatcatgggagtaccgtcacctggctgctgtggcgacatgttgatacccgcggttctcatttttgccactatgtcggcttgggttacaaaagcgtttccttcaacgagatctcggattgctgcatccgcgtttcgcaaacgccgctttctgttcgattttactactgcagattttgggcagcaaccattccccgaagaatctacaaaacgcttgacccacctgaacacggacgctgcggaggtgttgtacaccttcgcaaccttgcggtacgacctgtgaaagtacaaataatgtatagaagccctgctttggatactttgtggatacatctcctgtttcaaaacattttgaatagaactaaaaaggtccgtccatggacaagagcctgggacgaatatattcgggtaccatcccttcaattccatgcgagcctgacaggcccgagcttagctgggcggtgatttgtacccctgaattgtgatgggtgagctctgctcaaagcctgatgacgatatccgtcgtacagcgggttgttcacgtatatcacggtcgccaccttgttgtttgcgtcgtagaacttgcgggtcttggcgggcaccggccctgtgccgggctcaggtaccaccttgttcttcttcttcgtgaaaaagtcgcaaatccccatgattgcaatgctgtgtggcggtggcgttgtgtgggggcgttggtgtgttgtgaagtttgaatgtattgggttttttcaatttcgcttttccaaggtaattttataaaatcactttcgactttcactttcgactttgctgttgaaaccattccccgaaatctgtcaaaaaaccaactttagaaatcggcgtccaggtcgacgtctcccacggtcttggactgcattcccactccgctcctggcgtattccgcgatcttagcctcgaagaagtttgtcttgttagggatggatataagctccatgaacccgaaggggcacttcgcggcgccgtagagagcggggaacccgagtcgaagaatgagacggtccgcaacgtacttgacgtactcgctcatcatgtcgcagttcatgcccagcagggagaccggaatggcgtcggtgatgaaattgagctcgatatccaccgcctccttgaagattttgtgggccgtttcgacggggactttgtcctccaggagggagtacaactcgaccgcgaagtccacgtggagaccctcgtcgcggctgatgagttcgttcgagaagcagaggccgggcatcttgccctgggacttaagccaaaatatcgcgcagaagcttcccgagaagtggatcccctccacgcacgcgaacgccaggagcctggtggcaaagtccttgtcctccttcatccacttaatcgagaactgagccttatctcgcacggcgggcatggtgtcgatggcgtgaaagagacggtgtttctcgtcggggtccgagatgtaggtgtcgatgagaacgctgtacatctcagcgtggatcgcttcgatgaggatctgtgacgcatagaaggatcgcgcttcggtcgcctggacgtcgttgtagaagcgcatgcacaggttctcgtttacgaggttatcggaacccgcgaagaaggcgagcacgacctttatgaagtgcttctcgttgtcgttaaggttattccagtgttccgggtcaccggcgaggtcaacctcctccacgaaccatgacaaggcagaggacttcttgtacagatcccatagagaagggtactgtattggaaaggtagagcgtcttgtgtcgaccagggggttcgacttcatgctgtgctgtttcttgcgaaaaaaaatgtatcccaccggatgcttacgtccttgtgtcgtcgttacatgttgtgtcattgtgttgcgaagtcaggacccacatgagatacacccgtcgaccccgcgtatgcacgatacacccgcgatcggttctgcgtccttctcggtgttattgtcctgcttggtcatgatcgtgaacttgtccgcgctggcggggggcttgatgcggaggtagtacgacccggtcttcaggtgtttgctccacgagtagaagagcatgttggatatcctcgatatctccgggacgttaacgaagaggttcatcgactgcgactggcacacgaacgcccccctgtcggcggccatgtcgatgatcgtcctttgactgaggtcccatacggtcttgtacagatcctttattgaccggggtatctccgcgatcttctggatggatccgtcttccgcgattatgcgattcttcatttcgtcgttccaaatgcccatagatatcaggtcgtcaacgaggtacttgttgacggtgatgaagtttcccgcgatggtcttgcgctgggcgatgttgctcgtctgaggctcgaagcactcggtgtatcccatgatctgcgaggttgacgcggtaggcatgagcgcgacgctctgggagttcctcagaccgtgcgccacgatgcgtttcttgagggcgtcccagtcgtacatgtctggcttgaccccccacatgtcgaactgaaggattcctttagacgcgggggacccctcgaaactgctgtaagccccggggtaggcggacgaggggtccggatcgaagcggttcagaatgttgtattgcccggaggttatcgcgttctgtctggtctccgccatgtcgcacgactgttcgagggccgcgtggtatatcgtctcgaagatcttcttgttaaggtccgaagcctctgggctttcgaacggcatcctgagaaccatgaaaacgtccgacaggccctgtaccccgatgcctacggggcggtggcgcatgttggaccgctcggcctccgggatcgggtaaaagttgcggtcgatgatcctgtccaggttgaacgcaatgtccttcacggtggagtggagatattcgaaatcgtaccgaccgtcccttatgaaggcggggaggcaaatactggcgagattgcacaccgcggtctcgtccgggctggagaactcgacgatctccacgcacaggttggacgacttgatggttcccaggttcttctggttgcttttctcgttgcactggtccttgaaacatatgtacggggtccccgtctcgatctgcgctctgatgacggcctcccatagcttcctcgcgcgcacctgcttcttggccttcccggagctctcgtacttgttatagagcgccacgaactcctgcccgtatacctcggcaaggcccttgcattcgtcaggacagaagaggctccagggcccgtcggatttcacgcgctccatgaagaggtccgggatccacagcccgtagaacaggtcccgcgcgcggtgctcctctgctcccgagttcttccgaaggtccaaccactcgaagacgtcggcgtgccatggctcgagaaatatggcgaatgacccgaatcgctttcctgactggttgacgtggcgggcggtgtcgttgaagaccttgagcatggggacgatgccggtggagtacccgttggtcccgcgaatcagcgacccgttggccctgatgtcgtggacgctcagaccgatgccgccggcgaacttgctgatcttcgcggtctgtttgacagtgtcgtagatcccgtcaatgctatcgccctgcatcgtcgcgaggaagcatgagctcatctggggagtgggggtcccggcgttgaacagcgtcggcgtcgcgtgggtgaacaggcggttggatatcatgtgatacgtcctgaaggcccgctcgatgtcgtgaccgtggattcccagggccacgcgcatgatcatgtgctgaggcctctccacaatgaccttgtcgacgcgcgtgaggtacgcccgttcgagcgtcttaaaaccgaagtagtcaaaaaggaagtcgcgttcgtagtctatgttccactctatggagtcgccgtgtttctttattacactgttcagctcgtcgctaataagggggtagtgtttgccgtgaacgtcaacgttgtcgtaaaggcgtttcatggagtccccgaacgttgacggagtattcttctggcagttactgatgatgatgcggctggcgagctttccgaagtcgggatgcgtggtgacaagctgcgcacagagctccgcggcgaactcgtccagcttggacgtggtgaccccgctgtagagctggcttacaaccttctgcgcgaccgcgacgtggtccacgttgtctaggtcccttgagagtactcccacacggcgcaggatcttgtcgaaggacacgttttccttgcgaccgtcgcgcttgactacgaatgacatgttcctccagaagattttttcatagctcccacagtcgcgcgttcatttcgatactcgaaactggactccgctgcgtcccgaaacggagtataacgcacgccgtcggcgttctcggcgtcctcgacgttctcgggattgtcggcgtccgcggattccgaggcgctctcgcgaaagtcggcgttgtcgtccctcggcttccgggattcggatatttttttgctcggagactctacggtaccccggtacgtcgagtaggtattcgaaacacaaaggcttaacgcggcggcggggaggggggcggagttttcatctaccccaaaatgaagaccgtcggagcaattatcttgttcgttatctgttcgaatgttgcagggatggcgtcagcgtccgcgggcgaatgtgaagacacccgcttctggtgcaggtacacgtccgctctgtgcgggtacacatccgcgtatatgaaaacagcgtgtccgcgcacgtgcggcgcgtgcgtcctcccggacccggacgtggcggggtacgctccgacgccgacgacgaccctcccctcggagacgccttcggttgtgacgacgatgacgacgatgacgacgatgacgacgatgacgacgaccgttccggctcgggacccttcggacccttcggacccttcggacgcgacggccctcccctcggagactccgcccgacggtacaacgccaacgacaacgcccgaagcaactaccggtacgccggcgccagtgactccgcgaagccccgaaacggatgccgaatgctgggaccacgccgagggcgcgccctccgactgcgaagactcctcgtcggcgtcctcggcgtcgtcgggaatgtcgtcctcgcgaaaatgaaaccgaaacggtggaaggcgtgtctccgatgccgcgtgtctccgatgccccgggcgcgcggatgtaaactgttttccattttttttctgggacacttataattgttctcgtcaatgcacggaagcaccctccgacatcgtgcagccattcactaccttcatttcgacaggtcgctaaggagggttgcaaaggtatatggggtcgggaagtcgtctgtagcgcgctgggcgcgtgctctggaggttccagagacgaagggtaggaaggttaggcaaagcgccgtcgcgagactaaaaccgaaaatagcggagcatctgcaacagaatcctttcctcacagtaggggcgcttctcaagaaggtccgcgaacagggtgagaaggtcgggatgaccacggttcatcgagctatccgtgccgcgaacttcagcagaaaaaggacacgacctcggttcgccccaaaggtccccaccgcggaagaagggcgtactttcctgacctgtctgaacaatgcgtctgaagtcatcgccgtggacgagacgaacatctacgtggacgactcaccgaggtacggatacacgctgaagggaacacgttgcgtgcaccgccggaagtgtcctatccgtacaggacgcgtgactctgcttttggctgtctcaccaacgcgcggcgtcgttcatcacgaagtggtcaaaggctcggtcacatcggatcgctttgcaggattcgtacggaacctctccgcgccaggcagcacagcgatcctcgacaatgcggtattccacaaaacggctgctgtgcgagaggccgctgaaggcgccggtatctcacttttgttcacacctccgtacagcccagagttcaaccccattgagggatgtttcagtgtcatgaaacaggcgctccgcacgcccggtgggtgcttaaacggggcgttagcgacgctcacggcgtcgaaaatctccgccttcttccgacattctcaagcgcacgttgaaggagttgccggaaactagcaaaaagcttaacgagagcacacaacagaagtaaataaactccgcttccggatctcacaacaagagcttaaggctacgccactggaaggcacgcaacacaagaaacgccgctgtcctgacaagagcttaagaagacgatcagcacaaaaaaacccgatggagggagacggaaggagccctgacgacgaggaggacgaagatgcgggggccgagctacgcgtcgtcaagcgatgtttaaggaaagcgctaaacatgtccacggacgagaaggatctgttcgtctcaagggtggaggagctggtcgtcgcggtgtccaggttgatgcaccacgggtcgcttctggcaaccaactacgtcctccaccggatgaacgacgggaaccctccttccgacgaccttctgacagaccagacgttctacaggcagtgtatgacgtactcttcttcttcggtacgttctggcgcgtaccctgaagtgaagtcgttcgccgacacgaagaggcacctcatcccccacacagagcaggtcccgtactccggaaactgtgtcaacgcagccgcgaggaagctgaaatcttccgttctcacgatcctgtcgcaccgcttccaccagcgcgtcacctccgcggtccgcgcaatgtttcccgatataccggaccgtgccaggatcgccataaaacagaggtgcctcggcagacccggagggcctcccatcgcactgactcgagaggcgtgggccttcgttgacgcggttagaggagacatcttccacggagccgacgtttattcgaccgcggtagaggaggccgtttggaattgtcgaggaatcaagaaggcggacagagaggccgtgtgcaccgaactcctagcggggcgaatgcccgagatggacagtcttaagggctcgggccgtgaggtggttacccatgttctggagttcctccccgcttgcagagcacacagaggagcggtccccgacgaagaagttaggcgcctcgtggccgcggccgccggacgcgttttgcggagggcgaccgatgagcagaagcaacaggtagtggaggatgtcatccacacaacctcttcagcagacaggcgtttcgggaggttgataagcgcggcgcgcagcatgctacgcttcgctggagtcatcagcatcggatggttgaagacacacccggcgcgggcgttgatcgccgtccgtcggatgatgctggaggtggaggatggcatccgtctcgccgagaagctcggaaagaaacgccgtcccaagcgcttccctctcctaccgatctttgggcagaggaggcagatggtgacgttggatgccgacaccctggtgggtctgtgcaaggccgtgggtatactgccgagcggagcagggcggaaagccctgactgaagacttcaagcgatccctgcttagggttccagccggtttcgttttcagcgacaaaacgtccttggagagcgacggcgtcgccatcgtgttgaggacctcaaagaccaaccctctcgcctccgcagaaatggcgaccaaggatgacctagaagacatcgtctttgacagagtgttggcgaacgatccggggcgggcagacatcgccaccgtcgtcgagtggacggacgaggaagggctgaagaggggatcgacgcgtctgacgcgcaaggagtactaccagcaggcaggcataaaccgccgtgcaaggaagcgccgcatgagggacagagcaatatccgaacacctgaacaaatggaaggaggccagcatcaagacagccgacccagaagcttttgaggaggctctgagggtcagaatgagtccgctccctggctccgagggcgacccctcaatcgaggttgtgtggggccaccaactggcccggtggacgtccataatggacatgaccgcgttcgccgcgaaacgcagaacactggatcgtttttggaggcacaaggttggtctcgaggcgcgacatgatctgagccgcaccgtcgtggtgtttggagacgggaagttttctgcgtcgggaagaggagaacgagccgtgcctcggaaggcgatggaagcctctgcggcacgatttgcggcgaaggccgttaaggtcggcgaagcctacacgacgaaagtgtgttcgcgttgccatatgcccacattttctgtcagaatgctgaggtcgaagaagactaccgaagggggacgaatcgagcggatggtcgatgtccgggagctgcggcgttgttcatccaacgcatgtcgcgcatctccttacaagtcgagggacaaagacgccgccatcagcatccttcagattttcctcgcgggaatagagcgcccgccgtgctacaccaagcaaggatacgaagctgcgcttagagccatgcgacagggaccgcaacctcatcccttggtctgataggaaaaacctaacccccacggctgtgtcgtgcgcgtcgatggcggcacagtcgcgctgcaagggaaacccccagggtaaccttgctagcaggtccccgcgaggggaccataaaataccttgcgttttgagggacggacttagcggacctatggtgtcccacaatttctggattgtagtttaaactgatttgtttttctgtgacagatcgttatgaagccgacatttcgacaatatataaattttatggccccaaagtaaaatgcgtgtttgggttttatccctcctggcccaggccgtcgttctgctcgtatttttcattttatacagtgtattctactacgcaggcgtcgctaaattcaacaaggacaagatggacctcatggacctcatgcattattcggtgatttgccagtctagcatcggatttggggatttgttcccgacctcgaatattgcgagggttatctcatggttacatgcgatcatgaccattgtcgtgatcgcgtacacgactcttggtgagtaacggaacggctgcacccgcgggcattttgagtatgcacaccggcttccttcccggaaccgcgagcagatgcgccacgcgacggctacattttgtaaatttatacgaggatgaacggggaaccgttgctgagtcagcaattttcgccggcgagatacggatttaaagtatttttttattccaaggataagtgggcaatgaaaaaacagggcggccggtgcgcgtacaaaaggcggcgtcgccctcgagtggctttcgactttcacttctgatttttcgcatccgcccatccacccacccacctctccctccctccctccccccccctgggtctctcgctcaatccacaagctccgacatgggcacgggcacgggaacggccatgtgcacgagcacggccatggccatggccatgaccaacgcgcccgtttcgcagaactcgtcccgcgacgtcgtggtcccgcctccgaaccgcccttgcccgagacccgcgctccggctcggcgggaacgtgacctgcggtatgcgcgaggttctcctggactggttgtacgaggtgtgtgacgactgcatcgagcgcgactacccggcggagtgtttcgtcgggtcctcgccgagccgcgcgtccaagagtcacgttcacatcatgcagagcgcggcgtggtacctggaccagtacctcctcgcccacgaggtggataagaccgagttccagcttgtcggaataaccgccctgtggatgtccttcaaggtgcacaaagggggggcggtggcggtgacggcctccaagatcgcctcgtattgcggcggagcctacacggggcgccaggtcgcgcgcgcggaggtcgagatctgcagatcggtcggatggttcctgtcgagggaggttctcgtccagaccgttttcaaggtcgtcgaggggtgtacgcccgttccgagggtgatgacggacatctttctgtccaatacggtgtaccccgtggtcgagctgttcaacgacgtcgtcacctacgactacgccttcggggcagtggcccttgaggacctcgcgtggaccatcgtgctcctatcctgcgacgtgatctacaggtaccgcgagccgctccgcgagacatcggtcggcaatatggtgtcgctggtgaatctcgtcgcgcccgccaatgacaatgagattttcggcagtgccggtgccggggccgccggggccggagtcggagtcggagtcgccggggccggagtcggagtcggagtcgccggggccggagtcggagccggcgggaccggggagtttacgctcgccaacatcccgatcctgtttccgagagccaaggtcgaggtcttcaatagactgggcgccgccatcgtccaggaggcgttccgctcgcgcgcgcggtaccacaacttcgaggatcgtcatagggaagcgctcattattgtggagtatatgaacaaatgaaaaccgattttgcgagtgtaatcgaatccatcgaccagaacaatcccggcatcgggaaatacggcgcgacgctcaagagcagcatccgcaagctgcgcgacaagtgcgatcccacgcgctcggataattttgttctccttctaaacaactacgagtccacgtacgagtgcctccgcggcgtcacccggaacgataagacccttaagtcgaacataagtcacctcgtggggatctttaggcggtacgttcccggcctcgcggcgctggtttcgggcgacgccgcgcggttctggaactcgcagataaccgcgctcgataaaaggatacgcacggacgacccggagaacgatacaggggaggacgcgtcgtggggcagtctcacgtggaagaaggtcgtcgccgccaagaaacagctcgatgtgggcacgttcgagaggctgggcatcgacgtgtacacctccgcgggcgtccccccgaggcggggcgagtgggcgcacgtcatcgcgtacaacgtccaccagccgaaggacaagccgcccgagcagaactggatgtacatccccgacaagggcagcaagaacgccttcgtcgagttcaactcgttcaagaccaagaaacacctccggtcgcagcgaatcgatattcccgcagagttggttcagtcggtccgcgagacgttccggagaaacaaaatgcggtacccgagcaatatcttcgccttggataacttcaacccgcaaacgcagtccaacaagttcaactcgctcctcatgcgatcgctaaacaaggcgctcgaccggaccgatatcaagcggcccgccaacatgttccgccacctgttcctcacggacgtgtttcacaaccggttgtcaaaaatgtcggacgaggagctcaagctcgtcctgcgccacatggcgacgtcgctcgagcaggccgtctacacctaccgcatcgccaagagcaaaaagcagaccggtgggtccgggtccgggcccgggtcgccggcgttggcgtcggcggctaccgcggccgtgctcaaacaccccctcgccatcaaaatggacattctgcaggggctgcttcacgacctggacccgcaaaatgtgtgaccgtagataaacacacaaatgctctttagcgacctccccatagtgagcatggcggacgccgtgaagaccatcgccgaggcgaaggggattgtgtttgtgagcgccaagggcgtcgacggcatcaagatgccgctgaagaaggcacgcgaaaccgtcacgcggtccatggggtccgaggcggccttcgtcccggtcaccgataactggaagtctcccaaagacgttctcgcgaaggacctcgcgctccagctgaaggccgacacggggtccaagttccctcttattctctcgatatccaaggaccggtacgagaagttcgccgagaaggagctcgacgacgggttcaagggcaacgccctggtggttctgcacgcggcgcccacggacgcgaagctcgaggagattcgcgggttccatctcaagagcaaagagattctaggcgaaagcaagcccccgaaggtgtttcccgaacacatcatgtcggtcatggatatcgccaagaagctccccaaaacgcccaaggtgttcctcgacgccggcggcgggttcatgatttacgaccaggccaagcactacctcgacgcggggatcgtcggcgcggtcctcgcgctcaacgtcacgctcgccaagtccgagaagatgaccatcccgtacgtctacaacaacgcggaggagatggggcccgtcgaggagaccaagggtgtcgtcaaggtcatcaagaagggtgacggcacgcccgcgcccgcgcccgcgcccgcgaactcggacgcgggtcccgattccgaatccggagccgaccccggtcccgacgcagacccaggtgcttccgtcgccgcggccgccgccgcgaaacccaaatcgaaatccggttcgaaacccgcctcgaagcccaaatcgaaatccgggtcgaaacccaaatcgaggtccgggtcgaaaaagtgaatgagatacactgtttttgtacaccaattcgccgacgcaaccgcgcaaccgcgcaacacaaagcacccgcgcaacgaagattaccgcgcaatccagagtacccgaagtacccgcagtacccgcagtacccgccgaacggattcggaacccgagttggagttgaaacgtcggaatggggaggtatgagatgtccgccgaaatggagctgttccttgagaacgtgggtaagtccgagcacaagctcatgaacaagcccgacaccttcgaagttctcgcgaggtcctttatgatgtgcgccggtgccgacatcggtaaggtggtggatacgtttctggtgaccatggaccgcgtttcggaatccgaaaacaagcaagtgactctctctatcatcaggcaggggttcgccgcgtaccaggcgctataccaaaagcaacacggtgagccctacggagttaagctgttcgggtccgtggtcacccacgacgacgacggcgacggtgaaggtcccggcaccggtacgatttctgtgggcagtcgccacttcaaggactccgttaagacgtgcaaggtggttcgccgcctcggcgaaggcggggtggccaccgtaaccctgtctgtgaatttcatattcgatctgtgtttcctgggtcacggaagcaccccccacaagtccgttatgtgccaggatatgaacaaggccactccgtgtgcgttcgggtacgacggcgccgggtccatcgtccgggtcgcggcttccaagcgccggttcaaaagagggcttccggggcttccggggattccgggacgtccaggcgacgcggatcgcgggtccgagaaaaaggcgcagaagtctcacggtacgaccccggtcgaccgcgttccgaagagcatctttacaccccccgccacacaggggaaggaggatggcgaggacgtaattgtcatttccgattcgacggactcgggcgaccccggcggcgagtccgcgggcgacgagacggatcccgatgatggcggcggtgtacgcgcgatcccggtcgggagcgcgtggaccgactgggttcccggtgacgaatcggacccgtacgaacccgacgttcacagcagcgacgagagcgatccccgttccgacgggaactccgacgcctcgggcgtctcggacgagtatctgcgtatgatccaggagtgtattcccgatgtatacgacgtgttgaaagccgaaggtatcgaaagggccataaggctgtgcaagacccttgttcacagcgacctgtacagcaagtatcaggagaaaccggagaagctggaggagctaaaggcccgcgtcagaaaaattctggatatgggcgacgaggaagatgtcgacacagatgcgtgcaatgaggcacttgcagacgcactaaggtgggtgagttttcaaaacatcccactgtaaaagggactgtgtcccgagggtgtccgtccccgtgacacatttggtacgtaaccatcacacagtttcacaactgttttgatttcggaagtccgaacttaacttttgaacttgtaacgtttaaattttagtccgaatcggacatgatcagccgcggcttcttggacgggcccgcgccatcctccttccttggtgattcggccacgccttggatctgcagagccagggcgggcttgccgtggatctgtttctgcgtctgtttatcgttcgtaacacgcgcgccgggggggctgctcttggcctcggctttcttgtcgcgacgcttcttgtcggcaccacgttgcttcttgacggactcgacggttcgcttggagcgcgcctgtgtttcagtgcgctgaatgagctccttcaccgcctcgcggaacttaaccatctccatcacggccagaaacgcgtcgccgtcgtcgcacacgagggtgttcggcggagagaccgcgggcgtgtcggtgaacgcgttgtcctgaaccggatcaagaaccagccagtcggccaactccttctcgtacttctcggtgatttccaccctggtcttttcttccgcgtcgtcgtactcgcggtaagactcgttgccgatggtcaccgtgtctttacctctcccttgctgaagccgttcgaacccgcccgtaccggagtggccgaggcacgcctccgcccagaggcggttcgcggacttggggccgtcggcgccgtcgacccggatggcctggaccttctccttgtaaactgtcttggaggtcgggtgttggccggggatctccttcagctcgtaagagatgtttatcttcgccttcttcatctgcttaccgaccacgtcgtgaatcagggtcttggcggtctgaaacccgcggaaactcgcggtcgggaccatcgcttgggcggccgatacgtaagggtccgggaacgtcccggtcggcagctcgaacacgtgggccgaggcgtacccgttgatacctttgagggttccgtccctcgcttcgcggagcgggacagcgtgaatggacgatatgaacgcgtccacctgttggtcgagagggagatccgggaacttccgggttgtctcgccgtattcgtacggctgcagcggatcgtcgtcgtacaggtagaaacagtccctgacccgtgagacgcatatgcccatatactgacgagagtcgatgtccttatcgacctcagcgtcgtcagcgtcagcgtcagcgtcagcgtcgaccttatcgaccttatcgatcttatcggcggggtcgtccttctcgaagacgtgtccccccagagactccagcaacatcgcgtactgatcgtcgctcagggtatccgccaaagcctgtagtttggaaacgtcgacctcgggtttgcgaaccggcgcgggcggtgccgggggcgcaccgtccgactcgggccgggccagagtatcgacaacgatgttatcggcgggcgccgggaaccaaacgtagttgtggggcctgtacgagaccccggtcttaccgtggtggcccgcgtacgctaccacgcgaacaacggcctgtttggattttgttttcttaccgacggtgccgtcggtgccgtctgaaattatccacagggactgttgcgtaacctcgatgcacagaacgatctccggaacgaaatggtcccccgaaggagccttccagatggggacctccacggtcgcgtactcgttgttcaggcgtttgaaccgcttagcaaccgtcttaccggaaccggacccggcactgcctctgtacgcgcacgcggacgtcttaccttgcgcgtccaccgcaaacgcgaacttcttgttctcatcgagtagggggttggactcgctcgaaagtataatctcgccatacctgttcttgccgctgctctcgggggttttagggttgcgaagtgacatgttcaatttgttaccagttaccagttgtcgggtttggaggcttgaaggcttgaaggtttgaaggttggggcgtgtatacaaaatcccgtacggatttaatatttttttttgttttcgtaatcatgtcatcgggatggctttccgtgccaccggaatgacatggattgccaccggaatgacatggattgccattgcaatgacatggaatgccattgggatggggggagggtggtctgcggtggtctgcgatcagacgctctcgatcttgtcgtccttgtcgtccttgtcgtccttgtcgtccttgtcgtccttgtcgttcttgtcctccttgtcgttcttgtcgtccttgtcgttcttgtcctcctctgcagggggcggcttcttcatcttggaaatcgcgcgcgcggtaactctgatccactcgtcgcgaggcagatcccggaactcgtcctcggataggccggaatgatgcaggagcttttggaggaaaacgtggctgagagggtgctgttcaccctttttgttgcgggtgattttaccgtcattccagactttgttgtactccaaatggtacctcttccgaagggtggtcttaaacgtgtccccggaaagaccgcacttactgctgattctcgcgtagtggcctttgcacccgcacgccgaacaatgggtcttggtggacttacctgtgttacccttcgagtcgcccgaggcgtcggaccgttccgtcttaacggcgtgcgcgaacgggtcgttcggatcgggtatcccgggattggtgtccttcttaaccttcttaaccttatgtgcgccctcggggtcggaaacgccgctcatctgtacgggattgttgtcctcatcgcgggcgcgcttactgccgccggggtttcccgcgcgaagacccatcgccttcttgcagaagtgcttaagctcctcgggtgataactcggccagaatgccgtgcataaccttggtccgatcctcgggaggaaggtccataatgtcttcgatgaagggggtcgcgacattgtcgctcatggttcgggcggatggacacgtgtgcgtggaacgggatgaatgtgattcaatgcgtgtttgtgtatgtgtatgtgtgcctgtggtagcggtgtggtagtgtgcggaatagggtgcggaattcacattttttgggtccaccgctcggtggacgatgtttgaaattacagtccgtgtctctggaacaccacacagaggcccgggatgcggctggtgtcccggatctcctgggccgcgggcgacgaaatcatatatacatatgatttatgttccgcgtcaggtcgaggtactccaggcttgggcccatttcggccaggataagtgcgcccgcggacgtgatcatattgtacatcaggtccagatgtttaaggcggggcatgcgcgccgcccggatcgtgttcgcgcccgcgtcgcacacctcgttgtagctgaggtcgagcagttccactcgcgggaggttcgcgcagatgtgctcgacccccacggagtctatgtagttgtagctcaggttcacgtgcgtgagtgcgagtgaggcggtggatgtcgcgccccgcatccacaccaggtgttcgctccggatgtcgcagttctccagcgtcaggtgtgttaggttcgagagcgtggccagatacgaaaggtggccctcgcggcccaggttccccatcatcgccgccgcgaagtgctccaggttccgcagggttcccacgcggcgcaggaaggtccccccgccaggatccgcagggttccacgaaacgtccaagaactccagattggtgagcgcgaacagatccccgatttcggccggagacaacaacatgtccatggcgttgagccgcttgaggttcgccaggcccgggaggttgtggcgggggagccggcaaaaactggtgtccagatcggtcagcgactgcgggaactcgacggcgtcggtggggtccaccttcgcgtccatcaggcccagccgttttaggctcgtcgcgcccttgagcgcgcgaaccgcctcgttcgtgaggcgcacgcgcggcgcgacgagcgtctccaggaacgaacagtggcgcagaacgacgtccaggcccggtagcgaaacgctcttgtacacgaatgggtccacctccagcgcgcggaggtatgtcagatcgcgcgcgtacaggtcgcgcgcggggcccgtcagcagaacgcgcgacacgtacctattggggtacccgggaatcggcctgtggccgctagccggaccccccctgaaccgggtcagggtgagctccgcgtgctcggtcttgcccacaatttcgtcccgctggaaaatgtcccgccgctccgtgaaaaggtcgaccatcgttcgcaacgccgacgacgcctggtaaaacccgcgcgagacctgtttcgtcacgtccagctcgtcgtcgctcagaaacgagaatatgcggtacgcgcactcccgcggaaggtacggcgtcgccatctcccgtgggaatggggtgggagtgggagtgggaagaaacgggtcgcaaacacgctaaaaatccaacgaacgcaaacaccccgcgacgaa

SEQ ID NO: 125 - DNA, 21530 bp, Tetraselmis sp.
  source 1..21530: mol_type = other DNA
gggaaccagaaggcactcgatgaccatgctttcggggcgcgacagcttagggtggaatcccatcgccgcgatgtcgtcgtcggcgatgcgcttcagaatcgtgagcacgtcctcggcggacatgctgagcttttcggaagcctggtcgtcgtcggcggtcgcggagcctccttcgacgtcctcgaaggcgagctccatcgagactcgcatgaaccggtcgttcaggaactgcttgttgattcgaaccggttgcatggcgccgcacccgtgcgggttggcgttcccgcacctggccttgttggtcgacgacttgctaatcaccttcatgagcgcctcgaatcgcttctggccgtgcaggcgcatgatgctcgccatgtccgggtgcgacggatggtacagcaaccgcgaacacttccagcacacgcaccggagcaccttgatgaccgtgtcgaacatgagcgcgttgaaacacggcttcgcgagctcgatgcgtcccgggtggccggggcaaaacttcatgctctggccgcacgtcgcgcagttgtggttctggtccgcgcccatcacgagcgacatggtcccgtgcgaaacgggcgtggatcctaaataggaatccgtggagttgcactccatgacgctcttctttcggatctcatcggtggacagcaacctgaactgcacgctcctgaccggcttgatcttcgacgcatacggatccgccattggtaaacaaaggatttctttttattgtgggcacaacgcagctttatgttgttgttgacctgaatcggagcgacagaccgagagctgggaccctcgcaggacgtgtgcacgcgcaagtctgcgttttaatccctgtggtgacacaatggtgacacaatggtgacacaatggtgacacaacggtgacacaatggtgacacaacggtgacaaaatgcttcgtgaacaaaatgtctgcgtgttacgccacgatgttttttcgatatggaataaaaaatggatgtcgtttatgtcgaattcgatggcgcgcaagtgtcaatacgtacgtgtttaatccgtgacgaaatctttgtatcttgcatacagtttttgtctttgatcttcaaagaacaagcaaaaaataggttttataatttgagaaagtcgcacgatttctcttcaattctcgttgaaaaggaaaaaatacaatatgtaaaccaagcggggttagataacatattgtctttattcagagcaaggaaggtgaaagatttcataaccacctatcgcgatgctcttatgttgaaattgttcggtaatgcccgcctgagcgaggaaaatgttaacatggttgacaacatggggaaactcgactccatttctagaatgttcaaagacagacagtctgatgacccggtaagtgacccggaaaatgacacaaatataatgtctgcggtcacggaagattccggagattacggaacatacctctacattcgaatagcgcttcccgaagatattcgcctgaacgcggttgctaaagagggaaaacttttgacaacaaacgttataaagttcggaataacccgaagtcctcacatcagaaacggtgaatacatcaagaacggacacgacaacggatatttcgcgttcatgtacctgacgaataaggaagtagcctgtaacacggaggcaataatgcggctaaagctcaagaatgttacggtgtataactcgttcgaatatgtcgacacagctcgtcttgcgacattcctcggactagacgtcgggacggggtatcagtggtacttctacgtagcggagtgtttgtacgcgtacatcttgaaggtctcaaagttcatatggggagacgagattaacaacttcgggatgcgattcttaccgaaacaggtcgacggggggctgtgtgtacccggaacatccagtgatattgctcaaaaactcaatctcatatatgagaagcgtgaccttaagagggagcacgcgatcgcaatgaacatatacgatgagagtggaagggtgcaggacctgcatcagcccatccttgtgaaaaagctttatgaagtcgaaactgtcaatggggcgggtacggttgacgatgatttgatcaccaatggagaacaggttattgcgtacaacatcctgaatggaaacgagatggtcttcgacaacaatgacgactgtatgaaatattttggaatttcgtccatgcgaacgctcttgagccagagggctcattttctcggttgggtgttccatcatccccaattcaaacgatggcaacctccgctaggttttatgttcagggatctatctaaggaaaaacagaaaaaaacaaacaatttgttttatgtcaagtcggtagatgagagcgatggaaaagtgcagtactttgagaacaaaagagaagcggtgttaactctgcgctacaagacttcggacttgggttacctgcgggctttcataaataaagaaaaggtggatccttacggacgaaagtggtacatttgcgacccgagttcggttggtgaaatggtggaaagaagttcactgttcttgcaaacatcttccaaacttgaatccaaggttgacgaacgaacaagggggcgggttatcgcgcgtgatatagaaacgggggaggaaagagatttcggcagttgtacggctgccgccgattatttcaagattcatcggaagaagatggttgacgacatagtggatcaaatgcgacaggcttatggacacgtgttcaggtttgtcaccacacgaaaacgttgggaccctccggaatatttcaagtacgataagaactcgtacgagttcaaaacggaacgcttcgttgttcagaaagatagggaaggaaatattttgggacttttcgaatcgcagaaggcggctgccgatatactcggcgagttttccaagaagatcggtgatcacttacgagcccaaagatccgacaagcacggaaggacatttcacaacgccgcgattgaagagtgcggacggtggattgaattggatcctgttcagcccgtagaagaacagccgttcgagggcttcgacaagggaataatagtatacgatatcaggacgggggaggatgtcgatcatttcaaaactccggaagctgcaaaatcgtattttgagatagacccccgtctcatcaggaaacatttggttgatcagcctcggcagtgcaacaatatggcggtaaggaacgttcataacaaaaaacgatggtgtcctccggccacactcgttacggacggagaatacaccgacatcaggagcgattacgtggtgggtgagaaggacgggaaggtgcttgtgatgtacgagtcgatcacaaaagcttcttcaatcaggaactgtgacaggctgcgggttggaaagacaggcgacgggttgttctggaggagggctttcaaacgcgagtatgatctttgggttcctgtgtgaaggaccccatgtttttcgcggcgcgtatagcggtgtcccaaaaaaaaatttgtttccaaaaatggacaacggccaccgtatcgttgcgctggagagccgtatcgcggagttggagcagcatgtgacgcagctggtcgccgccgcgaaccaatcggaaaacggtacgaccaatcgctacattcgcgaggttgactacgcgctgcacagtctcccagtcatcgacacctccaattacctccggtccaagccttatccttgtgccgatgcgggaaaggtgtcgcccgccgccgagaatccgggtgctacccaggctggacacatcctgccccccgctcatataaacgagatcgagcgctgccaccgcttcgccatcgaacggcatggcgaaatcaccagcgtctcgaatgtgccgaaccttcaactgcgcagcgatcccctcatcgtcccagagaaggtgagtccctggtacaatccgccgttcgagattaacgcgccaaaccgaccgttcgaggtgaatagtaacatcggcgttccccccgattacgcccccccggttaggtcgggtacgagcccccccgtgacagccactggcccgttggcgatcggaaacaactactggagatccgttgcgtcgagcgaaaatgcgtcgtcgtctgtccccgtatcgaccgtcgcggggacacacgtcgacaccgtgtgggggcgttggtattgggaactggacaccgacgccctgtgcgccaagacgggtgctgaaaaggtggttcccgcgggggccgcggcccccgcggcccccgcggccgaggagtcgaacggtgagaaggccgtcgcggccgaggatcctagtgctgataaggcggtgccctcggccgtcgctgccgaggagtcgcatggtaagaaggttccgggcccgggtacagagaagccgactttgtgggaggcaagtttgcaatcgaatgtcaatgctgcggatgatttgaaaaacaaagtgtgggggcgttggtactggccgctggaaaccggtggcgtcctcggtgcgaagccggacgaagaaaaagcctcgcccgatgtggcaaaagacaatgtgtcgcccgatgtggcaaaagacaatgcgtcgcccgatgtggaacaagacaaagcgtcgcccgatgtggcaaaagaaaatgtgccggcagccgccgaggtgtgcggtgaagaaaatgtgtcttgtgagaacccgtccgctgcggactcgcctgcttccgaggcggaggcgggggcgcggggagggtggtggcggggctgggctggaggtctcgcggggatggtgctcagaggcctgggctttcgtcgcaggggttcgtcgcatttccagcccgtggtggccaacttcccgtcgtgcgaccacgcacccgccgacacgaatcgggaccgcgacgtcccgtcctcgcctccgcctccgcccccgccacgcgactccgaataccccacacagccaaaatccccgccgtcgtttttcgacgagatccgcggagactccgaggcgatcgggaaaaccctaaaacacgatgagagcgcgtcggacgtgacggatccggaggatccgcaggaacctgtcgacacgggggaaccggatgaaccggatgaacctgatgaaccggacgtgacggaaacggatgattcggatgaatcggacgtgacggaatcggatgattcggatgaaccgactatagactcggagcccgtgaagtcccagccgaaatcggatgattcggaaaagtgtgttttgggaaatagagtggaagccgaagcggaagccgagtcggattcggaatccggttatggctcggatgacgcatgggataaagacatctggttttaagacccctgattatgggagtccaaaaaaagtttacatttcagattgttcgggtttcctcaggcgccgcgcgcttgcggcaggatcggggtacgccgggtccgtgacgcgggcgcatcatgaggtcttccacgagctgcggaaggccgtcgaggcggactgtcgcggtctcgccttcgtgtacctcgccaagcgagcgaatgatcgtggataacagaacgcggctgtgcgtctcgaagtacggaagaacttgaagcggcgtgcgccccttggagtcggtcacgccgagcgcctcctccggaaccaccttgagcacctcggtgaaaaccttctccgcgggggccttgctcgcgagaaggtgaaggaccgttcccccgccgcgcacccggtgggtgagcagaagctccggggcgtgacgcgccgcgtgcgcgaagatgggcgagattgcgtcctggaataatcctttgacgtcgttggcgcggaggaactcctccagcaccgtgataccgtctccgggcgcgtcctcgtcctcccccgcgtcctcggggttctcagcgtcctcgtcctcccccgcgcccgcgtcctcccgcgcgtcctcggggttctcagcgtcctcgtcctcccccgagtcctcgtcctcccccgcgtccgcgtcttcctgctcggcgtcttcaacccgcgccgcgaggggcacgacgccgaggcttagaagtttgttaacggaccccgcgtcctggcaacggatcagcgagttggtgtcgaaggcgacgccgtgctccgtcagggtcgtcgcgactctccatatcttgttgtagatggcttcgttcagaaggtcggttgggctggtcggggcgtccgcgaacataccggtgcgcagacattcgcgaagggtgtccgtgtgcgtttcccagaaatgcaggtcgaagaagagagagaaggaagaggtcgggctccacataagcaacgccgcggcggcaagcgaacgctgggtgttgtccaagttcaggtcgtcggccatgtcattcgtccatttgcactcttttccgaacctgatattccgggacgcggaccagagatccgcttggcggatacggggctcgcgctgaagggcgtcgcggatcgcttccatgcacctgataccgcctccggcgacggacgcaagcgccgcgcgggcggcgatcttgcactgcggggtggcccgttcattcgggaagcgcgccatggcggcggtgttgcggtggttggcgggttgtcgcgggtctgtgacgggtggtgtgcgcgcgtctgcacgggtgggtatgtgcgggtctggggtgggcaggcgggcggtgggttgtgtggttgtgttggcggttgcttgtgctgcctgtgggtgaacgcgcttattttcgccagcgtggatgtgccagcgtggcgccgtgccgtcacacgtggaccgtccgtaccccgtaccccgtaccccatttcctcgtcgtaaatttgtaaatttacacgcccataaaaatgtaaactaaaataaaataatgcagtacctcctgcgcttctccgtcgccgcccttcgaaaacacgcccgccgacacaaaatcaatctccacggcgcgaccctgaagaaggatatcgcgtcccacatccacaaacacgaatccgccgaggttctcaaggaacagtccctgaaaatgtcgaatgtcccgaaaaaaaagtctgataccgttcgtaagcaaaagtccgctacggatgcgaaaggaaagtcgacgtcgaaatcggcgacagtgtcgaagtcctcggggaaatccgccgcgtccaaggccttgaagggggccagcgtatccaaagcgtatcgtggtaattcaaaggttcagacggggcgaggcgcggggtgttcaaccatgcgcgaacgtaaattattcgacgaagtatttgataaagtggccgacaacagggtactgttcaaaaagttaacgtttcctcctgacaccttgaaatgtttgaacgaagcaggaaacgctttatgtcgagcggttttaaattatgaaaatcaacccacaaatggtgcattacaaaaagaaatcgaagatacactgaacgaatataataaactcgtaaataataccttaaatatccttaaaaaaccagccgaaggggaaagcgtcctcacgcccgagcaactccgggagatagaggatgaatacaccgctatggaatgggaagagttggaggctcggttgaatgctctgaaaggcgatcatcaaggtttttagttttttatttcaggagattatgcatcctgtggtgaacgctgaggctgagcaggagctctgtgcgccgattcttgaccgcgtgaaccttgtgctcgccctcgagtatttcccacgtcctgtggaagtagaggagcggcatgtcgtacaggtcctcggggattgggacgcgccagtcgtcccggaacctcgcgagcgcgacggagttcgcgcgatccagtgcgccgcaccactcggcgatcgtcgtcgcggctctccaacagtcccaggcccagtcgcagtcgcggtcgcaatccgactcccagtcgaagtcgaattcgcggcccgactccaagtcccactccaagtcccagtccggctttaagtcgaagtcgcggtccgcctttaagtcgaagtcgcggtcgcattccaactcgcgcgcacgcgcacgctcactggagtcgccggcgcgcccggtcgtgggcgggggcgtgggccttcccacggacggcgtgtgggttgcgatcacctcgcggagggtggtcatcggcgtcaactccgtgtcgtagcggtaccgcgaggaccaagacgagggcgtttgccaaccgcgtccggcgaacaacgaaaccatggcggggttcaggaagtgtgtcgcgctgctccgcgttgagttgagttgagttgtgtcgcgctgcgttgttgtgttcgtggacgaggaagcagttaacacttagccggcagttagccggagcgtcgaccaccgcctcggttaagcgtttgttttttcagctgtttgcctcaggcgtcaaccagttcgtcgacgatcccgtacttcaagcactcctcggcggtgaaaagcgttcgggcgctcttgagggactcgatgacattgtcggggagtttcgttcgggacttcaggatccccttgattattccgaaattgagcttggtgttgtggatgacatcgtcgaaaatttgtgtccttgtgaagaaaatcgtgcccgcaaggttcagggtcgcgtgcgtgtacatgacgcggtgagtgcagcagagaagagggatgacggaaataagatcatggaaggacccgtcaagcagcatatacgttgtggcgggtatggattttacgtggttggcaatggcgacggcgtcgaacgtcgaagtgatcgaattgagcgtggaccggataacgacgtttcgtagttgcgaggctcccgataccattcggctaatttgcgagacggtatccaagcctagattttcagcgtcgcgctttatgacaaggttgtttacgaaggtgctctgaatggtctttatgaaggagataccgcttttgggtccggtatgaactgggtcgataattcgatcgacgaccccgttctttagggcccacttcgcgtccatgataaggtcgtgtttcaaaagctccttcaggtcggtgtctttaagtttcgtgtgctggacgtaatcgtccgcgatggatttgtacattgttttccatttttttctgggacacttataattgttctcgtcaatgcacggaagcaccctccgacatcgtgcagccattcactaccttcatttcgacaggtcgctaaggagggttgcaaaaatatatggggtcgggaagtcgtctgtagcgcgctgggcgcgtgctctggaggttccagagacgaagggtaggaaggttaggcaaagcgccgtcgcgagactaaaaccgaaaatagcggagcatctgcaacagaatcctttcctgacagtaggggcgcttctcaagaaggtccgcgaacagggtgagaaggtcgggatgaccacggttcatcgagctatccgtgccgcgaacttcagcagaaaaaggacacgacctcggttcgccccaaaggtccccaccgcggaagaagggcgtactttcctgacctgtctgaacaatgcgtctgaagtcatcgccgtggacgagacgagcatctacgtggacgactcaccgaggtacggatacacgctgaagggaacacgttgcttgcaccgccggaagtgtcctgtccgtacaggacgcgtgactctgcttttggctgtctcaccaacgcgcggcgtcgttcatcacgaagtggtcaaaggctcggtcacatcggatcgctttgcaggattcgtacggaacatctccgcgccaggcagcacagcgatcctcgacaatgcggtattccacaaaacggctgctgtgcgagaggccgctgaaggcgccggtatctcacttttgttcacacctccgtacagcccagagttcaaccccattgagggatgtttcagtgtcatgaaacaggcgctccgcacgcccggtgggtgcttaaacggggcgttagcgacgctcacggcgtcgaaaatctccgccttcttccgacattctcaagcgcacgttcaaggagttgccggaaactagcaaaaagcttaacgagagcacacaacagaagtaaataaactccgcttccggatctcacaacaagagcttaaggctacgccactggaaggcacgcaacacaagaaacgccgctgtcctgacaagagcttaagaagacgatcagcacaaaaaaacccgatggagggagacggaaggagccctgacgacgaggaggacgaagatgcgggggccgagctacgcgtcgtcaagcgatgtttaaggaaagcgctaaacatgtccacggacgagaaggatctgttcgtctcaagggtggaggagctggtcgtcgcggtgtccaggttgatgcaccacgggtcgcttctggcaaccaactacgtcctccaccggatgaacgacgggaaccctccttccgacgaccttctgacagaccagacgttctacaggcagtgtatgacgtactcttcttcttcggtacgttctggcgcgtaccctgaagtgaagtcgttcgccgacacgaagatgcacctcatcccccacacagagcaggtcccgtactccggaaactgtgtcaacgcagccgcgaggaagctgaaatcttccgttctcacgatcctgtcgcaccgcttccaccagcgcgtcacctccgcggtccgcgcaatgtttcccgatataccggaccgtgccaggatcgccataaaacagaggtgcctcggcagacccggagggcctcccatcgcactgactcgagaggcgtgggccttcgttgacgcggttagaggagacatcttccacggagccgacgtttattcgaccgcggtagaggaggccgtttggaattgtcgaggaatcaagaaggcggacagagaggccgtgtgcaccgaactcctagcggggcgaatgcccgagatggacagtcttaagggctcgggccgtgaggtggttacccatgttctggagttcctccccgcttgcagagcacacagaggagcggtccccgacgaagaagttaggcgcctcgtggccgcggccgcgggacgcgttttccggagggcgaccgatgagcagaagcaacaggtagtggaggatgtcatccacacaacctcttcagcagacaggcgtttcgggaggttgataagcgcggcgcgcagcatgctacgcttcgctggagtcatcagcatcggatggttgaagacacacccggcgcgggcgttgatcgccgtccgtcggatgatgctggaggtggaggatggcatccgtctcgccgagaagctcggaaagaaacgccgtcccaagcgcttccctctcctaccgatcttcgggcagaggaggcagatggtgacgttggatgccgacaccctggtgggtctgtgcaaggccgtgggtatactgccgagcggagcagggcggaaagccctgactgaagacttcaagcgatccctgcttagggttcccagccggtttcgttttcagcgacaaaacgtccttggagagcgacggcgtcgccatcgtgttgaggacctcaaagaccaaccctctcgcctccgcagaaatggcgaccaaggatgacctagaagacatcgtctttgacagagtgttggcgaacgatccggggcgggcagacatcgccaccgtcgtcgactggacggacgaggaagggctgaagaggggatcgacgcgtctgacgcgcaaggagtactaccagcaggcaggcataaaccgccgtgcaaggaagcgccgcatgagggacagagcaatatccgaacacctgaacaaatggaaggaggccagcatcaagacagccgacccagaagcttttgaggaggctctgagggtcagaatgagtccgctccctggctccgagggcgacccctcaatcgaggttgtgtggggccaccaactggcccggtggacgtccataatggacatgaccgcgttcgccgcgaaacgcagaacactggatcgtttttggaggcacaaggttggtctcgaggcgcgacatgatctgagccgcaccgtcgtggtgtttggagacgggaagttttctgcgtcgggaagaggagaacgagccgtgcctcggaaggcgatggaagcctctgcggcacgatttgcggcgaaggtcgttaaggtcggcgaagcctacacgacgaaagtgtgttcgcgttgccatatgcccacattttctgtcagaatgctgaggtcgaagaagactaccgaagggggacgaatcgagcggatggtcgatgtccgggagctgcggcgttgttcatccaacgcatgtcgcgcatctccttacaagtcgagggacaaagacgccgccatcagcatccttcagattttcctcgcgggaatagagcgcccgccgtgctacaccaagcaaggatacgaagctgcgcttagagccatgcgacagggaccgcaacctcatcccttggtctgataggaaaaacctaacccccacggctgtgtcgtgcgcgtcgatggcggcacagtcgcgctgcaagggaaacccccagggtaaccttgctagcaggtccccgcgaggggaccataaagtaccttgcgttttgagggacggacttagcggacctatggtgtcccacaatttctggattgtagtttataccacgttaagttcgtacagaatggaatcaagaacttccttctggcccatgaccagagccgaatattggtgaaggagaaccacggcgtctttgcagatgacgcggtatggggcgaatatactgatgaatgtcgcggccgaggctgacatgccttccaccaatacacacagtgcaagcttggtcctgcccaacaacgcgcgcatagaaagaccatcctccatggatcctccgggggagttcatgtgtacgacgattggacgaggttttgtcgcggtctcggtttgcattccgtctctgttggccgcgaggatgtcctgtgacagcatttccagtttttccggtgtgagtaccccgtacaagaaaacgtgttgcaccttgggcccgtaaaagtcgtggtccttcattttcgagaacacgtcgaccgacctcttgatgaaggcgggcgaccgtgctatagacgctttccgacgcggaggcattggtttgagataacagatttttccatttgtgaatggcaaatgaatttgtgcaggcgtttgtgtgtgatgcacggaacagcgaagcgccccggcccgcgacctctcggaaacaagatgcgctgttgcgaaggcgtcagattcgcggcgcagcgcaaacgaaggaacgaggacggtcacacgcacacgcacacggatacgggaatggacatggactcggactcggactcggacgcgcgcacgcacacgcacacgcgcgcgcgcacgcacgtgacggagagggagaaggagtggttgagggagctgggggtggggtggtcgcgtttgggcgagcttgagcccgcgggcaatccaggcgcacattttccgcctaaaaatgacaatgagtaacgacgcgcccgagttttccgatgacgagatcgcgcaatacgtgcaagccgccataccgtcgatatccgccttcctggaggcgatcgacgagtggtccgatcgcgacgaggagtacccgctgggaccgatccatttggagggggcggtcgctcgcatcacggtccagcttatggggaacgtggtgttgttctggcgcgggagcgtggggcttctgaaacaggtttgcgaatcgggtatccacaatctgaacagcctcctggacgagaaaggggacttgacatcgcgggacatcgcggggatcgtttaaaggtcaatccccgacctgcgaaaaatatcatggaactcgatcatgatctcggccttgtgttgtttgagaatggatgcgagggtcgactggtcgaacccgccgtagaaataattagaggtgtaattgtaattgtaggtgtagttcgggatgggcttcgcggggggtacgggcggcggctgaggctgaggctgatgctgcggttgcggctgtggttgttgtcgcagaacgtgttcgtacgtgtttcccgcgtgtttcccgtacgaatggttgggaaacccggaggcctggttggggttgttcccgaacatggttatttttttcaacgggttttattttccaacacaaatcgacgcaaatctgtcacggacaaagcaatgtggctcgcggcgctgttgagcgtagcgttgatggtcctcctgtttttgtcgatcgcttccctcaacagacaaaaacgcctccgcgagccgttcgtgtcgtttccggagaccgtggacctgacggacggaagccacgcgactcgcgcggtcgacccgacgcgggagcccgtaacggcgtcctacgtcatagaagggacgtcggagctccccgaccggttggggttccaggcgcccgacccgggcgagtcggacggtcccccggacataagaacgggcggcgtgttcgtggacgaggaggcgggtgtgccgctgggatactacgcccccggcaccacgtccagagttctgctcgcggacttcagtttccaaaccgcgacgaacgtcgatcggggcctcggtcccgatcccgatcccgatagcgatcgcgaccccggcgccgacgcgtgccagggccactggacggcggaccgccggtgcgtttacgacggggacgattgttcgggtcccggtacggaccgggtcagcttgtggaaggatatgggggcgacgtacgagtgcgttgcgcaggaggagtgtaaaaccgggttctggaacgtcacggggtgtacggtcgcgggggacgagtgcgagggcgacgacccgaaccagacccacgtgtgggttaaagaggggtccgatttcatgtgcgaggcgcaaccgatatgcgccaactcgtggtattcgccgaccgcgaacgcctgcctacagccggggtcggcgtgcgagatacggggcgaggcgggggtggtcgaggacagggacgggggatacaggtgccagctgaccatgagttccgtcgacgggtacaggttggcgaccgaggagaagaccgttgccaccgaggacgagtgttacctggcgtgtatcgccaaggacaccgggtgcagcgcgtattccgtttctgggacccggtgctataccgcgggttcctcgtcgtcgtactacacgttctccgaccccgagtccaggatccatttcacccccgccgcgaagctttacccgagcttctccgcgacggaggaggcggcgggggtgcgggtcacatggcagccgttcaacgccacggggttcacgatgtatagatcagacacgcccgccatggatcccaaagaggttatacccgcaccggggaccctcgtaccgtacgagtcggaccaaacgtggtacttcaaaccggaatacgagatgggcggtgggataccttcccttccgataaggaagtacatacagaccgaacgcgtggtgacgttcgaccccggagccgtggtgttcacggtcgagaaggtgcccggcttccaccagaaactgcgcgtggtgtgggtggtgtccatagaagacgacatgcagacccaagtgcagtaccccggtaccgagaggaacgtgtacccccacggctcggcgaccctcaccttcgagacggtgggcgcgaagacattcgggatatacgtcatgcgcggggggcaggaggtgtattcggcgacaaaaaccgcggaggtcgcgtgcgatcccgataaggtcggtcggggggacggcacgtgcggataccttaagggggggcttacggtagtccgggcacatggtatggcggtaacggtgcagtgggttctggagatgggcgagggcgtcaccgcgagcgtgtttgtcggcgacgatatagtgtacgaagatatcgaacccagtggttcgatcgtcgaggaccggattaccgagccgggcgaaaccgaaataaaacttgtggtgtacaagggcgacgccgtagttttcgagagcgagcctcgagcggtaaccttggcgtgtcccacgggacacgtttttctggagggggtagggtgcgtggaagagtgttcggcgaacccggcgaacggcgaatggaacttccgcgacgacgggacctgtttcctcgagtgtgaaaccgggtacgtaccgtatgataacgtgcgatgtgtcccggaagaaggggcgtcgtgtggaccgggggagagtgttaagttcggggcgtggaaggcggatggggccggcgggtgcaggttagtgtgcgacggcccggggtacttcaaagatcgcgaccagtgcttcgagttgtgttccggaacggcggccccgcggacgcggtggtcgcacaacgctgacaacgagtgcgaactcgtgtgcgaggaccccgcgttcgtaaaccggggaaccgcaaggggcggatgtttcgaggagtgttcgctttctccgaacgcaaactcgagctacgtcaacgacagcgcgactggcgcgtgcgttttggtgtgcgacgacggatacgtcgactacaacggcgcgtgcgtcccggccctcgggaggtcgtgcggccatggcgccgtcgcgaacggggagtacctcgcggacggaatgggaggatgtgtgctccagtgcgagcaggggtacggtatcgaagacgaagacgacggcgtttgcaaacaaacgtgtgtcggcgccctaccatccggcgcggagttttaccataacgcaaataacacgtgtgaaattcggtgcgcgaacagtaagcacacgctgtacaatagtggcggtgagttgtcgtgcgtgttgaaagagggggagcagtgtgctgccgtgtcgagcgggaatgcgatcgcggacggcgagggtgggtgtacggttcagtgcgacgacggtcactacctgcactacgatgcgtgtgtcccattacctgcgatcaaccgcttcgacgttacgctcgacgacgagaacgtccaagtgcgttgggacgtcactctgccgactgggatggatttggttttgttaagacgtgcagtgtcaggcgacagaaacggcatcgacgacatcagacataccctgggttcccagaccggggacatgacgtatcgggaatcccgccccggggactacgacctaactctccacattgccgagaccgatgagtcgaacggtaccgtcacagttcacgataccgataccaaaagagtctcaatatcgtgcgggagtgggcgggtgttttacaggggctcgtgtgtagatgtagacacagattgcggagccgacatgtcccccgtttcaaacggcacgcaagtcgtgaacgcggacgggcagtgtatccttcgatgtaaccgggggttctctctcgatacatccggggaatgctcttcggacgtatcgactggaacgtccgatccgactctaccttcggacgattcatccgattcttctgattctgctgcgaggtcggggtgcgcggtcccgacgttgttgaataccggcacgttggtggattacacaaaacttgatatcggggaagaatggtacgtgaccgaggcccccatcaagtacgatgaagaggagtcgtgcaaggcagaatatccgggaaattgtgacccgtgtttcgtgaaagatgccgacacagtcgaccactgtgcggatatatgcaccaacacggacgagtgcagagctttcacgttttacaccaagggaggctaccttgaaaccgacaagaactgcaaactcatggcgggggaagaaaaccgaagtacagcgccctacaccaccgacgagaaaaggttccagtcgtacgttcgccaggactcgggcgtgagttacctccacgacggaaccccggttccatcgtcggggagtggtacatcgggatgcgcagatcccacgttatcggagaccggtacactcaacacgtatacgaaactcgatatcggggacgacctttacgtgaccgaagcccccatcaactacgcggacgaggcttcgtgccagggagatctaggcgggtgtgatccgtgtttcgtgaaagaggccgacacagtcgttgactgcgcggacatatgcaccaacacggacaggtgcaacgctttcacgttctacaccgagggaggctacctggaaacgggcagaaactgcaaactcatggcgggcgaaacgggaggtgtcgcgacctatgccaaagacgacaaaaagttccagtcgtacgttcgccagggagccggcgtgaggtacctccagggcgggacctcgtcgcaaccccaggattcccaacaacaggttgaacaacctgtgaggagtagagaaatagacgacgagtgctttaacgcgaactggccgagtgtggccaacggaaaatacgttaacgcgcagtatcagaagtgtactctgaaatgtgacccggggtacgaaaagatgggggcgaactgcgttacgtctcaggacgtgtactacgaaaaccttacggcggaccagaaaaacttgtacccctctggtgtggacgcgtggaccgggtgcgagtgggttatgaacaataaggaagggcacgcggacacgtacagatcatattgcgattcacgcaccagaacgagcgaattctccacggcgcacataaactgcgcgtggcacgcggacataatgaacgcggagttcgagaacccggattgtaactccgtttacgataaccccataaagactccgctgaaccgatggaaatcattcgaaaaggaacacggtgtcccagtgggggcgacgtactcgacgggacaaaaagagtgggttccagaacaggagaccgggacgctgttccagttgaagagcgggcagttcgagttcgtggacactgggcgggttgactccttcaggtacggtccgtcgggacaacccagcggcggaggcctgctagcaggataattttctggtcggtattttcgaaatttgaatcaatttacatggtgttggaaacctgcggtgcggtgcggtgcgctaaaacatttcgtcgaacgtcgcgtccaggacaatgtggtgccttccatcccgcttcgcgggcgccacggtgacgcgggtgagcttggtctttccggcgccggtgagctcggtgtcaaaccagatggaccccagacttcccgccttgaaccattccctcctcgggtcagaggacatgatttcgaacagttggtttgtggcttcgtggaaccacgggcgcatttccccgcgtgcgctgcctgggtagcactggggttcgtggagactgatgtccacaagatcggcgttgaatgcccccaagagacctccgttgtccgcgatgatcttgttcacgttgtcggcgacccctgtcgcgagttgcaccgaggcgttgacatcttcctgggacacgcggaaggtatcaacagcgccggtcgacccgacggagatggcctgcatgtttgaagaggtagacgttgtggagtgaaggaaaggtgaaatgtgctggatggcggcggcgaccgcatgtatttatgttgattgcgttcattttcattgatttgtgttgattcgatttgatttcatttgattcgccgcgtacagtaacatgccacgtaacatgccacgtggcaaaacgctcaccgcgtgaagttcgcacacttccattcacgcgtgctgcgcgaagatcacttttcggatcatacggttacccaaattacgaccctctgggtgttgcgttagttttgggaacgactgtaaaaaagtaagcagcggtttcaacaagcgttgcgtagacggcttcaacgctggcgcgccaccagggctttaggtccctcggggatgcgtcggatgcgtcatccgggttgtcgccatcgctgtcgtctgccacgcagtcgatgtagcgcgcgatgtcgtggtcccgcaaacacaagaggttgggaaggttgacgacgttggtccacgggtccccgtcgtccgcccgcacgcgtttcccgttgacgaaccacacgcgcctcccggcgtgctgccaccgggcgcgcgtggggacgctggcgaccgggtcgtaccccacgacaaagcggcgaagatccaacacctcatccacgcgcgccacgaacgccgagttgccgacccgcgggcacccgaacacgtagcaccggcagcgctcctcggccgcctcgtcctttaccatcgcggcgcaaagggtggcgacgccgccgcccagcgagtgccccgtgacgacggttcgcgacctgtcggggtgtgcgcagcgataccgtttgacggcgtcgaccgcggcgcggtactgcgagaagaagcccgcgtgcacgcgcgcaccggggtcggtgtcctgcatgaacggcagtgccttcttgatgacggcggcgttgaccagagcgtcacgccagctgtcggtaccgcggaacgcgacaaaaaccgtgcgatcgcgttcgcggtacgcaaacacaacctggacgtcgctgtcgtcgcacccgaagcgttgccagtcggtaagcgcgcggtggacggcgggccaccgcgaggcgcgttcgcaccgggggcggaacgcggacggcgtgaggcggtccttgtcgtacgcgtacgcgcataggaacgcgcacgtgagcgccgtggaggccgccatagcgtttttgagaacgaagattttacgtataagattttatcgcacgatcacaagcgcttgcccggtagcggccatgcagtgaaaaagcatgtgcaccggtgtccacatcgggttatcgaaggagtgcaatcggtcggaaaggaaatacaggcaccccatgaacaaccatatcagccacgacagggccatctcgggaatcttccacgcgccgtaggcggtgtatatcaagaaacctgaggttgccacgaccttatcgattatcatatgggtttcggacggttggttccaatacagaatgctcacgattccgcacacccacgaaacgcttcctaaggcgtactgtttcaggccgaatgcgaagataccgacgagaacgaacaagtagctactgagaaccagctcggggtacatttgtttaaaaggaatgtgtgaataaaaaacaatgtgtcgggaagaaaaggggtgcccggcgcctaatttacctggcgtcgccgaaggcgtacacgtcgttcccgcgggggcggttcacgaggtagtaacgcagaaactccccgacggacgccaaaacgaaggagatgcatactgtggatgtgtatatgagggggataacgacaatggcggggtactgccccttcgaggagggttcccccgcgagagggtcgaaaagcatggggtcgacgattccagttttcgggtcggtggtgggaagcatgttcacgggcacgggcacaggcacgggaacggtggcgaaggcggtcgcggggagagcgacgtagttcagctggtaggtacacatggaaatgaccgcaagaatcaagacgacggggtaaagcagcaccgtggcgacgggaatgaggcgtttgaaaaccacgtgatcaaagtgcgacgcataagcccactggtacgcgcctgtgagcacgaagtccgtgacaactggaacgaacgcacccgaaaacgtgcacatgacgacg

SEQ ID NO: 126 - DNA, 13790 bp, Daphnia sp.
  source 1..13790: mol_type = other DNA
aatttcttctatctcttgattttttatttgcgcaaactttacaattatattccaatccatctaaattagaagacttcttatgaaaatcttctaattttttagtttctttacaattagtacactctttcatactttaaaaccaataagggaaatggtttttcacattttcactcttttttatattgaaaaacctaaaaccagatttcgtattagagaaattagactttacccaattacttggaggagaaaaagcagggtaattgtaatattgaaaatcagtgcttgtactgtcatcaaaaagccccaaatgggaatctcctttagaaaactcaataaaattaccgtcatataaaccattctctttcaaatagtggtctatctttttagcctgcttatcatctaagtgtggacggaagccaaattttagagattctgaatctttaccatgggtttccagtattgtgtgtttacctatcttaaagtggtctataaattttttctgagttttaactgaaactttatttgaataccgttgttctaaaataccttttacagcttgagctacaaaataactgaaaacgcccgaatgattatcttccactaaaaagttatattgaatttctttatagtcatctactaaagaatctacaagttttaagctaaatgaaacacctaaatcaaaagcttctttatcgttcatattttgaggtaattcatgtccttttctagtagtttgaccacctaaaccatccatgtagtcgcctaaattgcttataatcaacaagttagatttttgataagtttttgtgtgttgaatcattaaatctaatcttctaaataactcttctttgtcccacttaccttcatacaaagggtccccattaccattaacatccatagcaatatgagtatctgtaaacactaatctatcgaaccattcgtcagaaacatgttctaatttttttacttctgattttataggggtaatatattttggtataatttcttccaggtgtttgtctacatcaatagcagcgatttcttcagaagtataaaacactacgttatagaaaggtataccagaatgactaattaatttatagcttctaattttattaacatccaaaccataatgagaacagtattgttctatgttcattagttgcccatcagctccaatagcagtaaaacctttttgtggcttttctttatcgtttgaatagttgttactatctgtaaccgtatcattctccaaatctaaatcaaccttcccactcctaagtagtctgctaagtctatttctatatttttcactgtattcaattcccaattcagcgcaatgtcttcgacacgcttctgtaatgttttgttcttgagtgtagtactctaatgctttttcaattttaaataattccatattttgtttttaagtttttagaacgcagttcctgctgcggcgatttttattgtttacaaatacccaaattccatggcagttatttctcctatatcaaataagtcaccttcaccatcctcgtcctcataaataccacctattttatcatttagactatcccatttttctgcttttattttaaatttttcggcgaattcgtgagcccatctcatagcttgttcagctgtaataagttcttgatttagtgttaccgcttctttaaaagggtctaactcctttattttacttctaaaaaattcttctgctgttatcatactattcctctaatctttttgttaatatttctatttgtcgttttaattcttctttttcagatattttatctttttcttgttgttctaattgttttgctatttcttcttctatccatttttcaattttttcggcggaaaaagataaaagacagataggcacataagaataatcttcattattccaatcctcgtatggtatcccatcttgattgtaaactacaatattttcatcttcaactctaaagctatagtagcctaaaaaagattcaaaacttgtttcgtgatattcagacctcgcacccattagatagatgtatttatcttgttcccacatttcactttgtttagatgataatttgttcattacgtgccataatttttctaaatctaatttcataacttgtgtccgaggataccctgttcgcttgaccctttagggtagggaggaatcggactattcctttttaattaaacatttttttggttctctatatattttttaactgtttcttctgatacgtgacccacagtacctgcgtaataggaacgtgtccataaacaaggtagtcttgattttaattctggaaactcttctcttaatttaaaagaagtatacccttttaattgagatacaattctatggactgaatctttaacagaggcttgtagaaaaatatgaacatggtcttccattgtttccataacttctattttataattaagttctgttgctttttcaagaattagtatttttaaaattttttgaataatatctgtcaaaacttttcttctgtattttgtacaccacactatgtgatattttaattctgattttgttggcatattaaatattttttgcaaatttataataaatatttgtttcctgcaagtatttaatgatttttatttttatcaattttgttttttaatataaaagtattatttttgcactatgaaactaatgaaaacatacaaatttaagttaaatccttctaaagcacaaaaggaaacttttgagtcgtgggttaacacttctcgttttctttataatcttgcattaaatgaacgtataatggtttatgaaatgcgtaaaaaatcagtttcaaaatatgaccaatataatcaattaccagaacttaaaaaactatacccttggataggcgaagtttattcagacactattcaagaagttttagaccgtttagataaaacatatcaaaacttttttagaggtgctgggtttccaaagttttctaaaaagggtgagtataattcttttactttcaaacgctcttttaaagttaatgaaaaaactattaagttacctaaaataggagaagtaaaatattttaattctcgtgacatagttggaaaacaaaaaactgctacaataataaaagaagataataattggtttatttgtataaccgctgaatacgaaacaccatttgaaactattgaggttgataaccaaaatccaatagcttttgatatgggtggagttaggtttttagcattatcaaataatacatttattgattctcctgaatttatgaaaccttttgaaaacgaattaagaatcttacaaagaaaattagctcgtcaaaagaaaggtagtaaatcaagggaagaaactaaacaaaaaattagaaaaatttacaaaaaaatttctaatcaacgtttagattttttacataaagtttctacaaatttatcaaacaaatattccgctttatatatggaagacttgaaattgcaaaaaatgcaacagaatggtttttctaatgtaaataaaatgatgtctgataaaagttttggtaactttaaacttcttttatcttataaattcaaagaacgtggtaagcatttaggtcttgttaatccagcatatacttctcaaacttgtaactcttgtggtactgttgataaaaaatcaagaatgtcccaatcagaatttgtttgtacaagttgtggaacagtagataacagtgacgttaacgcttctaaaaatatacttcgggagggcatctcgaagggtacaaaacgtaaggcattagtctaagcgtgtactcagaatcccatttgcttcagctatgggagttgtcaaacttttgttatatataaattatctacaaattcccctggttctagtttagcatttcgttcaattaagtcaattaacatcccttttgttactaaaacttttctttctatatcttgagcatcttcgtattcagaatctgaccaattaatgttatctagtgtgtatgttatttctatcataaatattttttcttaattacttttgcccaataatctgttgttactttaccttcagcactatggcttgtccaggtgcaagggtgtttttcttttgcttcttttaatctttcttgcggcgattttgatttatctgtgtcaaaatggtaagcgagataacactcccaataatggtcacaatcttccggtctaaaaattaaagcaagttgataaccaaataaaacaaaactccacactggattactctcaaatctatagtctgtgtttgaccatttagttttccatctcaaaccaacaaaatcaaaacctactgatttatcaacaaaataatgacatttcattttttcatcatacaattctgtaaaagatttttcttttcttttatattctggattattcttattaaagtttcttgtagatataatttcttttactgctgcatcaatagctctttgtggagtagctttaactgattttcttggatagaaataaggtgtaccaatcgcagttttacctacatataatttcggcaagaaaaatttaaaaggagaaaaataaacctttaaaaattcaaagtctcttaaaaaccaataaagtttggaatatttatattgcatacttacaaaattttattttaccatcttcttcaatgtactctctaggataccaatctttaataacttcattacaagtcttacacatccaataattatctatcatttcagtaggtctacatttaactttttgagttttctcaatgcactcctctttagctttttgtagctcttcaattagtaaatctattttaggaatcatctcatctaaaacttctaattcagaacatccataaataggttgcacatcaatttctaaatttgcatcaaatgattggaatttagattttccatcatcataaacttttatttctaccatcctgtttcttttttaaaaacgtttaacatgtcttcatctgtataatgaaaaaacttttcagcattttctggcgtatcatttttacgcatccaattgtgaaaagcaatagcaaattcgtgtgttatttgttcaagtttattagctgtttctacttttaaaccgtcaaatggctcgcatagtttttcttttaacatactttactatttaaaattttctctctttcttgaacacttaatttactaaacaaatctaaccactcttctaactgcatttcagaaacaatgtctgtttgattattttctcttttaattactgtatatccgtggtcttcaacaatttcaatgtgttcttctaaatcaactttatgactaaaatcataattaaggtcttccaatgcttcaactaaatcatattcatcacctctgtctacaagatttgcattttccattgcatagtctattacttctctactgtttaaacttcttaatagttcttcagtatcatcatcaataatatactgtatcttttctaattcttctttatcttgcgccgctaaaagttctaaaaaaccttcaacaactgcttcttcatccaaagaaagtttccattcagattggataaactctaatatattttttacttttctattttccactctaccaatcatttaaaaatttatctaattcctcttttgttacaattttagctgtaggtgttctataggcatctacaatagttacagagtacagttcaatatcattataatcgtcataacctaaattaaaataatatgctgtagcatcttgatgcttatttattttattttttatcttcatttttaaaccgtttttactattacacttacattattataacctgcgtcaaaagaaattaaagactgttgaccatactcaacaaccaatctatctattatctctttaaactctccaagtgtaccatcaaagtcacctaattcactaatatcaatttcattttttgttatcataatttttttttgcaaatttattaattcttttttaattcaccaaacttttgaacaagtttttctacaacacactgttgacagtataattttatcttacttttatagtctgttggttgtaatagttttattaaattattcattttcttttttctttaaagctgttgggaaatttaaacccttgttaaacattgtttgagccgttttaaggtaattttcaactccttttgataggtaatcattacttcttattttatcttctattaaagaccacatttcatctgtattaattccataataagcacagagtccagatgctgtgaatgaactggagacaacctggttgtgacctgaatctacaattctatctattaaatgagagattaaattaaaacattgctcaacatcttcctcactaacatcttctggaatttcaatttcaccaacaaacggaacaaaggaattttctttatatcctctaacaacacttcctacagcatcccctctaaatttagcatctgggtcgtaactattatacagaggttgagtgcatctttcattacttaaatctaaattaataaacttatctaaatcgtgagcaattccaaaccatagttgcttataatgttctatacttgtaggtgtttctccaaataaaaatacgaatttacatcctgtttttgacggcgaagaaaatgcaaaaatacaatcttttcttttctcaaatatataatccctaagctcttcgcaatggtctatgttatcatattcaaaaataccaaacggacgaaattcttttattgactcgtaatttctaatagggtcaaaaatagcagacggcgttgtaaagaacagtctctctgcttttaacctatctttctcaactttatcccctcttgcaccagcctcttgaattagtttaaaagattcaatcatctctggtttaggagaaatgatactgttaatcagttgacgcagtgttatgttccccgaaggctttattgtttttatgccgttcttataccattggaaggataaatctaaataattactcataactccctttcaattcttcagctaattcaacaatatattcatttatagtttgctcactccacgagttttgcacaagaagtcctttaaaagctgaaaaatattgctctaaagaaacatctacatttgtaaattcaactgtactgttttgccaatctgtgtttaatgctaatgttgtcatagttcaacttttattttatctgaatttttagttgttaaatgtacactactatctacagtaattttgcttctatttggatttcttttccatttttcgtggcgaattacctgctgtaaatcaaaagcaattctacaagattcgtctacattttcactatatatgccccaactaccgttttgccctattgaattatcttgatagagaatatttcttgctcggtgtaacaaatctttagctttatcttgaattaaattgatataagtaaaatctttattaaacttattgtatagataattttcaaaagtagtatgctctactattctatcaaattgtccaacacctactcttgaatataaatcaagtgcactttgtattacacttaactgttcttctgttatttctaattttgccaaaatcctaattttttacttgtactaaaaatatctaataagtcttgtctggtactttcaaagtccaattcattctctttacaatagttttttaattctttttcagccgattttttattatttttaggcggcgtaaaaatttaaaaacatattcactgttatcccaacatccatcatactctactttttcaaaaaccaaaaccggttcataattaaattctttctcatttttatacaagtcaaataaataaatatctccttctacattactaacttgtctaactgctgttgcttttaatcccatttttattaaattttatttctccatcttttaaatctatcataatcactcaaatacccagtactcctacgctcttgtccctcaattaaaggagctgtagaaccaaataaccacatttcaaaaccttcttgttcttcttgtggaagttcatcaataaatatgtatggtatttcactgccttctatataaacttgtaattctttattcttcgtatccataggttattttataaaacatttcttcatttcttaaattttgttcaactataatttcatcaatagactctacagtaaacccactggtttgacctactaaaagtttatcatcttcaaaaacttctatatcttctaatttaataataccttccattatcataatgttaatctctctcattatataatcagaattagtgtgtagctcaaatccatcttttaaattaacccataatctaatagtttctatttgatatttaggatgtaattggtcaactacacaatcttctggttctattgataatcctgtataaattttaattttcataattttaatatctttgaccacaacttttacattggtcatttatttcacatttaattaacttacaatatcctactgtttcttctccatatttttctaaatcttcttcactattcacttatttcaattttaaaacaatacctatctactctatcagatgctttctttaaagcttcttctttattttcggcgagaatagaaaaattaaaaaaatctttctcatttcctccatcatatctataccaaactgttatattatatgtcttcatattttatattttttaacaaaggtaatatattaacaaatacaagtcaagtatttaacctaatttagaatgattataaacaaacttcaaatctctttttcattttttctaaagtttcttccggaacattgtgttcattaactccaccatgtctattttctacaattagtgagaataccatatatccgtattttttagcaagttcaaaataaggttccatttcccattcttgagtaaatgtatttgatactactattttttcaaatccatcttccattctatgttcagttaatagttgacaccatttatgtgctcttttaacattttctggtttccaaaaatagttaccattttggtcaatatgatacatatctgcctccaaatgaactcctcctaacgattttgctaatgttgattttccagctcctggtgcgcctcgcaaaataaataattctttactcatgtcttccaattgttaatttattttttaatagttgttgtataagttcgtaagaaaatagactgtattctccaaacatattataataagcatcaattccaacatccatacttttatacttatgaatttcttttactaaatgcggctcatctccatggttgtgtccatgaaggaaaaaagaaccgtcctcttgaaaattccaacaaaaatgagggaaatgtgaacagcaaataatctgtttctcgatgtttaattctaaataatcgccaatatataaaagtttatcacattctgataaagcactgtgtaacttacctctattacagtggttgccaaaaagcataataacatttttacatactaaactatctaaaaactgttcatagtttttctctcccatcatagtatctcccataagtactaaaaggtcattctctcgtacaagtttattagtttcaactatgatgtggtcattcatgtgttccacgctatcaaactttcttccaaagtctataactgctttatggtctatgtgaaaatccgaagaaaaataaactttatctacatttaatgtttgttttggaaaactacttaatattttaactttcatatctaaattcttttatgttatttgtatttatcattatttgaactaattcattgtcttctgcaaatttaggatacatatctaactctcctttatttaacatgtcatttaacctgcttcttaattcttgttctttatcttgtaaatactcttttgagggtaaattaactcctgaataattcttatgaagctgttgaattttttctactgttggtaattctccatctattaattcatctgccatgtacaaacttctcaaagcatgaaatttctttttatctgaatttccgtgaagttttaaatccctttttactactccaatataagcttttataattttgtaagttcggcataaaaataaagaattttcaaaattaccacttaatattacaatgtcggctatcatattacaatctcctgaaaataaattatggtagaattgtttctctgtcatccaaacatattgggtattatcatctccatcatactgccatgaatggatattaggtaaatatctcgccaaagaagtaaaagacagatagaaatcatcagaaataacccttacatagtcaaagtcactattttcattagcaataccatgcaactggctaccaaataaatattctttgaaagatagcgtacataaatattcatgttgttcttttgttattttataattcataatcttctatattctggtttaatcaatctatatatttgctcatctattcttttaccatttcttagagaaaataataggtgtttgtatttatagtcttttataacttctgcaaaatctttatctaaatctactttacctatttccaaatacttttcccaagcttcatcttcaatttctttaaatttatatattaagtgcatttcatattctgaaatcgcatcaaaatattcatctggaacatcttttaaaatctctaaaatactatctccgttttttaagcatccccaaacagcagttgttgacatttcagacattaatttatgtaatcttaaatattcagctccttttattttacatctttctccgtttgaaaatctaactacataaccctcttcgttatcttttatatcctcatgtaagttttctaaagaagcgtcttttttatgaacctttgcgtgaggaagtaaccaacagtttattggttgctcttctcctgtttcagttttaaaaactcctgttaaaattacatcttcatagtctccataatctactacaattctgttttctttaaaaattatttcaaaacaatatgtgttatttttatctaaagatttatagtcatactttgaaagtaattcaaatccttttgcagcttgttcagaagtaaaagaacctcttgatgcaaatacccattcgccgccaaaaaagaataaaatacctaaagaaccgtcatacttagtatatatctcatagtcattagtaacaacagttttagcttcagataaattaaaaaactttttgaaaggtctagctacaacattacctaaatcatcaaccactaaacctcttgtagacaatgttacatcatcccaaagattttcccattgaactttatcagtatagttgtagattgttaaaggtaaagttggatgtacctgtgaataaagtaacccgtcttctacgtatttgtttaagatatctttcatagtttattcaattacccattttaaatggtgtattatatcattccaataatcagcttcttcttttctgttttgttgtataagaagctcctggtctcttttaattattttaatctcttcttctatttgctcttttgttttcatagtttttcgccacataaaaagttaataacactgcaaagatatagctaaatatttaattaaaaaagaaaaaggtagaaaagtttaactctctacctttatttgtattgattctaaattagtgatgatttcttcaatgggtaaatcaagagtgaaacattctgtatgtcctttaaaatatgtattagatttgtatttatattctttatatcgattatgtaattcttgctctaaagatgcgactttaaaaagagatgttgataatttgtatattacagaagctttgtattgttttcctgaatcgtaaaatataccctgtattcgttttttaatatatctggaaatacctatcttatagaaagtttcttcatctttttctaatttcataatatataaatcacaaggtatattttttgtatcttcaactgtaatataatccttaatgtttgaggttattatagaacacacaggacaacccgcagaactatctatgtgcgtattaggtctttgaaaaaatgacccatgatgtttacaaataatctctacattctttctgttattaatgtagtctacctttgaatagtcatagtaatcaccatgtattaatttggctttttctataaactgttctgtgtttgactgattccacggaatcattttagcacacttccaacatttcttaccacgtagatgtttttgagcgttttgttctagatttccatgtaatggacaaatatattttattttagaatttgtgtttttataatcagataagtcataaattaaattattgttaaattctttaaatcttttcagcatatcttcttttgatatactatagtcaacccctcttttttcgtaagaacatttttcacaatcacttcctctcatgtgagagtgtccattctgtttaaattttccgtgtgttgggcaaataatagttaaatgttcatttaattgtttataatcttctattaaagaataatcaaacttgaaattatgaatttgattacttttattaataaaatcttctttacttgttctgtttaaatctcctctaacctccaatccacatttaggacaattatcacccctgcgtatatgagcagaagggttttgttcaaatattccatgagtagaacagataattttaactttagtgttattgtttacataatcaacaatagaataatcatacctatctccatgcttttctatagctcttttaataaattcttctgttgttaatcttatgtttttagttagttttattacatcaattttataataatttaataattcccccatccttttatcaggaatattaaagtgtttacataagttggttatacagaatttgaagtttttatctttttttaattttaaaattacttcttttgggactaattttacccatttactatttttcatttttgacttataaatgcgaaaaagcctgaacaacggtgatacgagcacacattgaacagacttttccaaaaaattataaatattttaaatataaactaggctcgtatttctaatttactttgcaaagatataaaaagattttgaattatccaaatagtttaactaaattttaacttttgatggtttaatttcagcaggaactccatatttttcaatcaaccaatcttttttatagaggtcaaattgacgctgagttggaattttatccaagcaatattttttataattttcatattctttttcaagtttagctttttcacgagcttctttacgttcttgttctaatctttcttccgtgccgtctattttatgtataattttgtaacattcattaacataatagtcataattaatattatattcttcaaaaggaacttcgtaatatttattaaaaattgtcactaaagtaccaccagcctcaatttcaatagttctttcctcttttaatttacggaaagttttaccgttgttagaaatataatatctgttagttttctgttgtgtttcagtattgccttctgaatcaaccgtttcacacttccatccgtgtgtagcgttaaacgttttacaaaataaataaatatctttactttctttaattgtctgttctacgggaattcctttaagaaaataatccgcaacagctaaagaaacaatcccttgacttaaagatttatgatattctccatctttaatcatttcgtgattaggtttaaaagtacctttatatt

SEQ ID NO: 127 - DNA, 21125 bp, Daphnia sp.
  source 1..21125: mol_type = other DNA
aagctagatatgaaacatacctatcagaagatttcattaaacaattaaacagttttgaaattgatttgggagacattggtagtatctcaagaaaagatttacctaccgaagctttagatttagatgcacaatttagaagagagtcaactcaaattaagattaatgccggagataatttaacaaaattagaccaggcgagaattcaagaaattaataagagaagattatttgctaaaaacccaagaaccttggacggagagtttaaaccaggattaacagaggtttacaatgaagaaaaaggaagatacattgtagagagaacagacgagtttgataatttatcagcagaagataaagcagaggctaacgttgcctacggtttaaatatgattgatttaattaatcaagaattctataaaggacagggagataaaggaggaatcccaaataagttttttgaagctttagatgcagcagaggaccaagttgaatttctttcaaacaattcttacataggatatcctcaagatttttgggataactttaaaacaaattccgggttagtggcaagattaagagctgtaggtactgaagaggcagatagtattgcgggtagcattagaagacaacaagctattataaataatattttaaaacaaaatacagtttataatagaccttctgaaaccaatttctctgatatgaagaaacttcacatggcacaagtcaaagaagcgtcttctcttttggaaactttctatgagcaagcaaaaagaatattgccggcacaagaagtagaaaatcaaattacagcagataatacagttaatgatgcctatcaaaaagctattgaagatttagagattaaaacagctaaagaagaattagattttattttagagcacgtaacttcaaaaagtagagatagtattatcgctgctaaagaagttgctagaggagatagaaatgtcccaaaacatttagctcaatactttaaagaaggtgttagcggagaacaagcagttcttgcttatgctaaaactaaattattaccttactttaagagaacggaaccggtaggatttacaaaagcatggaatgatttcagaaacggaaacatctctgccagagagtttatagctatggaagatgtggttaatataactccaaacttctcattctatgaaaacacagataatgtaaaccctaaatggttagctaacaataaagccgggaaagaacaatttacagaggcatatttaaaaagagtgagagataatgcattctttgacaaatacaagatagtaaatggagtggcaactcaaaacgtaaaagattggcaagccagagagctgttgttacaatatcaaaaagaaatgattgagttcaatggtttaacaggagttcaagatttatatatgatgcctcaagttagaagaacaacagttgaaaaagttacctctacaacagtaaaagggttaaaagaaatagttaaagatatcactacttttagacctgaagatgtggaattaggagaaacagttgatggttctgtagcaaaaattggaagtcaattattgactataccaacttattataacagacctttagatgaccctaaagaacttactaataatgtcctgtacgcttatttactttatggtaaagcagcaagtgagcatagagcaaggagagagaacattagtgatatgttagttttatctgatactatgaaagcgtctgaatttgcagataaagaatctgatagaaccaatgcctttaagatgttacagagtcaaattgattataatttctatggggttaaagagacttttaaagcaaattatagaggagtagatttggcaaaaacagccagaggtattaactcattctttaaaagtacagcattagctggagcagttgttcctataacatcttatttgacagctaaaactcaacaatcaatagagttattagtaggtcaagttattaataaaaatgcagttgtaaatggaagaaaattattctataaacatgcaaaaggagccgcagctgaagtaggaggatttaaatctgatagcttcttcaacgttattggagaatctttaaatgtatataatgcattaaacagatatgaaaactctaaatatagtagaacaggaagaattgctttagaaggtggtggtaacttacatagtgctgctaactttggaccaattggtatggctatggcaacagttatttctgaccttagaattgtagatggtaaaattattgactacaaccaatttaagaaaggtttcgccgcaaaaggtttaaaaggaaatgtatctgaagagtgggttaaaaacgaactgttctctacatacatggaattagctgtaaaagatggagtattagattttaataacgagactttcaaaaaagcaatagaatcaaaaataaaattaccagagggacaatcttttgaagattatatgaaatacaagagagagtatttatctcaaagaattttatcaacaattcaaagaatagatagccaaataccggcacaacaaaaatctatttgggctagaaactctggagctaacttctttttaagtttcttgaacttcttacttgtacaaacatctttgaaatttaagaaaaaacagtttaacatttctgaaggagaggttcaagtgggtaattatagagagacttgggaatttttagtagataattttagagaccctaaaaatatttatgcgaactataagaaagctggtccagaaacaaaattggctttgagaagaacattaatagaacttgcagttgtaaatgcacttgctattgcggctttagctctttctaaatatgtagatgatgaggatgaagtaccatatccggttgcattaacagattatttcttacagcgtgtagctttagaaacattaggctctacatttgctttaccggcaactgtggcaggtgttgttgaaaatccactacttatctactcaaaaggtaaagactggttagcagtggagaatttatttaatggaaatgcagataaatacgctttaaaagtattaccttatgctaaagacattaaaaaaatatacgacccaacaacagcaagacaatcatacctacatttccaggaacaggatgcagcaatatccgacatatacgacagatttgcttggtttaccaacatcttacccgaagtgatgcagggagaaaaagtagaagaataaaaaaattaaagagagacctaaaaaatctctcttttttgtttgtatatctaaaaattagtcatatatttgcacaataaaaatattaaaatttacacattgagacctaaaacagaaaaatggcacaactaccaagaaggagattgtggaaaacctattgagaattattttaagaaagggttttggaaaagatatgatagaaaaaaatttttaaaaagagcattaaaagatgaaagaagataaaggaatagcacatcaaatagaatactctagaccacgtggtattacaaaaagagatattatgttagtagctgtgtacatttttggaaaaaatatacaatacacagaaaatttaataaggaacgaagaagatttagaaatagctttaaatcattacaatttaataagaaaatggaaactatgaaagaagataaaggaactccgttttacacatacaggaaggataaaggatttgtaatcaatggttatataaaagaagatgataaataacatagaaaaaattaaagaactattgaattttaccaatacaggagatttttattttctcttaattctaaagagaaaaaaagaccagccggaaggagaaagagataatcatcaatcagtaagaacaatcaaaacttattgtattgaaagtttagagcatcttgataaaagatatgatgagattatacaactctgtgaaatttttaaagcaagagcttatattcatgttcaaaaacagaatcatagtgatgtttcattggatatgttagcgttacttgcagagagaattagaaacggaaataataatcaaaaaggattatttgattcagtagtaggacagttaaaaacacatgaaaaaaggtggattgttgacattgatactgtagacgtgctttattttatgggggtaaaagatgctatacataggtgtaaaccggaaggaaataaaatagaagctgtaatacctacaaaaagcggctatcatttaataactaaaagatttgatgttatggaattcaataaatattttcctgaaatcgacattcaaaagaaaaatcctactttattatactatccaaattcacttaattatgaaaaatagagaagactctataaaagaaatgttaacagttagagcattggaaaattttaataatatgcaaatgatagaggagtttaaagaagaagggtttaggaatacatctgcttataatataggttataaaaccgccaaaaaagaaataaaagacagattaaacgcactaaaaagtcaattaaaacaagaaaaacaaccaaaactaactaagacattaaacacagaattaatcaaagagttagagattaaaatacaaatactaaaagaactgttatgagtaagttaaacgcaaacattccatatcaagaagcatgggtaagggatgcttttctctattcagattggacaaataaagaattaactaaatgttatatatttggagtaaaagcagttctaaataaacctttaatgttccattgtgaattagacaacggcgtagtatggttttcacttccaatacacgcatttgtacataaagaagattttgaaaaaccttgcgaaaacgaagaagaattactttctttacttcagtactgggatatgcagagttcggatatagctgttacaacttttagttatttacaaggacataaagtagactgttttaatagaaataaaaagtttatgagaggtcaatatctatttactattgacgactattatgcagataataactcacttcctttaggttacgcaaatgacccagataaaaagtgtttccatattataaaattagagaatggatttttctgtgcttatccaaacaattacttacgtttttataatctaaatcattgtgaaccttataatactccgccaaaatataaaagaaacagttggaactggagttgtgaatatataaaacctaaagaagattaaatgaaaaattattaaaattatgacaaaatgtcaacggcacaataattgaaaagaagaataccaaaaccaaaagaaaaccctcaagacattaatttgctttgagggttattttttaccatttaaataagatagcacaatatcttttagttcttttcggcacgctaaaaaataaaagaagaactgaactttccttaataaaatccaatcttggagagaataacttctcaatcaacagtagtattaaaagtaatagtatcataattctttaatttcgttatcattatttaatacaatccaatagtcatctgctcctgtatcagtttctacaagagcaagagaaaactcctcacctctaaaaaagtttagtaaatcagattgatattgatttccactatcctctaatatatcatcttctttatcagcccatataatatcatttatactgatactccagaaagaatctttagtgcttgtatctatcaagtactcttcaatatctgaatcgtagcttacatgttctgcaattttagcataaacattttctaattcttctattaatttcataatctaattttataaattcttttacactcgtttaaataattcttcaaattttcacaacactctctaaaatctatatcttcttctaaagaaaatcttttattttcagtttctcgccgaaaaagattaaaaagagaactgtcaatatcctgcaaaatagataaataaattaattctttatctctactctctttaagttgaaacctaagctcaactacttcatcttcacaattcatttttcgccgtttttatattaatatttatttttctaattgtgtatcaatccaagcattccaatagtcccaatcatctccatagactttttcaattattctattatatacttctatctcctcttctatagggttagcaataactttaccactaataaaaaaaggtataggaggtattacaagataatgaaattccgtaagataccctttatctgaaaacttttttaatagttttttccacttatccatattaatatttttccattactactattccgtttatatcatattgtctgcctgctaaagattgagattttaaaatccagccttgagtcatcatttcttttatatattcttcttgacttgttgcacttttaaaatgtttaacgataaaaaattttggagttgctggttttaccgtcattattgatgctgttcctgccgccgttaaaagtataaaacaacagcctaaaataaaatttctcataattatttgtttaaagttaattcttctcccactaaagtaaaatacaaattctgaatctgatgaacatattctactttactattaaaactaaaccatttattctctttattatctctcaaaaataaattcgttttaaatcttctatccaagaaaatagcaatatctccttttaccatagagttgtctaattctttctcaaacccaaaatcctttaaccactgttctgttagtggaattggtttaaaatgcattattttagtatcaataataccttcagacttaatccaatacatttcttttcttttaggtaagttgaagataccttctacttttctaacctctcctaataattctaagtaatttccaatcctaagttcctgtgcttgtatcataattttctttttaatttattttctcccgcaaagataaaactaaaaaacggaataaaaaagaaaaagctccgaaaaattaacttcagagctttatttagaattagtttagattaacgactatgattagctatagaacaattttcagagaacgtaatccatcttatattatttatagtgtaccctttagatgtatctttcctatctatagaaggagatacttttaattcatagtcactatcaacccagttattaaataatttaatatactcttcattatttaaagaccatttataaaaatcttctttactcaatatttctaacccctcatataaatgagatttattttttaggactccttttactcttgacaacatatttctataagttcttacaagtttaccctttaaagttctttcatatacttttgtaactatgttattgttagaatttcttctatctcttgattttttatttgcgcaaactttacaattatattccaatccatctaaattagaagacttcttatgaaaatcttctaattttttagtttctttacaattagtacactctttcatactttaaaaccaataagggaaatggtttttcacattttcactcttttttatattgaaaaacctaaaaccagatttcgtattagagaaattagactttacccaattacttggaggagaaaaagcagggtaattgtaatattgaaaatcagtgcttgtactgtcatcaaaaagccccaaatgggaatctcctttagaaaactcaataaaattaccgtcatataaaccattctctttcaaatagtggtctatctttttagcctgcttatcatctaagtgtggacggaagccaaattttagagattctgaatctttaccatgggtttccagtattgtgtgtttacctatcttaaagtggtctataaattttttctgagttttaactgaaactttatttgaataccgttgttctaaaataccttttacagcttgagctacaaaataactgaaaacgcccgaatgattatcttccactaaaaagttatattgaatttctttatagtcatctactaaagaatctacaagttttaagctaaatgaaacacctaaatcaaaagcttctttatcgttcatattttgaggtaattcatgtccttttctagtagtttgaccacctaaaccatccatgtagtcgcctaaattgcttataatcaacaagttagatttttgataagtttttgtgtgttgaatcattaaatctaatcttctaaataactcttctttgtcccacttaccttcatacaaagggtccccattaccattaacatccatagcaatatgagtatctgtaaacactaatctatcgaaccattcgtcagaaacatgttctaatttttttacttctgattttataggggtaatatattttggtataatttcttccaggtgtttgtctacatcaatagcagcgatttcttcagaagtataaaacactacgttatagaaaggtataccagaatgactaattaatttatagcttctaattttattaacatccaaaccataatgagaacagtattgttctatgttcattagttgcccatcagctccaatagcagtaaaacctttttgtggcttttctttatcgtttgaatagttgttactatctgtaaccgtatcattctccaaatctaaatcaaccttcccactcctaagtagtctgctaagtctatttctatatttttcactgtattcaattcccaattcagcgcaatgtcttcgacacgcttctgtaatgttttgttcttgagtgtagtactctaatgctttttcaattttaaataattccatattttgtttttaagtttttagaacgcagttcctgctgcggcgatttttattgtttacaaatacccaaattccatggcagttatttctcctatatcaaataagtcaccttcaccatcctcgtcctcataaataccacctattttatcatttagactatcccatttttctgcttttattttaaatttttcggcgaattcgtgagcccatctcatagcttgttcagctgtaataagttcttgatttagtgttaccgcttctttaaaagggtctaactcctttattttacttctaaaaaattcttctgctgttatcatactattcctctaatctttttgttaatatttctatttgtcgttttaattcttctttttcagatattttatctttttcttgttgttctaattgttttgctatttcttcttctatccatttttcaattttttcggcggaaaaagataaaagacagataggcacataagaataatcttcattattccaatcctcgtatggtatcccatcttgattgtaaactacaatattttcatcttcaactctaaagctatagtagcctaaaaaagattcaaaacttgtttcgtgatattcagacctcgcacccattagatagatgtatttatcttgttcccacatttcactttgtttagatgataatttgttcattacgtgccataatttttctaaatctaatttcataacttgtgtccgaggataccctgttcgcttgaccctttagggtagggaggaatcggactattcctttttaattaaacatttttttggttctctatatattttttaactgtttcttctgatacgtgacccacagtacctgcgtaataggaacgtgtccataaacaaggtagtcttgattttaattctggaaactcttctcttaatttaaaagaagtatacccttttaattgagatacaattctatggactgaatctttaacagaggcttgtagaaaaatatgaacatggtcttccattgtttccataacttctattttataattaagttctgttgctttttcaagaattagtatttttaaaattttttgaataatatctgtcaaaacttttcttctgtattttgtacaccacactatgtgatattttaattctgattttgttggcatattaaatattttttgcaaatttataataaatatttgtttcctgcaagtatttaatgatttttatttttatcaattttgttttttaatataaaagtattatttttgcactatgaaactaatgaaaacatacaaatttaagttaaatccttctaaagcacaaaaggaaacttttgagtcgtgggttaacacttctcgttttctttataatcttgcattaaatgaacgtataatggtttatgaaatgcgtaaaaaatcagtttcaaaatatgaccaatataatcaattaccagaacttaaaaaactatacccttggataggcgaagtttattcagacactattcaagaagttttagaccgtttagataaaacatatcaaaacttttttagaggtgctgggtttccaaagttttctaaaaagggtgagtataattcttttactttcaaacgctcttttaaagttaatgaaaaaactattaagttacctaaaataggagaagtaaaatattttaattctcgtgacatagttggaaaacaaaaaactgctacaataataaaagaagataataattggtttatttgtataaccgctgaatacgaaacaccatttgaaactattgaggttgataaccaaaatccaatagcttttgatatgggtggagttaggtttttagcattatcaaataatacatttattgattctcctgaatttatgaaaccttttgaaaacgaattaagaatcttacaaagaaaattagctcgtcaaaagaaaggtagtaaatcaagggaagaaactaaacaaaaaattagaaaaatttacaaaaaaatttctaatcaacgtttagattttttacataaagtttctacaaatttatcaaacaaatattccgctttatatatggaagacttgaaattgcaaaaaatgcaacagaatggtttttctaatgtaaataaaatgatgtctgataaaagttttggtaactttaaacttcttttatcttataaattcaaagaacgtggtaagcatttaggtcttgttaatccagcatatacttctcaaacttgtaactcttgtggtactgttgataaaaaatcaagaatgtcccaatcagaatttgtttgtacaagttgtggaacagtagataacagtgacgttaacgcttctaaaaatatacttcgggagggcatctcgaagggtacaaaacgtaaggcattagtctaagcgtgtactcagaatcccatttgcttcagctatgggagttgtcaaacttttgttatatataaattatctacaaattcccctggttctagtttagcatttcgttcaattaagtcaattaacatcccttttgttactaaaacttttctttctatatcttgagcatcttcgtattcagaatctgaccaattaatgttatctagtgtgtatgttatttctatcataaatattttttcttaattacttttgcccaataatctgttgttactttaccttcagcactatggcttgtccaggtgcaagggtgtttttcttttgcttcttttaatctttcttgcggcgattttgatttatctgtgtcaaaatggtaagcgagataacactcccaataatggtcacaatcttccggtctaaaaattaaagcaagttgataaccaaataaaacaaaactccacactggattactctcaaatctatagtctgtgtttgaccatttagttttccatctcaaaccaacaaaatcaaaacctactgatttatcaacaaaataatgacatttcattttttcatcatacaattctgtaaaagatttttcttttcttttatattctggattattcttattaaagtttcttgtagatataatttcttttactgctgcatcaatagctctttgtggagtagctttaactgattttcttggatagaaataaggtgtaccaatcgcagttttacctacatataatttcggcaagaaaaatttaaaaggagaaaaataaacctttaaaaattcaaagtctcttaaaaaccaataaagtttggaatatttatattgcatacttacaaaattttattttaccatcttcttcaatgtactctctaggataccaatctttaataacttcattacaagtcttacacatccaataattatctatcatttcagtaggtctacatttaactttttgagttttctcaatgcactcctctttagctttttgtagctcttcaattagtaaatctattttaggaatcatctcatctaaaacttctaattcagaacatccataaataggttgcacatcaatttctaaatttgcatcaaatgattggaatttagattttccatcatcataaacttttatttctaccatcctgtttcttttttaaaaacgtttaacatgtcttcatctgtataatgaaaaaacttttcagcattttctggcgtatcatttttacgcatccaattgtgaaaagcaatagcaaattcgtgtgttatttgttcaagtttattagctgtttctacttttaaaccgtcaaatggctcgcatagtttttcttttaacatactttactatttaaaattttctctctttcttgaacacttaatttactaaacaaatctaaccactcttctaactgcatttcagaaacaatgtctgtttgattattttctcttttaattactgtatatccgtggtcttcaacaatttcaatgtgttcttctaaatcaactttatgactaaaatcataattaaggtcttccaatgcttcaactaaatcatattcatcacctctgtctacaagatttgcattttccattgcatagtctattacttctctactgtttaaacttcttaatagttcttcagtatcatcatcaataatatactgtatcttttctaattcttctttatcttgcgccgctaaaagttctaaaaaaccttcaacaactgcttcttcatccaaagaaagtttccattcagattggataaactctaatatattttttacttttctattttccactctaccaatcatttaaaaatttatctaattcctcttttgttacaattttagctgtaggtgttctataggcatctacaatagttacagagtacagttcaatatcattataatcgtcataacctaaattaaaataatatgctgtagcatcttgatgcttatttattttattttttatcttcatttttaaaccgtttttactattacacttacattattataacctgcgtcaaaagaaattaaagactgttgaccatactcaacaaccaatctatctattatctctttaaactctccaagtgtaccatcaaagtcacctaattcactaatatcaatttcattttttgttatcataatttttttttgcaaatttattaattcttttttaattcaccaaacttttgaacaagtttttctacaacacactgttgacagtataattttatcttacttttatagtctgttggttgtaatagttttattaaattattcattttcttttttctttaaagctgttgggaaatttaaacccttgttaaacattgtttgagccgttttaaggtaattttcaactccttttgataggtaatcattacttcttattttatcttctattaaagaccacatttcatctgtattaattccataataagcacagagtccagatgctgtgaatgaactggagacaacctggttgtgacctgaatctacaattctatctattaaatgagagattaaattaaaacattgctcaacatcttcctcactaacatcttctggaatttcaatttcaccaacaaacggaacaaaggaattttctttatatcctctaacaacacttcctacagcatcccctctaaatttagcatctgggtcgtaactattatacagaggttgagtgcatctttcattacttaaatctaaattaataaacttatctaaatcgtgagcaattccaaaccatagttgcttataatgttctatacttgtaggtgtttctccaaataaaaatacgaatttacatcctgtttttgacggcgaagaaaatgcaaaaatacaatcttttcttttctcaaatatataatccctaagctcttcgcaatggtctatgttatcatattcaaaaataccaaacggacgaaattcttttattgactcgtaatttctaatagggtcaaaaatagcagacggcgttgtaaagaacagtctctctgcttttaacctatctttctcaactttatcccctcttgcaccagcctcttgaattagtttaaaagattcaatcatctctggtttaggagaaatgatactgttaatcagttgacgcagtgttatgttccccgaaggctttattgtttttatgccgttcttataccattggaaggataaatctaaataattactcataactccctttcaattcttcagctaattcaacaatatattcatttatagtttgctcactccacgagttttgcacaagaagtcctttaaaagctgaaaaatattgctctaaagaaacatctacatttgtaaattcaactgtactgttttgccaatctgtgtttaatgctaatgttgtcatagttcaacttttattttatctgaatttttagttgttaaatgtacactactatctacagtaattttgcttctatttggatttcttttccatttttcgtggcgaattacctgctgtaaatcaaaagcaattctacaagattcgtctacattttcactatatatgccccaactaccgttttgccctattgaattatcttgatagagaatatttcttgctcggtgtaacaaatctttagctttatcttgaattaaattgatataagtaaaatctttattaaacttattgtatagataattttcaaaagtagtatgctctactattctatcaaattgtccaacacctactcttgaatataaatcaagtgcactttgtattacacttaactgttcttctgttatttctaattttgccaaaatcctaattttttacttgtactaaaaatatctaataagtcttgtctggtactttcaaagtccaattcattctctttacaatagttttttaattctttttcagccgattttttattatttttaggcggcgtaaaaatttaaaaacatattcactgttatcccaacatccatcatactctactttttcaaaaaccaaaaccggttcataattaaattctttctcatttttatacaagtcaaataaataaatatctccttctacattactaacttgtctaactgctgttgcttttaatcccatttttattaaattttatttctccatcttttaaatctatcataatcactcaaatacccagtactcctacgctcttgtccctcaattaaaggagctgtagaaccaaataaccacatttcaaaaccttcttgttcttcttgtggaagttcatcaataaatatgtatggtatttcactgccttctatataaacttgtaattctttattcttcgtatccataggttattttataaaacatttcttcatttcttaaattttgttcaactataatttcatcaatagactctacagtaaacccactggtttgacctactaaaagtttatcatcttcaaaaacttctatatcttctaatttaataataccttccattatcataatgttaatctctctcattatataatcagaattagtgtgtagctcaaatccatcttttaaattaacccataatctaatagtttctatttgatatttaggatgtaattggtcaactacacaatcttctggttctattgataatcctgtataaattttaattttcataattttaatatctttgaccacaacttttacattggtcatttatttcacatttaattaacttacaatatcctactgtttcttctccatatttttctaaatcttcttcactattcacttatttcaattttaaaacaatacctatctactctatcagatgctttctttaaagcttcttctttattttcggcgagaatagaaaaattaaaaaaatctttctcatttcctccatcatatctataccaaactgttatattatatgtcttcatattttatattttttaacaaaggtaatatattaacaaatacaagtcaagtatttaacctaatttagaatgattataaacaaacttcaaatctctttttcattttttctaaagtttcttccggaacattgtgttcattaactccaccatgtctattttctacaattagtgagaataccatatatccgtattttttagcaagttcaaaataaggttccatttcccattcttgagtaaatgtatttgatactactattttttcaaatccatcttccattctatgttcagttaatagttgacaccatttatgtgctcttttaacattttctggtttccaaaaatagttaccattttggtcaatatgatacatatctgcctccaaatgaactcctcctaacgattttgctaatgttgattttccagctcctggtgcgcctcgcaaaataaataattctttactcatgtcttccaattgttaatttattttttaatagttgttgtataagttcgtaagaaaatagactgtattctccaaacatattataataagcatcaattccaacatccatacttttatacttatgaatttcttttactaaatgcggctcatctccatggttgtgtccatgaaggaaaaaagaaccgtcctcttgaaaattccaacaaaaatgagggaaatgtgaacagcaaataatctgtttctcgatgtttaattctaaataatcgccaatatataaaagtttatcacattctgataaagcactgtgtaacttacctctattacagtggttgccaaaaagcataataacatttttacatactaaactatctaaaaactgttcatagtttttctctcccatcatagtatctcccataagtactaaaaggtcattctctcgtacaagtttattagtttcaactatgatgtggtcattcatgtgttccacgctatcaaactttcttccaaagtctataactgctttatggtctatgtgaaaatccgaagaaaaataaactttatctacatttaatgtttgttttggaaaactacttaatattttaactttcatatctaaattcttttatgttatttgtatttatcattatttgaactaattcattgtcttctgcaaatttaggatacatatctaactctcctttatttaacatgtcatttaacctgcttcttaattcttgttctttatcttgtaaatactcttttgagggtaaattaactcctgaataattcttatgaagctgttgaattttttctactgttggtaattctccatctattaattcatctgccatgtacaaacttctcaaagcatgaaatttctttttatctgaatttccgtgaagttttaaatccctttttactactccaatataagcttttataattttgtaagttcggcataaaaataaagaattttcaaaattaccacttaatattacaatgtcggctatcatattacaatctcctgaaaataaattatggtagaattgtttctctgtcatccaaacatattgggtattatcatctccatcatactgccatgaatggatattaggtaaatatctcgccaaagaagtaaaagacagatagaaatcatcagaaataacccttacatagtcaaagtcactattttcattagcaataccatgcaactggctaccaaataaatattctttgaaagatagcgtacataaatattcatgttgttcttttgttattttataattcataatcttctatattctggtttaatcaatctatatatttgctcatctattcttttaccatttcttagagaaaataataggtgtttgtatttatagtcttttataacttctgcaaaatctttatctaaatctactttacctatttccaaatacttttcccaagcttcatcttcaatttctttaaatttatatattaagtgcatttcatattctgaaatcgcatcaaaatattcatctggaacatcttttaaaatctctaaaatactatctccgttttttaagcatccccaaacagcagttgttgacatttcagacattaatttatgtaatcttaaatattcagctccttttattttacatctttctccgtttgaaaatctaactacataaccctcttcgttatcttttatatcctcatgtaagttttctaaagaagcgtcttttttatgaacctttgcgtgaggaagtaaccaacagtttattggttgctcttctcctgtttcagttttaaaaactcctgttaaaattacatcttcatagtctccataatctactacaattctgttttctttaaaaattatttcaaaacaatatgtgttatttttatctaaagatttatagtcatactttgaaagtaattcaaatccttttgcagcttgttcagaagtaaaagaacctcttgatgcaaatacccattcgccgccaaaaaagaataaaatacctaaagaaccgtcatacttagtatatatctcatagtcattagtaacaacagttttagcttcagataaattaaaaaactttttgaaaggtctagctacaacattacctaaatcatcaaccactaaacctcttgtagacaatgttacatcatcccaaagattttcccattgaactttatcagtatagttgtagattgttaaaggtaaagttggatgtacctgtgaataaagtaacccgtcttctacgtatttgtttaagatatctttcatagtttattcaattacccattttaaatggtgtattatatcattccaataatcagcttcttcttttctgttttgttgtataagaagctcctggtctcttttaattattttaatctcttcttctatttgctcttttgttttcatagtttttcgccacataaaaagttaataacactgcaaagatatagctaaatatttaattaaaaaagaaaaaggtagaaaagtttaactctctacctttatttgtattgattctaaattagtgatgatttcttcaatgggtaaatcaagagtgaaacattctgtatgtcctttaaaatatgtattagatttgtatttatattctttatatcgattatgtaattcttgctctaaagatgcgactttaaaaagagatgttgataatttgtatattacagaagctttgtattgttttcctgaatcgtaaaatataccctgtattcgttttttaatatatctggaaatacctatcttatagaaagtttcttcatctttttctaatttcataatatataaatcacaaggtatattttttgtatcttcaactgtaatataatccttaatgtttgaggttattatagaacacacaggacaacccgcagaactatctatgtgcgtattaggtctttgaaaaaatgacccatgatgtttacaaataatctctacattctttctgttattaatgtagtctacctttgaatagtcatagtaatcaccatgtattaatttggctttttctataaactgttctgtgtttgactgattccacggaatcattttagcacacttccaacatttcttaccacgtagatgtttttgagcgttttgttctagatttccatgtaatggacaaatatattttattttagaatttgtgtttttataatcagataagtcataaattaaattattgttaaattctttaaatcttttcagcatatcttcttttgatatactatagtcaacccctcttttttcgtaagaacatttttcacaatcacttcctctcatgtgagagtgtccattctgtttaaattttccgtgtgttgggcaaataatagttaaatgttcatttaattgtttataatcttctattaaagaataatcaaacttgaaattatgaatttgattacttttattaataaaatcttctttacttgttctgtttaaatctcctctaacctccaatccacatttaggacaattatcacccctgcgtatatgagcagaagggttttgttcaaatattccatgagtagaacagataattttaactttagtgttattgtttacataatcaacaatagaataatcatacctatctccatgcttttctatagctcttttaataaattcttctgttgttaatcttatgtttttagttagttttattacatcaattttataataatttaataattcccccatccttttatcaggaatattaaagtgtttacataagttggttatacagaatttgaagtttttatctttttttaattttaaaattacttcttttgggactaattttacccatttactatttttcatttttgacttataaatgcgaaaaagcctgaacaacggtgatacgagcacacattgaacagacttttccaaaaaattataaatattttaaatataaactaggctcgtatttctaatttactttgcaaagatataaaaagattttgaattatccaaatagtttaactaaattttaacttttgatggtttaatttcagcaggaactccatatttttcaatcaaccaatcttttttatagaggtcaaattgacgctgagttggaattttatccaagcaatattttttataattttcatattctttttcaagtttagctttttcacgagcttctttacgttcttgttctaatctttcttccgtgccgtctattttatgtataattttgtaacattcattaacataatagtcataattaatattatattcttcaaaaggaacttcgtaatatttattaaaaattgtcactaaagtaccaccagcctcaatttcaatagttctttcctcttttaatttacggaaagttttaccgttgttagaaatataatatctgttagttttctgttgtgtttcagtattgccttctgaatcaaccgtttcacacttccatccgtgtgtagcgttaaacgttttacaaaataaataaatatctttactttctttaattgtctgttctacgggaattcctttaagaaaataatccgcaacagctaaagaaacaatcccttgacttaaagatttatgatattctccatctttaatcatttcgtgattaggtttaaaagtacctttatatt

SEQ ID NO: 128 - DNA, 22001 bp, unidentified
  misc_feature 1..22001: note = Fanzor polypeptide
  variation 2646..2701: note = n is any nucleotide
  source 1..22001: mol_type = other DNA
cccctctccctcccttgtacgcgaatcgtgcgcgtgattgtgtggcacacagacgctcgcagctgggcggaagccaagatgctccggcgacgtcgtcatcgaggtgcgctctcaccaccaaccacaaaccacgaatccaggatcggcgcgggagggggcaggcgagggctggagggggcgggcgccgagcatggtggttccccgaagctcatccaattcgtaaccccgcccaatctatggtgtgtgtgctctacagcagcggcggaccggtcgccgcggtcgccaaggccgagacctcgcggaggaagaccatcgccggagcctcctcctatttccgcggtaccgcacctcacctcttcctcgttcacgttgtgacacacgcacacgcaccaccgcacacgcacacgcaccaccgcacacgcacacgcatgaccaacgactaacgacaattggctgcgacgcgaagtcaactcggagagcgacatgaaggtgctgctcaagatcacgcaggagaagttcaagaacgaggtcctcaccaacaagcacctcaaaacccacggcgacatcgtactcaagaacccctacaagcaaggtaaacaacatgtttatatttcggatatattatacatatgtttctatagatgtatgtttatatgtatgcacatgtttatatatatacactcatagtaatgtcgtgtgtgtgttgtgttgtgttgtgttgtgttgtgttgtgttgtgttgtgttgtgtgaattgtgtaacgtgtgtgcgtgcacggcagtgccggcgccatcgcctccgcgaccattgcccaaggacaccggcacggagaacatgaccctgggtatatatctctccgaacgcgacacgacacacgacacacgacacacgacacattcaccgaagtgctgtgaacaaccaaaccaaccataacgttgcgttggtcgtcgcagacgagatcatcaacgacagcaacccgtacgagatcttcgcaaatgtacagcacatcggtggcgggtacgttgcaaaaataactaaaacatatctcatataagatatcgaatatctaattagatagtatattgtagatagtagatatcaaaatgttatctgatatctaaatacgacacacacacacacaccacacacacacacacacacgatgtggggtcggttgggcgagagagcagagggttctcgcaggtctactgcgcggtgatgaaggagagcgggcagaaggtggcgatcaagaagatgtcgctggacgagtggtacgagcaggatctgctggtggagatcgtcatgatgaaggtcagcaaacaccacaacatcgtctcctacatcgacacctaccgcgacgaccgcaactacctctgggtccgcctcccccccatctccctgtcgtgtgtgtcgtgtgtgtcgtgtgtgtcgtgtgtgtcgtgtgtgtcgtgtgtgtcgtgtgtcgttgtgtcgttgtgtgtgttgctgatcgtgtgcgtgtgcggtggtgcgttgtggcaggtggtgatggagttcatggaggaggggagcttggagaaggtgatcgacgcgttcccgcgcatcaagatgaccgaaaagcagatcgcctacgtctgcttcgaggcacgcccccgcccgcccccgcccccagctctctcgttcgctaacgcgtgtcgttggtcgtgtcgttggtcgtgtcgttggtcgtgtcgttggtcgtgtcgttggtcgtgtcgttggtcgtgtcgttggtcgtgtcgtgtcgtgtcgtgtcgtgggaaacaccagatattgaaggcgctcgagtacatccacgggctgcaccgcattcaccgggacatcaaggtgcgtaggggtcatcgaccactcccccctgcaagaactgtctgctgacctgggtcgacacacacacacacacacacacacacacacacacacacacacacacacacacacacacacacacatttattgtcatgaacgaacgacatcacgatcgtgggtcagtccgggaacgtgctcatcgggtccaagggcgagatcaagctcggtgccgccccgccgctctctcttctttctttgccgccgccttcccccgaaagctaatttgatccattcgcgcgtgtgtgcgtgtgtgcgtgtgcgtgtgcgtgcgtgtgtgcgtgtgcgtgtgtgcgtgtgcgtgtgcgcgtgtgtatgcgtgtcgtggtgtcggccattcaacgggagcagcggatttcgggttcgccgtgcagctgacggaggggaagcggaagcggaacagttccgtgggcaccgtctactgggtacgccctccccccccagtcctcacgatacacacgacacacacgacacgcgggccggctaacgcgttctgctgctgctgctgctgctcccactcgacgtcgaccaatcaatcgcgcaatgcaggaggcgcccgaagtgatcagcggagacaactacgacacgaaagtggtgcgcgcgccctcactcggccacacacacacacacacacgtgctccaggtactccaccacgcacacgcacacgcacacgcacacgcgcacgcacacgcaaccaacgacacgacacactgtacagttcatctatcagggccacgtcacaattgccgaggacaacgtaatccnnnnnnnnnnnnnnnnnnnnnnnnnnnnnnnnnnnnnnnnnnnnnnnnnnnnnnnntatgttgtgtgtaaacgtgttctctctctctcgttgttgcacaacaggatatctggtcgctgggcatattggcgcgtgagatggccgagggcgatgccccgtattttgagctgccccaaatggccgtacgttcccccgtccacccacacgacacagacgaccaacgacacgacacacacgacacacacgacacacacgacacacgaccaacgactcgacacacacgacacgacacgacacgcttctatcgctcacgacacgaccaacgacgcgtgtggtggcgcaggcgctacaacggatcttcagcgagggcattccgccgctgaaggaccccgatcgctggtcggccgccttccagcacttccaggagctgtgcttctaccgcgagcccgagaagaggccctcggccaacgagctcctccgcgtacgttttcttcgcccccttccgcccccttccccttttgcgtcgtgtgtcgtgttgtgtgctgtcgactgactggcgtgcccgacgcgacaatacacacacacacacacacacgcacacacacacacacacacacacgcacacacacacacacacacacacacacacacacacacacacacacacacacaacacagcatccgctgttctacaacctggcgccggagtcgctcgaggtggtggacctgatgcgacgcgccaagcagctggagcccggccgcaagggctcctccgccaggaggcgaagccaaaagcacggcagcgcccgcgactcaagctgagccccagcagccgccgccgcaccagccgctcccgacacggtcgcgctgtgtcgcacaacaagaatataataatttagtaaaaacgatttactatttctgtcagcagtcccgcatccagcacttcgaaactgtttgccaaattcagctttcaaacccaaacccaaaccgaaataataaggaagggcgagggtaactggttgacgccgcgtcgggccagccaccaatggcggttctcgtgcgggccgccgtcggggatgcaggccaatagggcgtcgaggccgaccgggtttcggccgaaatactcctcctccctctcgaccgccgccacgcgcgcattccagccgagcgtcgtcgtcgtcgtcgtggtttttgtcgtcgcctgttgtggtggagtcgccgacgtcgtggaattgaggcattggtgcagctgggtgaggaattcgaagtaggccatgtggtccaggtgctgcaggtgggcgctcatgaaagcgcgcctcagctcccggtggtcgaggcggaaggacttgtccagcactgttatgttctgtttctccaccgccagaaactgatcaccacacacatcgtcgtttctgccatgtgtgtcgtgtgccgtgtgtcgtgccgtgtgtgtcgtgtgtcgtgtgtcgtgtgtcgtgtgagcggtacctggtgcatcatgaagtagacgtaggccatggggtacggcatgtcgtcgttggtgcggaagctgtgggaggaggtgcgttggaattcctccggccagcgggcctcgaggtcgcgcgcgatgcgcctgtcgatcgtgtgcggtacatgcgatacaacctgaccacatatatgcacatttggaccttgtatggaatatatatataaatatataacaatatattcatattgataatatgtttacaaaatgaaaaggaaggaaaaaacatgccttgcgagccaggttcccgaatgtacggtcgtacaaccgatccaccgtggccagcctctcggaccagtggttccaggagttctctatagcccacgcgtccaagtacacctgggaagagagacgggttacatcaatatatctgtatagatatgtgtgtgaatatatttatggggtgccatttggccattgacgggcgagtaaaagtcgtcgagggtgacgggcgagctgaggaagacgtcgtcgttgaagtagacgaacctggccgacaggccgcgaatgcggtgaaggtggcattcgatggcgctcgaggaaaacgtgggcaggtgcgacttgttggcgaatatctcctcgtgcctcaccactctggttgtgtggcacaaccacaaccacaaccccacaacatcaacatcaacaacaacaacatcaccaaccacattggcgtcttcacaggcatatatctaactaaactaataaacaactcataactaataaccaaaaactaatgaaatatacaaaactaaacagatgatggggcgagcgaagacttgcctgatgcgagggtgggcgaggttgagccagtaggggatctggccgttggtcacgatgaagatgttgcgcacccacggcgcgtgcttctccaccgatcgcagcgaataccgcaactcctgcgctcgccacgcccacacacatgcatgcatgcatgcacgtgggacaccatcagccacgcgtggctgctcctctgtctctcatcggcatcgtacctccatgtcaaagacgcggttgagaccgttggggtccattggctggtccgcagccgccggctgctccattccgcctatccacgacacacgacacgcacaacacaccacacgcacaacacaccacacgcacgacacacacgacacaaaggtgtcaggcgggaaaacgggatgcgtgaggattgtgcggcacacgacgcaccgtgggcggcgtcgaagagggcgcgtgcggccagcatggcctcgcggaagagcggatcggagccgttgacccaggagtagaccaggtccaccgccgcctcgtcctcaacagaggagctctcaacagcatcattggggggttgctcaggggctgctgctgctgctgctgctgcagatgcaagtgacaacggcggcggtggtgatggtggcggcggtggtggtaatgatggtggctcgtggtggagctcggccagaagtagcacctggggcgaagaagaggtggtggtgacccattgaagcagaaggggaaggtgcagcgccaggaacaggagcgcgaccacacagcagggcgagcgccaagaaacaagaaatgccattatagtgtcgatttcatcatcaccatcgacgccttgctgctgcttccagtgtgcggactttcacctgaccatatttggcaagaagtgcaagaaaatccccaaaaaaaaaagccggcattgtgtcttgtggccgggtcgacgctggtgaggcggatgtaggaggagaagacgatggcggccgagaggcccacgacgatgttgcccgcgcactgggtggaggccttggtctgcgaggtgcgcagggagaccacctcgacatcgggcgcgccgttggtgaaggtcgagcccggcgcgatggccacgggcagggcgaagggcggggcgtgggcgacaccgagggcgacggcctcaatgtctgcgcggtgctgctggtcgccctgggcgacgaccagatggtgggactgatcgagatccacgccgtcggcgaccttgagctggacacgatctgcgctcgtgacaccgaggtggccgccgggggcgtgagcgacaccgacgcagaggccgaaggtgtgagcgacacagaggcggtgagtgaaggcgtgagcgacaccaatgcggaggccgatgtcgtgagcgacgccgggagacgccgagcagagaccgaaggagaccgacgcttaggggctgaccgacggcgtgagcgacacagagaccgactgcgtgagcgacatcggggcagaggcggatgaggaaggcgattgtgtgggcgacggggaggccgagctcgacagagaggccgttggcgaggccgtgctgctcggcgatggcgacggcgactgcgacgggctcgaagatggcgacggcgaccgcgccggagtgatggaggcctgtgagcccgagggcgagggcgtggcagacctggtggacgttatggaggatgtcaccgatgcgctgggcgttctggagggcgacggcgtcatggagggaggccgacagaaggcgacccgcactgaatacatattttcgtgatttagtttaaacaacagaaacaatgcaaacaatgtaaacaatgtgtaccgggaacgaaattaattaatttatagtcaatttatttttaactgtacaagttgcgaaccaccgccaaaacaaacactgccgcctacgacgaagaagaagacgacgacgaagaggtggaggtggtggcgatggagggaacgatgaggcaggcggccgttgtgtggtccatcttgcccgggaactggcggtagtccgtcggctggcgcgcctgcgggctgtgctccatgaactcgcggcacacgcgcgtcgtcgcgtagcagtggtccaccagccgcgtcgtgatcgcgcgcggcgtgagcggcccggcctcgagcagctgctgcagcgccgccgccctgaaccggtccttcgccacctccacctccaccgactcaccaccgccgagcgccgcctgcgcgtccgactcccacgcgtcgtctttgagctcgagcccgacctcgctcggcaggcggcccagcatctgcgggtcaaagttgtcgtggacgccgtccgagacgagcagcagcacgtcgcccggctcgcagggcatgaagtagagcttcaggttgcgcaggtcgggcgcgccgccctcgagatagggacccagccggccgcccgggtcgcgcacgtcggtcacgttcatccggttgcccgccgtaatgtccgtcacctcgccaccgccgcccttgccgccccgcgccggcgcgtagtggaaggccttgcagtcgcccacgctgcagcacacaaagccccactgcgaagattcctcgcattcctcgccatggtcaccggcattcttggcattcttggacgagtgcggcgcgagctggaggaggaggccgccgatgagggtggtggtgccggcctcccaggtgtcgcccttgccctgcatgatgcggcggtcggcctcggcgaaggcgcgcagaaggtagtgggcggcctcgtggaggtcgggcacgacggcgtcgcggccgcagcggcgggtgaggtagtcgcgcagggcggcgacggcggagcgggcggcgtcgcgcgggcggtggccccagttgcagccgtcggccagcgccacgaaggcgcggttggcgtagagccgcacccacgcgcaatcggcgttggggtcgccgtcgcgctggcccgtgggcagcagcgggtaggtactgagcgaccgcgcgctggcccagacggcgccgttgtcggcgttgtcagcgtcggcgtcccaggcgaggccgccgccgtcgtgcgtgggaacggcggcctcgtcgcgcgtctcccagagcacctcggactcgtgatgatcgtcatcgtgagaatcttcttgatgacgatgatgacgacgatgatgattgtcgccattgtcgctactcgcgccgccgcggccgctggggtggttgaccacggcgtaattgggcagctcgcgccaccaatcgacgcgcgtagcggtgacgaggcccgccgagcggctcctccccgcgcctatggtggatcccttcttcttcatctccatcaatagagatcgatcgttcgtgtgggattctatagtgctggccggtatgaattcgattcgattgggctcgccggtatggatgggggctcgtcgaatcttcttcttcttcttcttcttctgcttcttctgtgttgatgatgatcttagctgcgaccgccagtgagagggattcgccgcaggtcctcttcctacaagtcgaacgaaatgtggaagttcgatttgttctcgtcgctggacaatgcccccaccctggcccaaaagaaaaccatggttggaaatgccagaagaaactcaagcgtaatttattcgtcaatttaaagtgctggtgggccacgtggggaacagtcatttttaaccaactcagagaggggtccctcccaaattgagctattccaaacgctggttggcctacgcggacagcctcgatgtgggctcaaaagcgacctcactttgcgctcttctctggtggagacgtcccgccgcagccgtcgtcagttgcgcccggatcgccgcaccatcagcccccgccatccattcagttcctcacctctcgaaccggttgttgttgctgttggaatgaaacattctttttcacaatctcaccacggcttcggccatgcgcgcccaacaggccaatcgccgaccgaatcgcccacgccctcgtcctcgaagtcgccctcgccctcgcgctcgccctcgacctcgacctcggtgtcgcgctcgccctcggcctcgctgtcgcccacgcctcgacctcgaagtcgccctcgccctcggtgtcgcccacgccctcaccgtcggcgtcgccctcgacctcggtgtcgcccacgccctcgactcttagctgggcctgccccgccgggtagttcatggccgagcccgttggctccaaagccgcgcgctgctaccggcgcttcaacatctacagcggcgactggggcggacaaccgagctggttccgtagtgaaagcaacgcgggctgctcaacgactacccgtgctttggccgactggcggctgtttgcatgaaggaggccacgcttgcctgagcagctgctgcgttcatgatcattacaaagatgtaccaagaacatgaccaaggagagccaaataaagaaaaagaagaatgatggatgacggtgatggtgatgacttacttaaccaacacgtgatgagagtgtagaaggccagggcatactaaaacaaaccatcacagacctttccaactgtgtggaacattcctctaggccctcatcagcaactccatcaaccattcgagtcctaaacattactgggcagtcccaacaaaaaccagataaataaataaacgagttttcgtagacagccattggaccgaccaaaacctacacgtagcatcaggcgtggctttaaatagtcagcacctcgcaaagaaacacaacactttgcaccaaactgagtcacagacagacacctatgcaatgccctctgggcgagaccaatgaacgcccgtggctccaaattccgtgcaacactgcaatcatcaggcaccagacccgccagctcattgaggctggtggagacacctacgtgccatcaagcgaggccaccaaatactttggcgtgacagcagcctgcctgtgcaagttggccgatcggggcaacctgcacacacgccacattggtgacaagggcaagcggctctaccactgcagtgacctcctctctcaattccccacagtcatgtgctccaaggatggatgcaccatccagaccacaatgaggccaccccacaagtgcatcgcctacaccagggtctcaagcaagaagcagtggcccaacctcaagcgccaaattgccaagctccaacgcctctgccccaaccacaagatcatctctgaagtggctagtggcctcaacttctggcgcaagggtctctgcaccattctggaccaatgctttgcaggcctggtcaatgaggttgctgtgctgcaccaagaccaactcgctcactttgccatggagctgctggagcacatgtttaagtgccacaacgtctggcttgtggtggttggccagggcgatccagctgtggccaccactctcaacgccctcaatccacagtgcaagctggccaatgacctcattgccatcaccaccttctttgtggcgcaacaaaatggcctccactctgcagcgcattgaagagcacaccacaatcgagcagccctggaggaaggctgaggaagcacaacaagcaagccttctgaggaagaaagcaaggaacaaggcggcagcaaggaaagcgaacaagatgagacagatggcagcagcagcagcagcagcaacaacagtggtgggaggcgaaaaaggcaaaggacaagtaggtggcggcagcagagggaagtggaagtggaagggaccacccagtgctgaggggggtggtgatggggagggtgggatggtggctttcaatggtaagatgcggaagatatgcgtctttccaatggcccaacagaagacgctcctcaagtgctggattggcactgtgcgctggacctacaaccagtgcgttgctgtggtgtgcagatggcagtgcgcgccaaccaagaaggcactgcgcgctcactttgtgactgagtttggcctgcgagaggtggaacagatcaaacgcgccaagagtggggttggcagtggtggcaacaacaacaacgttggtatctcgtgggtgttcaagacaccccatgacctctgcaaccaggctgtgggccagttcgttacggcctacaagaacgcggtccaggcacatgggtggggcaagtttgacatcgccttttggttggccaagcgcctgcagcaggagatggtggtcattcgctcgagggactggaaccggacccgaggcgagtacgcgccgatctttggcaacaccatgcttcgctcgagcgagtcgctcccggccaagatggaccacgagttccaggtcacgcgcaccaagctcgggtggtactacatctccataccagtgccactggatgtgaagcatccgatacagcaacagcagcccgatgcggtgggagggggtgataaccaagcccctgccgtcgcgccacacgctgctgccgcgatcgatccgggcgtgcggacgcccttcatggtctatagccccgacgaggcgcgtgtctacgagctgggtgccaacgactttgggcgcatcaggcgactgtgccaccacctcgacgatcttgtcagccgcatgaccgaccgcgacgttagaaagaagcggcgccgccggatgcgtcgggccgctgcgcgtatgcgccggcgcatacgcgacctggtcgacgacctccattggcgggcggccaagtggctgtgcgagacttttgagaccatcatctacccgcactacgagaccagcaacatggtcgtcgggaagagcaagcggcgcgggctgcactccaagaccgtgcgtgcaatgctcacctggtcgcacttttggttcaagcagcacctgctccacaagatccgcgagtacccgtcgggatgccgcgtggtgctggtcgacgagtcctacacgtccaagacatgtggcgggtgtgggcggatcaaccacggcctgggcaagagcaagctcttctggtgcgagcagtgcggtttccgcacggaccgggactggaacggcgcgcgcaacatctggctcaagttcctcacggaatggtgcaacggcagcagccgcggcaacgacgatgacgacaaggagcagcagcagcagcagcagcaataagcgtccgaggcaaaggcggtggacggccgatcctctggactttggggcttacacccctccgccgagcgaaccaaaaaccgctcggtggtgcatggatctggtgcaggacgaccgcaggcatgcccgcgtgaagctttgtattaggtttaaatttaagcgacctcaacaaggagctatagtaggacaacaagcagcaatataggaaaaaaaaataaaaaattgcgtaaatgttggtgtttcacagccttgtcgtgagcgtgctcaaccatactcgcctgcactgccacaaaatcattttcgttctgtttaattttcaaaaagcgcaaaaaacgatcttgtttcttttcttcgttaccctgtcacctttaccttttatggttcgttccaccggttttggtgtgaaaaacgcaggccagcttctttggcgcgcacaacaagggcgccaccccgcatcgcaagatgaagcagctcctccgttacaggcccgcctctcttgtgctcttcttctgtgctcttggcctgacgctcttcggtggtggggtcagtggcaccacctcccgaagcccgccaattcgacttcaagcaccccctcctcgcctcctgtctgggtctgccccgccgggtggttcatggccgagcccgtcggagccaacgccgcgcgctgctaccggcgcttcaacatcctgaccgacggcggcggcggacaacagagccagttccgttccgggagcaacgactcgagtagctgcgcgtcagatggcgcgcgcctggccaccttcagctcctacgccgagttctacgcggctggtctggcctgcaacgactcgtccgatgcgagcaacgcggccaagtactacgagcccggctgctgggtggacggcgccagcgccgccccgaccaccagcagacaggcttgggactgggccacgcccgacatccccgagaccaacgccttcctggtcggagcggagagggacaacctgtggagcggaggtgagccgtcgggcaattggtgggagaaccacgcctaccccgagcagtgcatgcagcttttgctcaacgggctgctcaacgactacccgtgctttggcctactggcggctgtctgcatgaaggaggccacgcttgccacctgataatgacccagtatatatcaaggataattctcgtaataacactaataaaataagaatagaaatacaacaactcacatgatgaagcctagcagccctgcacctcacaaacgaacgaattaacgaacccaaggacgagaagatttgcagcttcatcaacaccatcaacagcgtcctcctcaacggcagtacgtctcccatgcatgtgcgtgtgcgtgtgcgtgtgcgtgtgcgtgtgcgtgtgcgtgtgcgtgtgcgtgtgcgtgtgcgaggggcctgacaggcaagggcatgtgaatgggggtgggggtgttgtgtgccaccatgtgccatcaacccggggagcagaagcagcagctccagcgcctgtcgtcgtcgatggcactctcctccccgacgtcgaaccgatgcagtgccttgctccacctgtggcacgaccagcgcaacacggcgtcatcgtggtcgaaccgtcggacctcgctgtcgacgcgtgcggcgtgtgcggcggcgacaactcgaagtgcagcgattgcctgggcgtgccgcatggtgcggccctgttggacgcgtgcgtcatggtgcgccgatccaactggaggttgcggggtcgtgccaaccaccaagcctgaagatcgtgtcggccttgacgcggcggcactgtgaggctggccatcatgcctgatttgtggaatgtacggggtacccgtgaagatggtggtgtcgaggtcggcaccagcgctggagaccccctttcaggatggcggcacacttgtcgggtgagagtgggccgtgggggcgttccaccagcgccagtgtgtgtgtgaatggaccaccagtgggcagctgcacctcatcttcatggagctcccagtcagttccccttaccaagccttgttacttttcctttgcagggaaggttgcaaaagtctttcttcttactcgttactgttgcgagttacatgtcattggtaggggtggcgtcattcctctgccgggctctctggcacagcgcaaccacacctgcagccaagagcgctgcgagggtgaagctgcccaccagggcgaggccgatcactgccgcgtggtacctccccgccgtcgccgtcgccggctgcggctgctgctcctcgtcgtcgtgggcgtgcacagtgcaggcgaaggcgaactcgaccgtgaaggtggtgttgatgaggtggctcctggacaccacgcggtaggagcccggcgtgagcaccggcccagcgacggccactgtgccgcggtcgagcatcacgtcgggcatgggctgcggcccagtgatggagatcacgtggttgaacaggtcgcggttctcgagcaccaccacgtcgcccaccgccagccgctggcccgcgaggcgccacgtccgcgcgtccacggtctgcgactccaccaggcgcagcaggtgcctggtcggcgcgctcctgtaggcgccggtgcgcggcgccacgcgggtgaccaccgccgggtccgtcgcggcgtggaagtgggtggtctcgaaccacgcgtgcacgtcgtccttggcctccatcacctcgcagcagtggtcgtacgccgcgcggttgttcgcgtcgtcggcgtcggcgtcggcatagacgcagcgatcgcacctgtccctgatcttgcgattgaagcgcacgctgaaccggaccgatacggccgagctttcggccgattggagcacgtactcgcctggcccggtgacgaacaccctgaggctgttacccggaagcaacctggggtactgggcaacgatcttgaacgatgacgacgggctgtcggccggccgcccaaagagccggaacgtgtagccgttgttgtcgtgcaggttggtgacgagcagggtctcgccggcgtcgagcgcgccgatgggcaggagcaccgggccgaagtcgcggatgacgacggtggcctgggcgaagggcaggaagcagcacgtcgtgttgtcgccgccgcacacgccgcacaggtcgtgcaccgcgcccgagttgggcacgccgtcgcagccggcgcactgggagttgtcgccgccgcacacgaagcacttgtcgagcttctcgcgctcacacacgcacgccctatcgcagcggtcccccccgttccacattccacattccacacattcagcacattaattaattagttgagttattgctgggaggtggggcgttgtcgtacgggtcggtggggaggcgcccgccgaagcactggccggcgcagtccttggcggcgttgaactcgcgcccggtggtgcccagcacgcactcgccgcactcgtccaccacggccttgccgccgcacacgcccgcgcagtccatatcgccccccacacactctgccactgctggcagctgccaacgtaatacgtattatgttctaagtaaataaattaatactacaaatactataatcatttgtaattaaataaaaatggcgtaacgtaccgagcgtcgggtggcgcacgaggagccgtcaccgccgcacacgccgcactcgtccacctcgagctccgacggcgcgaccagcaccacgccgtggaccgccgggttgttgtagtcgtgccacaggtagaggcccgggctgagaaaccggtgcggcatgctcgccgcgcccggcgccagcaccgccgagagctcttgcaggctggccatgatcggcgcgaagcggtagagccccgggtacaagtacccggcgtcgggcgacggccggttgaggcaggtcaggtcggaacacgccgccgacgacgacgaccggcggcagaggcagcgaacagcagcggcgacgggcgatgcggagctctgctgctccttcccgtaccgcacggccgggtcgaaggccaatcgcctcgcctcctccgcgggaaggagcacgccggtggcgttggccagcgatgacggggaaccgagccgccgcttccgttcgacgagcttcgccaccaccgacacgcgcagcgagcgctccacggcggcgtcatgacgtgggcgaccgaggacctccttgccgtcgtcttcgaccatcgtcgtcgtcgtcgtcgtgttgtcatccgtctcctcctcctcctcctcctgtgcgcagcacacgccgcccatcacgaattcctcctcataggtgcccaagtcccgagccgcctgttggctgcgccggcggacttcaaacgaggcaccgcccgagggccgagtcgtcctcctgtgcgtgcgtgcgtgcgtgcgtgcgtgcgtgcggccgtgggttcgttgcatgtcagttggtgtcccataggagataataattatgaaatataatgataacgacagttcgtaccagccagggaacaggtcagcggtgtcctggttctgctgtgactcagcgcccgactggccgccttcgccgccggtggatcggcggcggagataggccgacttggagtcggtcgcgggcggttcaacggcgccggaaggcgttggccgctccaccacatctttgatgcgcatcatcgacaaatagttctgctcgcaacaacacacatgcacacacacgaacacataaacacaaggacgttagttcgaactaacatgcgcgggggaacggaacgccgggtccaaggaaaaagtgcgcggatagccaccttaaggaaagcgtcgagggcgtcatcgtcgggcaggtcgcccggctgcggctcgagggcgtggccctgctgggtggccaggcgcgacagatcgaccgcgggcgcgccctggtagtcgtaggccccgcccacgacctccacgttccggtcaagcaggttctcccacaccacgaggtcgcccacgcgcgcccgcgtcaccatcgacgaccacgatgacgacgacccaccgttgtcgatgctgttgtggtggtggtcgatgcgcacgtagtgccactgggcatgcgccggcttgggaatgcagcacgtcgatccgtcgccgccgcacacgccgcacgcgtccaccgccttgcccgacagcgccaccccgtcgcacccgccgcacgtcccgttgttcccgccgcacaccccgcacgcgtccacgcgcccgtagcacgccacgctcaccgtctgcgccacgtgcgagatcacgttggccgcctccgtcgagaagcccgagtgcaggatgacggcgtgcagctcctgcttgccgaacagcgcccggttgcgcgtgtcccagaagagcttgacctcgtagcgcgtcgtcgtcgtcgtcgagcccatcacgcgcggcaccagcaccgtgccgatcaaccggccgcccgcctggctgcccacgccgccgccgtgccacagctgcacgagcacgttggcccgcgtgaaggtgtcgcccagcaccgtcgccttcacctggtacccgatcgtgagcccgctcccgtcgctcgccatcaccgcgctcagtccgatggtggggtcgagccgcagggtctggagcgtgtagccgctgttggccatgtcgtggaacaggaggctgtaggcgtggttgttgtcctcgtgcatctcgtcgagctcgtcgttgtcgtcgatcgtcgcgtggatgttctgcacgccgtcgaagaggaacaggaaccacacctcgcgcttgccctggcccgggatcagccccacctcctcgatgccgactgcatttggtgtggcacacgcaacacaccacacacgcacacgaccaacgaccaacgacacgcacacgacacgaccaacgacacgacacgcgctgagtgagaccctaggagtgagaaaaggagcaatggtttgcggggggggggggtactgagggcgttgtcgtcgagcaggcacgcctcgtcgaggcagttgtcgggactcccgcgccacagcgccacgcgcacgttgcgcgcgtccacgagcgccttgttgcgcaccgtcaccgccacctcgaccacctcgccctcgcgcggcaccgccggcgtcgccaccatctccttggtcagcatcgtgcggtcgcgcttgaacgtggtccaccaccagggcaggttgaacgccgggtccggcttgctgtaggtgcgctcccaccacgtggacacgcccgggtagtagcccggctcggccgtgtagtccaccttgaggtactcgcggccgtcgggcgcgcgcgccatccacacgaagggctgcacgcggtaggcgtgctccgggttgatgggctccacgtagcactgcaccgacacgtcgcgctcgatcgccgccttctgcacggcggcctcgtcgccggcctctgtttcctccttgctgttcgcgtaggccgcgtggacatgaacaccgatgggcaggctgagctgcggtcctacgcccatgaacgccatcgaagcctggtaggcggccatcgcgaccaacgggggtgcacccaagtaagtgggatcagtttcgctcgatccatcgctctacaaattgggccaaaacaagggagggagggaaagtgaactgttttgtaccgtggtaccgaattgcacgtcgacgccaacaccaaaggagttcgtagtcgcaccagcggtgtggtcgagcgcgatcttcttctcggatttgcccgtgctctgcgacaccgattgctattgcgtacatttttgttgtgtgtgattggtgcatcaagtaaaaatggatgagaaaagcgaaaaaaaaaatcaaaaagtaaaggaggggggagggctgagagaaaagagaaaaaaagaaagaaagaaaatgcgagggttggaggcagtacctggtgctcgttggggccgagggtgaccttctcgcccaccatgatgcgattggccggattgaagtcctcgggcgcgcgcgccgaatacgtgagcacgttgaagggctcgtggtcgggcgtgaaccaccacaggtcgcgcccgtcgcccttctgcacgcagtcctcgccgcagctcgacgacgcccagatgtcgagcgacccgacctgcgcgccgctctggtccacgatggggaacttccacaggtcgcgcgtggtcgacatgtacagcaccacgtcgtcgcccgacgccaccagctcgcgcgacaccgagatctgctccatcgtcgaccggcccagcgcctctgaccgcttctttatagcctgcgactggtgatgggcatttgccacaatgaccgccaatgtcgcgtcgccgatcaactgggagttcacacacgaccaacgaccaacgaccaacgacacgcacacgaaccagttagaacacagtgaaaatttatactactggtggcggaaaaacgcactgcgttggactcggccgagatgtggacgaggtcgcgcgagatctcgaaggacgacgtgacgccctcgacgttggagaggcgcgtgaaggagccgtagccgccgaaggtcatcgggttgaccatcacctccttgccgtcgacgatgtcaaagtgcgtgggtggcgcgttgatgacggcgatgagctccggcacgctgtcgaagcgcaccttgatcgactggcccacgcggtagcccaggccgtacaggttgcccacgctcagcgccatgttgttcaccgtggcggcctccacctcctcgccccgctggtaggccggccccgcgtagcagtgccgccctgcgtgtttaacgagttttgaaaggaagaagcttgcatcagaaatgatttccatttccaaccacttcaaccaccccagtgcgctgaacgaaccgttgatgacgaagggccgatcggggtcgggctgcgctgtgaggctggtcagcatgaccttgtgcgacgccgacgcaatcgtgggcgagtactcgaaggccaccagcagctcgttggcgtagctctcgtccacgttgcctgatccatcagtattggcggtgcccgtggcggcggcccacacgaagtgaacaaaattgtagagtcgaacaaagacgaagtactcagaacgaagaacaaagaacgaagaagagcgaaacacgaagaagaaaagaacgcgtaagtaccgatgacaagcttgatctcggggctcctcgtcgtcttcagggtggtcgctgccgaccctgtcgccgccgccgtcgtcgatgaatccatcacgcccgccagaccggcagcggccgaagccgagaccgtgggtccgctgggcagcacaaaggcaaagctgcccaccagctcgagacacgccagccggaagcacgttgcgctgtccacgcggaacacctcggcttggctgccgctgcccgccgtcgcgctggtgaacgccaccacgatctcgtcgtcgccgtcgttgttcatgtcgcccgacaccatccgcaagctgtgtgccatgtgtgccgtgtaacgtgtgatatcagcgacgaccgtggctgagggctgggggctgggggctgatgggagaaggagcagtggcgggcgtacttgtgttgggctgtgtcccaccagggcgcttcggcgatgggcagcgtcttcttgagcgccatgggcagcgtgtccacagtgagctcgtcgatggcgtacaggtagagcgtgacctggtcgtagtcgacgacgctcagggccagctcggccaagcccgagccctcgtagtcgcccagattgaccgccacggcgtgcggctgccgcagcgagactagtgagtgcggctcggccgacaccatggtcgccgacgactgcgatgtctggcggaagagcgcccacgacaccgtgctccgagcggcgatccacgccaccgccagctgtgtcgtgtgtgtgtggtgtgtgtgggtggtgtgcggtgtgtgcggtgagaaagaagaggagcagacggtcgaggaataaaggaggccgggggggggggtcggtcgtaccatggagggcagagcgttgaccttggctgccgccagcgagtagccgaacccgcccgcgtccagccggctcccgctctccacaccggccgccgtcgccgccgcgtccgtgagcacgatcgggtaggtcgggcgccccgccaccgccacctcgaccgccgtggcgaacagagcccgcagcttctcgctctcctccgcaaagcacccctcgcacggctgcaggtcggccaggttggccttggccacaccgctgccccacacctcggtcgactccatgcgcaggtcccatatgaacaccttgagcgctccgccgccgccgccgccgccgctgctgctggcgtcgaggaaggcgaaggccagctcggggtagccgtcgttgtcaaagtcgcccgtcgccatctcgatgtgcccgccctcgcccagcaccaccgcgttcccgctcccactgccgcctcccacgatgaggtcgcgcaccaccaccgtcgagggctcgccttcggtgcccacccacgtgaaggaggcgtggagcgggccgccctcgtatccgaacagcgtcaccacctcgtccttccagtcgttgtcgaagtcggcgctcgcgctcgccatcaccatcttcttgcccacggcgggcgtgtccgtgtgcttgaacgccgcgttggcatctaaccacccatcacaaccaccaccatcaatgggccacgttcttggttcatgctgctcctacccgccacacacgcaccacacggcacacggcacaaacacaacacacacgcccaaacacaactcaacaacaccaacaaccagcacatgggttcgcgcacctttgcaacgggcctgcaccatgagcgccttcttcacccgcggctccgagctgcactccatgctcaggtctcgcgccaccaccaccacgctcccgttgttgtcgaggcgcgggcggaagaagggctccgtgtggtggcgcaccatggtcgacttcaagtggtggtcctccgtgccgggataggtcaccggcgccatgtgcgcctgcgcctggtgctcgcgcgactcgtaccgcgcctgctgccgcattgaccgctcggtccacagcca

SEQ ID NO: 129 - DNA, 22376 bp, Acanthamoeba sp.
  variation 2670..2891: note = n is any nucleotide
  variation 16380..16468: note = n is any nucleotide
  variation 20723..20763: note = n is any nucleotide
  source 1..22376: mol_type = other DNA
ccttaatcgaggcgaggcgaaagaaccgtcttctcagcgtatcccacaacaacgtctcgcgcgtccggattatgacagccgccccgacacgagaggtggagctcggccgggtgtttgaggttctgaagacaggtaagcttctggttgccccctctcactccttcgccaccgtcacctctcatcacctattaataacgatacaacacacactggaatgtctcattttaaccagttgaaaaggcgtctgggcacgccgtgtcgaagaagtacacgggaccccagctgccgaaagacttcctgaatgtcagcagtcgggccaactgttcagacaactcctccccgtcctacgtggacggtgatgggcgtctctacgacactttctaccgccgctgcgagcaaagcgaggctgggcggctcgtacagaggctagcgcgtttgccctttccctcacccgacgcagagggggcctacatcgacttcaacagctacgaagcagccgtgctcgagtggaagaagcaagtgacgacggcgctcgggcatttgaccctgccccagttgatgggcagggcgtacccacgtccccgagtgtttaaaatggtgtgtcgcgccgccaccgtctccatctctgacacgcaccatcgtacacgcacgcgtttgtgctcacacgaggatggctgtgtggtcgtgataatgcgtaccgcaggaagaggagttcgacgtggatgatgagatgaccgacttggattccttgccctccttcagcttcgacgaaaagatcagctcctccctgtcgaagagcggcaccttcgacaaaaagccaggttagcgtcagcacacacatatttgtgccaccttgttcgcaacacggtcgcggttttcttatttcccattcatctctaccagcaccaggcccgcagcccccagacaagcccggtgccccggtacgctgtcatccggtgcgcagccaagtcatgtgaccacccagttcaactgatcagatattctctttaggatgaagacatcggacagtttggaggctttgagcgacagggaaacatatgggatctgcagctcattcctcacgaaccagtgcctgaactgtatgccaccctgccaggtacacaatgcaagcacaagtgaaagggcgcgcctaccttctgcgcttaacacatttgcggcgtgtgcgcccgcgctcgcgatcacagagttcgaagctgcctacaagcgctgggctcaggtggtagccgacttattggtcgtcattccaccccaccccagtcagctgtctcagttgctttccttggccaccgctgtcaaggtaccctgacaatcaactttgattgtaggaaaaagcgcagttcgatcactgacgagcgaggtaccatcttgatcacagactgccgagatgaagaaggttcgccagttaagctactctgtagccatggcggacgaagacagcgagaagcccacgctaagagtaaatgtcatcaaagtcgagaatgcgaccgaggtacaagcgagaacaccccgtctacgccgcatgcagcgctgcatacgcttgctcacacgtcttgtgaccgcgttggggtgtttatcgatataggacccactgtacagcaccttcatctacaacccgcacccgccaccggaaccaccagaaacaacggagaagaaagcagaaaagacagtgtcgcgcgacaattggattcagctgccggattccacccgtaagcaagtcaccaagcgggtgggccaccttgtacagaccaggttccgttccccgcgcattcagtaccgtgcacatgtgttcatctgatttcttctcaccattcctccacaaaccaggttgtcgaaccaacgcaagtataaggcttataatgcgcccatgttgcccattgtgcacgggactttcgcagcgcccaagaagcagttcgatgactactccttctctgggcccgtcatcccccggatgaagcgagagacagaaaaaggtaatcccacgcacgcaacgcacgctcacacgccgcaccaataggcttgccaccatagggcttgcctttgctgtctgtccgagatctctcgctgatgagtgataaacccaaccctagtttacgagttcagggctttgcgccgcacggacctctcaccagaggaactggcgtcatgcatggattgccccgcaatggtcggcgacaagcctgtcggcttcacccttcccgtggacgaaattggttcatatcccaaccccattttccttcgcttgcagttggttgtggtttgagtattgagtattggttggttactggacacaggcccgatcaactttcagcgactgaacaccgactactcctacaaggagcagtggcttaaacagttgcgcacgtttcaggcccccgtgaggaatcagcacctctactcctggtactggccgaaagttgacgaatcggtacctcactccctctcaaggcgggggcctctcgtgagcacttgtttggccttcattcgggctccaaataatcgagggtcacccttcacctatgatcgaacgccaccaggttcacgccatgcatcggtcggagctcgacctgatcgttgctcatcgggaaaccatgcccccagaggtgtttattcggcgaatgctcacaactcccatctacttcgaccgctttnnnnnnnnnnnnnnnnnnnnnnnnnnnnnnnnnnnnnnnnnnnnnnnnnnnnnnnnnnnnnnnnnnnnnnnnnnnnnnnnnnnnnnnnnnnnnnnnnnnnnnnnnnnnnnnnnnnnnnnnnnnnnnnnnnnnnnnnnnnnnnnnnnnnnnnnnnnnnnnnnnnnnnnnnnnnnnnnnnnnnnnnnnnnnnnnnnnnnnnnnnnnnnnnnnnnnnnnnnnnnnccagctggccttcttcgtggcgcaagtgatgcaatccaacaaggccaaagcagtgctgggtagcatcttctccacaaacggtgcgacgcattgcccaacgaactttgtgaggtactgctcccttgcttttactaacccgaggtgtcgagcagatagagctggagtgtaccatctggcgcacgccatgaccttcttcaacgaagtgtcagtagcactctggccatatcgagctacgaccatggaatctgtgctgggggtacaccctccgtcgccctatctcttgtttcttcttgagattgaaaccacaccctctccacgtctcattagcccaaagaggacgaacgacgacgaacttttgtggagcctctcttcgacgccttctttctccactactacctcaaagccacgtttgcgacagtcagcaaccagaagttcacctaccttgcaatcttcaagaggctaggcaaaaccatcaaggttcccctcacacgtgagcaactggagatgaaggagtttaacggcatttctcgtggacagagagctcgggagactctggagcagctgctggtgcaacgcaactatgagtttctgcacaccgatattgtaaatggtacctttaagcggcttcgttcgacttgacagaggaagaaattcaggcctggctgacaccacaactcttatgcgatctcaggaatccaatcccagtcgtctcgtctcagtgccgtctggctcttcgtatgggtgcagctcatgcgacatgagtccgcaggcgtgcgggtatgaacgctctctatctcttgtcattcgtttcatggcggttcctcaccctcgttgcacctcacgggcgcacaaactggcctgtcgaacagagagcagtggctgctgacgaagcacaactcctcccttccctgagggatctctcaagatccaaggtggctcacattcgggtaagtacctgtcttcctccttaggccgcgccttagttgatcctcaccatgttgttgctgctgctgctgttgatccaccagtacgccgtcatacggatatttgacatattgatgagcgaggattggactcccgtactgtacagttactacacgcgaaatgagacagccctattcgaggtaccgccgttagtcacacttacctcaaggagtgttcctgccacctgacacactcgggcggcggcggcggcggcgggcaggatctcacggagccctctgaatttgcgagagcgcaaatggaacgacggccctggatctccaaggtacttacaagggccacagctcgctagggttgggctaagtgggaaaactaattgagatgttccctcaaatacccacccatccatcaagggcgagtttactccgtcactgatctcgctcttgaccgggcaaatgtgcaagagagcaacccagggagcaagggcagccaaaggaccgacacatacggtacacatcatgagcgctggtactgtgtggctctctggcactcaccatgtgtgttggtcttttgtcagatactgctgaaatacgcgttcgtgttgaaagggtcgctcttcaagcgtttgctcgctttcgcctctgaaatgccggagacgcaggtaggtctccttttttaaccttcccctcattggtatcgcctcctttgctgacgtccttgcgcagacggtggaactggtgacggaactgctagccgaattaagcgtcacactgcttcacctgggcctcatatccggctccactcggagcagagcagagagggtaccaacgtggcccgttcaagcggagcataacttttctggttcccagaatttacgtgttgtttctggttttaggtgtccatcaccggagacccactgtctggccacgggctggtgcttaatcctccaggtacctctccggctcgagcctttctccatggagtggatgaggactcttgactaacatccactcttctttgtgcgcgcgcagaattaacggcggtcatcgcatttatcacctcgcggccgggatcaacatcggctccgctgaagctctcgaaagcaagtaagatctttccctccttcgccctccattctcatccataagagcgcgctcaccatattgggcgccgttagacatgttgcggtgcctgcatgctcttctccaaccggcctcgatgtatactctggtgaaacgtgagaaaacgttctgggccaagtatgcatcccaacgccgcctctcacatcgctccctgcccccctcccgagggggccgcttgtcaatgcttagccctgctcaccgcgttcgctcccttcaggctggtgcagctctgtcgtgacggctcggatatgggcatttgcaaagcggcgtggaaagtcgtttacacgaccattaagcaccatcccggtacagtggaagtgctcattgccaacaaggtacgttgccgcaatccatctgggccgtgcattgaaaacgcgcgacgggcacagtgtttgtggtgctcatcgaagaccatcagtgcctggagcaattactcgattgcatatcaactggggcggataattcgacaatcatcaatggtttgcattatcttgccaaggtaccactgatcggctaagctcgcgcgacaagaagaaggcccggcctctgaccaagtggcgcgtctgcaccacttcagatcttcttgcttgaggtcaatgatagccggcgcaaggccaaaggcctcaaagtcccattacgggaagacccgcgcacgttagacaaggacctcaagctgcttgtggggttctacctggagaggactgctttcatcaaggtgcacatgatctacaagcagttcggcgatgaataccccggagccaagttccatcaactggcctacttctataacaccatcgccacgtgctctgcttgtgcttccatcctcaagttcgcctccaaggtgcgcgagaccccaatccacgccaccgcgccactgcgggcacaagcgctaacacgtttttctttcgtgttggttctccgtctggtccttcaaaagaacgaagactacctccaaggtgtccaaaagatgaagtccttctttgagcacaaagccgtatcacgcaccgagaggccacactgagcaccgagaggtcaacacaggcctgaagaagtcaggctttaaaaaaaaatcttttcatttaaaaaagaacgcaaaacaagttttgcgactctgtcccaatctttaaaatagtactacactcgctcggccccaaggcgagagccactgacaacccaaacggcaatggcatacgtcattgaagcaaagaacgagaagcgtcaccttgagtgtctcccactccgctttgctctcgcagcagatttgaagacaactacgacggacaacctagccggaggggatggcgtgggagtggtcgaaatcgatcgcgcacgtgaagaggaacttgagactctccgcggcttcctcaaccatgtcatttccgaaggcacctgcccctctctttctccttttcctattttcttcttttctcgtcggtttttttgtattgttttcttctgagacctgagcaagtgcaggtatgacatacccgcaactgagcacactggacgaagtgggcttccgggcctacttcctcagccatgacgcttttgtagccaggttatccctccttcgattttacccaggtccagcttggtgcaatctgattgacacacaatgtggaatgcctggctctaaacagagaccctaacacgcaggaggtgttgggtaccttctacatcaagcccaacttcccaggtcagtcgtctgccacaccatcattctgccatcagacacccaagtagtatctgaaaacgatcactccatttacgccagggcggtgcggtcacatctgcaacggcggttttattaccaagccgtcagcacaaggcaaaggagtaggcaaggccatgggcaaggcattcctctcccttgcgccccagttgggctatcgcgcgggtttgccttttctccctgcgtgtgtgtgtgtgtgtatgtgtgtgtcctacctcctgcacagcgtgacggtgacaacatcacgaccacgcctacccaaaaggcttacacttactcttatgttgttggcatcacaccacagccatgtttaaccttgtgttcgagtccaacgtgccctcggtgcgattgtggcgctcgctgggcttcaagcagattgggcgcattccccaggccgggctcctggcgcacggcgagtacgtcgatgcactgatgctccattacgacttcactgccccgccgacgctgagcgagtagtaggggtaggaaggaaaaggtagcaagaaacgaaacaagcacaagctcgattttcgccccctctccctttcgccgaacccagcacacagaagcaacaacaaaacgaaggccaagaagaaagaaacgttcacaacacacgaaacccagcctagaagatgtactctgcgtcactcactcccgaagagatcaatcaactcaagaacggtttccttggcccagcatttcaggttcgttcagcaacctcttcgatccttcgtttgtgcccatcacacgagcattgctattaatattgattgattgatgtggattatgattaaccataatctattttgatgatttaggtttttgcggctggggtgacaaagatctatgtgtcccgcccggaaagggcacagtgggaggagactggcttggtgggcgtgtggaccttctttgcccacgagcccaccaagaccctctaccttcagctgctggacctccaggtaccttcctccctccgttctggtggtggaccacagcaggtttggggtaaccaacacgactagcttcctcttttgaacagaccggcacaaggttcttcacgcaggagctctatgaaggcttcgagtacctgcaggcgacgccctacttccacacctttgagagtgataactccatttgtacgtacttcgattctgtgcctgcctgcctgcctgcctggtgggtgggtggtggtactgacgcgtgcccatacgtttgcgtcgtcagtgggcgtatcatttgccctcgagcaggacgcggcccgcttccacgcggctgtgaaggaagcgatcaacaagaagcagtaccgcatgcggccctcgaccttcaagaaggtctggaggaccggattgggcaccttcacctcatggaggggtgccaagaaggaggtatatactcatcagggtgcgcttattggtggttctttctcactaaacttcaattttgtatttttattttttcaaatacaccatgacagaggaagccggagcaggctatggcgatctcctctccctctggcttcaagcatgagtcgcacatgggcttctccaatggcgagttcggtttctgggtactttcctgaaaatttctttatgcctttccctcctctcgcatctaggcgcttgattgcatcaaccaaccccttgaacacagggctgtactcctctcgcgtggcttgaccagaacccagcttggcggacggtacgcacaccaccttgttacgttgcttaccgaggcaaagcctctttcaagcaggtctgatctctctctctctctttacctccagtatttccaacgcactctcaacatcagtgcggaggaggtcgacaagaacgccgcccaactactctccgttgccgcccaccacgtaggccgtggcagtgccgtcactgtccccctgcctgtccgtaagttgtcccacccgattgacgcgcaatgccatgatgcgcatcattctagaatctcgtggttcggctcgtaggctgactgactttgtggtgatatccgtgctcaccacagcaccgaggcccgatagcaacaagctacgatcgcaattgacgagctctcaggagctgaagaacaaactccggctcagtgctgagttgcagcagcagcagcagcagcacggggctgtgccgcccgcaccgccctccggtggtgtcacaactggagacgtggagccgccgatcgacggaagagatacgcccgcggttgcgccgcccccgcccccgcccgagggtggtcattatcagtacacccccaggccttgcccacccaaggagctgccagggaggccggaagatatgccccaagagcagcaggaagacctggccgacggtttgttcctcctcctcctcgccatccgtaatcatgtattctttctctgaaaagaggctgacgtgctctttgcgccgcgtgcatgtcgtgtgcagtgctgaagagagcgatcgaagccaagtttggagcagggaggcgcaacgaagaagaggaagagcaggaagaggagcaaagcgacgacgacgacctctttggggctgacgaaccgttcgagtcctaaacattactgggcagtcccaacaaaaaccggataaataaataaacgagttttcgtagacagccgtcggaccgaccaaaacctacacgtagcatcaggcgtggctttaaggcctcgtcctagagtttagtcatccgacttgaaatttcatccaatttggaaatttcgtgtgcaccggggtcggattcatgggatgccagaaaactgaatgacaccggggtcggattcatgggatgccagagcagaaggaaattaattttaaaatcatttatgcaagtgtacgttgcactgccgaggatgagaggccacaagtatccagtgttgtgtagttgtggccaagtagtttggagagcgcggactgagcagaaccacttgtggcagggtcatcagattgtccctgttggcaaggcagctcaaggcgaggtagctattttcaaggtggtgggcaatgtggccatgcacacagaggccgaggtgggaaggcacgaggcggccatgggcgaggcggccctgcgcaaggcggccatgggcaaggcagccatgggcgaggcggccatgcagtgtggacggggcgactggggaagagcagtaagcaaggcagctgtgcatcatccatccttggttgtggtgaggccttttctttaccaatttcctcacagaaatttgcggtggtgacaagcacaaacaggccagagggagtaattccgtgcccaaccaaaaaaactgcaggacgagcccttaaatagtcagcacctcgcaaagaaacacaacacttcgcaccaaaccgagtcacagacagacacctatgcaaggccctctgggcgagaccaacgaacgcccgtggctccacaatccgcgcaacaccgcaatcgtcaggcaccggacccgccagctcatcgaggccggtggagacacctacgtgccgtcaagcgaggccaccaaatactttggcgtgacggcagcctgcctgcgcaagttggccgatcggggcaacctgcgcacgcgccgcatcggcgacaagggcaagcggctctaccactgcggcgacctcctctctcaattccccgcagtcacgcgctccgaggatggacgcaccatccagaccacgacgaggccaccccgcaagcgcatcgcctacgccagggtctcgagcgagaagcagcggcccgacctcgagcgccaaatcgccgagctccgacgcctctgccccgaccacgagatcgtctccgaagtggctagtggcctcaacttccggcgcaagggtctctgcgccattctggaccgatgcttcgcgggcctggtcgacgaggtcgccgtgctgcaccgagaccgactcgctcgctttgccacggagctgctggagcacgtgtttaagcgccacgacgtccggctcgtggtggtcggccagggcgatccagctgcggccgccactctcgacgccctcgatccacagcgcgagctggccgacgacctcatcgccgtcaccaccttctttgtggcgcgacaaaatggcctccgctctgcggcgcatcgaagagcacgccgcgatcgagcagccctggaggaaggccgaggaagcacgacaagcgagccttctgaggaagaaagcgaggaacgaggcggcagcgaggaaagcgaacgagatgagacagacggcagcagcagcagcagcagcagcgacgacggtggcgggaggcgaaaaaggcaaaggacgagtaggaggcggcggcggcggagggaagcggaagcggaagggaccgccggcgctgaggggggtggtgatggggagggtgggatggtggctttcgacggtaagacgcggaagatatgcgtctttccaacggcccaacagaagacgctcctcaagcgctggatcggcaccgtgcgctggacctacaaccagtgcgtcgccgccgtgcgcggacggcagtgcgcgccgaccaagaaggcactgcgcgctcgcttcgtgaccgagtttggcctgcgagaggcggaacggatcaaacgcgccaagagcggggtcggcggcggcggcgacgacgacgacgttggtatctcgtgggtgttcgagacgccccacgacctccgcgaccaggccgtgggccagttcgttacggcctacaagaacgcggtccaggcacacgggcggggcaagttcgacatcgcctttcggtcggccaagcgcctgcagcaggagacggtggtcattcgctcgagggactggaaccggacccgaggcgagtacgcgccgatctttggcaacaccgtgcttcgctcgagcgagtcgctcccggccaagatggaccacgagttccgggtcatgcgcaccaagctcgggcggtactacatctccataccggtgccactggatgtgaagcatccgatacagcaacagcagcccgacgcggtgggagggggtgataaccaagcccccgccgtcgcgccacacgctgctgccgccatcgatccgggcgtgcggacgcccttcacggtctatagccccgacgaggcgcgcgtctacgagctgggtgccaacgactttgggcgcatcaggcgactgtgccaccacctcgacgatctcgtcagccgcacgaccgaccgcgacgttagaaagaagcggcgccgccggatgcgtcgggccgctgcgcgtatgcgccggcgcatacgcgacctggtcgacgacctccatcggcgggcggccaagtggctgtgcgagacttttgagaccatcatctacccgcactacgagaccagcaacatggtcgtcgggaagagcaagcggcgcgggctgcactccaagaccgtgcgtgcaatgctcacctggtcgcactttcggttcaagcagcacctgctccacaagatccgcgagtacccgtcgggatgccgcgtggtgctggtcgacgagtcctacacgtccaagacatgtggcgggtgtgggcggatcaaccacggcctgggcaagagcaagctcttctggtgcgagcagtgcggtttccgcacggaccgggactggaacggcgcgcgcaacatctggctcaagttcctcacggaatggtgcaacggcagcagccgcggcaacgacgatgacgacaaggagcagcagcagcagcagcagcaataagcgtccgaggcaaaggcggtggacggccgatcctctggactttggggcttacacccctccgccgagcgaaccaaaaaccgctcggtggtgcatggatctggtgcaggacgaccgcgggcatgcccgcgtgaagctttgtattaggtttaaatttaagcgtgcagtaaaaagatgatgatggagcaggcatcaaatgctgccccggaggtgggcataaggagagacagcgtatcccgcgaggagcgcaatcttgtacgtaatcattcactctacgtttttttttattttatcgaattactaagagttatgatggccattcaaatggcttgatttcattttatcatgcgaaggaatatggtctgttgaattcttattgctgcctcgttgatctgtggcaggcctcgaatggcgacggggcgggcagccgcaaacgaccgcgtctcgacccagacgacggtgcccaccctcgcaaccaccacggcacaaggagcatcacagctgctgctgctgctgcgacaagcgagaccacagcagcagatatgctggaggacgagtggaagcgattcgcgcgccagtgcaccgagaacatggaagagcaggtcatgcaccgtatcaaggaggaagtgcgacgcgagaagcggaagatggaggccacccccgagtgggatcgcgccattgccgaagtgcagcagctcgagcaccggttccacaagctgtggcttcagtgggcgcgcgacgaagaggcgcggcgcatagatgaggcctaccgggcgcgtcgtaatttcttcgctggtcaccgcacaccgccgccggccacgataccgcacggtgagaagaggggagaagaggaccgccggcgatccgaccgtgagctgcgcccgatgcaccgaagcgaactgctgccggatgaaggcgagcgccggcgttcacgggaccgagggacgagccgcacaagagcgagagagcagtctgagcccagtgccaagcggccccgcagccgaagccgaagccgaagtcgagggaggagaatcaaggaggaatcgcccgacgaagagatgcatctcgagaggagagagcaacggagcctgcagcagcggcaggaccaacagcgacagcgacggacggaagaggaggaggaggaggaggaggagcgcgagcgtagagtagctcgggagctgcacgagcagaagcagagggagcaggaagaggaggccgagatggacgaggtggaacaggcatttccggactccgggtcgttgccgcctccgcagcgtgctgccagatttcgccaccactgcgagatgtgccaagtgacgctcaactcgcagaagcagatgttcgagcacttccgcggcaagaagcacgtgcaaggggaggagcgcctgcggaaaatgtccggtcagggtccatccccagcgacgtacccgcccagcggacaagctctgaactggcagaaccagcgagactggcgcgccgacgacgagatgaactgggagcgcgagaaggctcgcggctggagcaaactgccgacaccgctgccggcgatcgtgaagcccgaaccacgcgacgaagctggcgacgggcgcgcacacgaagtctcgacgggcactgagctggtgcagcagccgacgtgttcggtcgccgttaagcaaggtgcgtgctcgcatctctccagcgagagcgtgacctggtgcccaatagctcaaccggaggtctaacctcgtgcccgcatctaacaaatctcacaacactaattagtcctgcgcgacggcggccaagcggcgaaggaggctgagcgggagcggcctgcttggctcgagctggacctcaatgtcgtaagcgacgacgaggaagctgaaatccagcaggaggaagccgcaccgcggccgacgccagagaaactgggttcgcccaaggtggtcaacctgttcggcatggtattcaccgacgacgacgacgacgacgagagcagcggcgaagatcgcgaggacgacagcgaaagcagcggcagcggcgacgagggggacttcgacgaagatagcgatgaggatcatggcgaagagcccgaagcggaggggaaggaggaggtcgatgatgaaggcgaagaaaccgagcgctactggtacaccgacgatgaggaggacgagcagcaggaggaagagcggcgagcagagggcgcaagagtggagccggagagcgcaaaggaagagaggcggaggcgtgcaggtggggcgcccgatgtagcggaggcgacaaaggcttcgaccacgtcttcgcagccgcggaagcctgctttcctcctcagccccgcgcagcggcgggagaactgggaagccaagtacgcgctcgtcaaggcgtggttcgacgaacacggcagactgccgagcaaggcgaagagcaagacccttcacaactggcttcactacaacaagaaaagctggtccccactcgatcccagccaacgcaacaggctgcgcgccctcggcgtgaagccgttccgtcggcggcgatgcaaggagacgccgtcaccatcgtcgcgggccaaggaggaagtggagccggagcctcttagggatggtctgcccaagcggagagtcaggacgggcggcgacacggcgatctgggaggggcagctgcggaagctcgaacgcttccgcgccgcgaccgacggccagaacccgccctacttcctctcaaccggcaagtggctctacgagcagatcgcgctccagaatcggggcctactgagcagctcgcggaagtcgaggctcgagagcctgggcatcaagtgggactggaaagacgagttcgcgaacaagtccggctgcgagaaggccaagaagtggaagcagcgagcagagcggacccaagacagcagcgataccgaagaaaagaaagggtcggcaaagacgaaagaacgcgagaacgagaggagagaggggaaggagaagaaacgtgaaacgaagaagaaggcgaagaaggaaaaaacgacaatcaagaagaggagggcggaggaggagaaggcaaagaagaacaacccgaaaaagaggctgaagagagaagtaaaggagaaagagggccatacgaaggtgccgtgggaggtgcgatacgaggagttgtgccagtacctcgctgcgcacgaccagcacctgccggggaagcaaaccacgctcggcaagtgggtctacacccagcagtaccggatcaacaaagggctccaggctcaggaggacaaaatcgccaagcttgtcgccctcggcatcaccctctcgccgcccaagaccccgaccaccccgacgacgacgacgacgacgacaacgacgacgaccccgaccacgatctcggctgcggcgcttccagagccagagcaaaagcacctccaggaccatggaggcgccacggaagaagacgaacgtaaggtgtctgccacgatggaggagctgctgcagcgcattaaagaggagaagttgtgatgtaaagagctcaagagactcttctccccgctcgcggggagggggagacagcaaagccacgaccgtgttgtgggtgtgtgtgggtgtgtgtgggtgtgtgttgttcacgaggagttcattcaaattccttattgtgcacaagcctgttttttttcgctgtcgaacggaacactcttcttggcccaagcagttgtttgcccgacaacggaattctccacctttcgcgcgcacagccctagcattcttggcattctgtctggaccaatttttgccgactaaactgaatataatatacgggtatatcaactgttggaagcttccggctttcttgaaagtagtaccgcggcgaagatggcgacccacatctccttcttcgtgctggtccttttcaccctctgcgccacggcctcatgtcgtacgaaggactgcagcaaagtggacagcgtagaagagcgtgccactcacgtgttgttttcccctttctgtcatagaactcgccccgctccaagtcgctcaaaacgctgcgcnnnnnnnnnnnnnnnnnnnnnnnnnnnnnnnnnnnnnnnnnnnnnnnnnnnnnnnnnnnnnnnnnnnnnnnnnnnnnnnnnnnnnnnnngcattcactgccgcgactgatggcagcgaggtgaagaacgtgcacgtcatcgcgacagcttccgcgccatctccgccaagctctcgcccgcgtacgtaccacgtctcctgtctgtattagacacattgcccttttgacttcttaacgttcgtgccacttgtggtgagtgcagtatggtgcagaagctgcgaactcaccctgctgtttccgttattgaagagcatcaaatcatgcacgtcaatgaggaagagaagtgccatttgcagaaggatgttatctgggtaaggccaccccaccacctgtgatggcaaccgttgaaccttgaagcagcatcgatggtaccaacgttgcactgtgtatcaccccccactatccagaacttggatcgtattgatacgcacagcatcgacatgattgacgataactacaactacaactctgccggtcagggcgttgacgtctacatcatcgacacgtacgcacacctttccgctccagccagcgttgtaacctactacactaccactaccaccttaccatccaacgttgttcatgtatgtgacagggggattctgacgacccacgtcgagtttggaaagagagcagagtgggctgtgaacttggcggaggacgggatcgacactgattgcaatgggcacggtactcatgttgccggcactgttgcaggtgcgctctacggtgtcgccaagaatgccaccgtgatagcagtacgatcatatcgataggcgtagacgttttggcgtggcttttgttgacgttgactgaccatgctctcacaacgtgctctaggtgaaagtgcttggttgcaatggattgggcaagaacggagctgtcctgaaagggatcgagtggactgttaacgaggcgcgaaggcgtcgacgcccttctgtggccaacgtgtctgtcggtagtgggaagtcaagcgctacgaatgccgcagtggccggtaccgaccaacactcactctgatttctgtgcatgccttcatgttcaccaaaatgcgacccgccagctgctgtccagagtggagtgaccgtcgtcgttgctgctggcaatacgaacacggacgcctgtgacttcagtccctccagcgaacccctggcgatcactgtactggccactacaatcggaaccaatgaagagaccggagctgcccaggactgccgcgtggcgtcctccaactacggctcctgcgtcgacattggggcgcccggtcagctcatcaagtccgcttggattgatcagagaggctcgccacccaacgccacctacaacattctcactggcacctcgatggcatcccctcacgttgctggcgttgccgcccttgtgctcagccagtcccccaagtatagccctgctgaaggtaccatcaatccatccataagcacccacccaagattacgatcatcagtgcgcactaacttcggctcaaatgtccatctcagtcaaggcagccttgcatgccgactccaccaatggggtgattgacctggcgtgccccttcatccaactgccaccgtcctgcgagatcacacccaacaagctgctttacacgaactgctgaaccacctctctggtgggcttgtggtgctctctaggtacccaaaataaaaactgacaggttaggcgtcgtcagcgtcgtgccgtccaagaccacctggcttctcttctgcaacaaacagcacagacacatggactggatcaccacccacagcatcaacagaagcaagagacccactacagcaaatacattgtggtttatactcttatgctggtgttgtggggtgtggaatgaaattgccttgaggccaaagtgatgtacttgaggcagatggaggagcctcttgtgtagcatttgatccaccccagcctgagcaggtcactgaatctgcctttgctttatgcaggatcttggacaagatgtagtgccctgttgactgtgaaatgggttctcagatcctcaatgtgatcctctctaaggatgacccttggatggccttggtgatccctttatatgacctgacaccaacattgagtgatgtgagcattggtgtgatgcaatggctggtccagtggttgctgtctatgtgattgatctgcaggtgtgtgaaaatttggggagcctcaccagccaattcagattcagcaaatgatctatccaaatgattgtgcatcagtggtagttgacaacttggtcatggaggtagtgtgaacacagagtgagtgacaagagaagatcctttgaacacagcagggtttagggtttaggggtctagtttaggtactctttgaccttttcaatggtgctcataacatcttctatatatcatcttgatcgataattgcccatcattctagatatgcctttgttttttggcaataaaatcgttcaagcgagttttccgtttttctttgattttccatgaattattttttgtgtatttatttgttaaatcaggccgacctcatgcaggcgacacgatatggttgtattcgtgtagagcaaaaatcaggctacaaaacaagtagctatacacgtgcaacgagtatggcgttccgacacaaggccgcgtggcagaaaggctttttttaatgtttggaaaatcacatggaggccaagaaaaatcataaaattctggaaaaaatggctagcccagtttttgaaggccttctttatggctatgaagatttgaggtggctaagcgcggagtctctctctctcactctctatcttttctaccttggacagagagagatggatagagagagatattggtcattcaagggttagcatggatggaaggatagagattgaaccaccatttgggtgtggcttgtgaaggaggttatgccttttgagaaagaaaaagtccacacctcagggtggtgtggtaacttgtattctcactcaaataaaaatgtgtgtggtgtgtggtgtgtgtgcgtgtgtgtgtgtgtgcatacatgaaattatgtgtctatgtgtgctgtgcaccatcagatgtattaatgtcatgaatggctgcaaaaaatatttgacattccatagttgccattttggcatgaaatgtgactgttacatgcctcttcatgagcaacagcacgaaatgtcacttttgtcttttcagctctgtaacacacacatcaaacaagagagagagagagagagagaagagagagagagagtgagtgagtacatgcatgtgcaaagccaccacacccacatcaaccagctctactgcttccccacccccaacactcttcaagcttgccagcagtaatggcagcagcacttcaacattgtctgcagtaccaaccccaaccctttggtttccccatgctgctctccttgcccctgcatccacagctgccatttgccaccttgtctggcccatgggttatccccaagttggcccacccaccaccacctcacccaaccaccatcaccaccatcaccaccaccgccactgcagcagctgcagcaattgcatcacctgccagagtggcatcagtggtgcccaccaccaggacaggagtggctgcagtggcagcaccaatccaggtcattgcagccaccaccactccttttggcctgccaatctccaccattgccatgacctccaatgccaccactgttgcacaaccatcacttccactaccatggtaacaaaaaaaacaaccaatagagtggtggaccactagagcccaaggccttctccaaccagctatgcatttcaagagttcaatccagaccttcacctgactgtggctgactttcaacataacacagtaactgacctgtttgccagtatgtaaaaccacgccctgagctgtggtccttttagtttgctttttgttttcatcctcaagtggcttgatattgcctgtatgtaaaaccatgccctggggtgtggtacttttaggaaggagaaaaagcaaactaaaagtaccacacacacacacacacacacacaaacacaggcaatatcaagccatgtaaggatgagtcacttgaagaattctacagacattttgaaagggcactcaatgtctcatatgcagtcatggacacaaactacaacaggtaactcacaaggaggatgacaatgccttcagactcaatgccctccctattcccagcatccaagacagcaaatgacactgctgctgcccacttcccaagtggatggtgaggctgacaatcaacaatgataagtgggacaaacaactnnnnnnnnnnnnnnnnnnnnnnnnnnnnnnnnnnnnnnnnngtccctccaatccatccatgtggccacacccaccaaaagttgtccatgccaccataagggtggccaagggatagaagtaccttgttgacattgtcattgttgacatccaaagacttgagttgagagaccaacacaagcacccacactgcactgtgatgtggcccagccccacccccaaaagttctcaccattgttgtaatcatcagccagatggtctctgtggtggtggtggcaatagtggccaacaagacattggcaagagacagacagccagaaggacatgtggtccaaagtcccaagaccaaccatccatccatctgcactgtggggctcatcaatccaagacccattgacccatccataccatccaggccactaaatgctgctcctgttgttgttgtggcttttggagacttggacaaatctggcacagatggaagactccactccacaaacaggaacatctgaagagaacccagtcctgacctcccagcccaatccatccatccacatcacaatgccatgtgaacagcatgatgctgatgccaacattggtggtggtgatagtggccaaaggatgatgacacaagcccacaccatactgtaccatgacatggcccaaaaacccaccaaaagttaacattgctgacattgtcaactggccttgatgatgatggtgatgacaatggcccaacaagacaacaatgggtggtggaagagggagagatagacaggatactgggtttagggttagggggtctagttcaggtactctttgaccttttcaatggtgctcataacatcttctatatatcatcttgatcgataattgcccatcattctagatatgcctttgttttttggcaaaaaaatcgttcaagcgagttttccgattttctttgattttccggaattattttttgtgtatttattttttaaatcaggccgacctcatgcaggcgacacgacatggttgtattcgtgtagagcaaaaatcaggctacaaaacaagtagctatacacttgaaaacagtatgccattatgatacaaggtcgtgtggcagaaagggttttttgtaatgtttggaaaatcacatggaggccaagaaaaatcataaaattctggaaaaaatggctagcccagtttttgaaggccttctttatggctatgaagatttgaggtggctaggcattgatacaagaaagctgtttctttagggtatggtgtgggcagatggttgcttggccttgggaccttggaccacccagtgcccttctgtatgtctcttgctaatgctttgttggtccactgtccctgccatgagactgtctggctgacaatgacaacaacaatgacaagttggctggggccatgctgcagtatgggtggacagatggagaggttgttggccattgccagtaatgatgatgatgatgacaaagagaatggttcctgctaaagttgtccatccatcagtctgtgctgtctgctcattccattctgagatccaaggttcgtccatcagtccgtccgtcccatgtctgcaacatttggtggcggctgaagcacggacggaccaatggatggatctggaacgggtttgggtttgggg

SEQ ID NO: 130 - DNA, 21152 bp, unidentified
  misc_feature 1..21152: note = Fanzor polypeptide
  source 1..21152: mol_type = other DNA
gccggcgcgtcatcctcgcctccgacatctaccgcgggatactccttcagccggtctttcaggacaaccccatccctgatggcctcacccacgccaacgtcatggaccggtggagcgaggccggcggcatgttcgccgtctcactcttcaccgacattgccgtctttcgcctccttggaccttccctaatgttgtagactagtagaccttatttgttgtttgttgttagtcttattctcccccagacagactcgtcagctcgtgttacagagacgagtcagcagaagaggagagcaggcattggggacctttacacaccgcgtgtaaaaaaaatcccgcgaagtctgcaaacgggcttttctgtacggtcgcggggcccatctctgccctatactacgtatacacttatcgctacaacatacgcgactgctgcaactgtgtgccgtacccctcaacttcaccggacttgccattcggctgtgaaaattcctgagatgcagagggcactcgtctcaagcggatgcgagacgaggctactctgctgacagggagatgaccgtagagagacactcaacaataacactgaatcgagcgtagattgcgagatgtgagcggtgaagaagaaaagagaggggagcccgagggcgagctacgacaaagtgcgcccgagatcctcctccaacctccacttgccgcctcatccgaataacgtgtcgtcgtcttgatcttgagcccgagagtatggtagtagtctagggggagagatcaagtcagcgagggttcgaatgaaaaagcgagcgagtgaaaaggacttagatctggaaaaggccttgaaggagcgagagcgagacgagtctgcagaacgagtcctagcatgagacttaatggacgtagcgagagcgccacgcgttatatgactccgcctttagcaatcgccccactcccgacgttcagaccattctaaagacaggcaccctctgtgtcgcttgtacttacgaggcgctgtacggccgccgccaccttcttgtcaataactgcagtcggccttgcgcctgagaaggtcccgttctaacctctgcacacggccctacacactgtattcgggtaagataagagctggaccagaatcaagcgggttcaatccgctatatctgtccaatttttccgcagatttgcgttccgaaagacacagaacctccgtctcctttgaatcggcgagcggaatcgccttgttccgtcggaagcatgtcccatatggccgctttctgcttcattctgctctcaaaaggtaatgccaagtgactgaatgccgtagtcagtggcacgaatccctcacgagtcctccggcaagtattctgtctcgaagacgattttcggtgggtggcggagtggcggcacccaccaaaagcgctcgattgcttttagcgtgtcaatacggagcccataggagtcggcgttgtagtggtatgccgctacagctggtagctccagatatcacccgttatgcagctccatgtcccactctatcgtatatgcgttgaccgccttgattgcacgcatttgtgtctcatttgcgtatatagctcaatttgcacagaacacttgcaatacgtgagtaacgtagcggttaaagtgttagcgttcggttcggtatacactttttgtcagccgagcgttcgcttcccggtgagagcatagagacaacggttctgcgttcagacggccatacttatcgcacctcctctcagacgctacaggctgctcagacaccgtccagatgacccaagtaagccaggccgttcagacgctgtccagactgatgaatccctttggcacggttgctgatcgggccgctggcgccttggaaggccgctcatccaaggagatcttcatcgagcactaccactcaatgctaggacatcagtccgatcgaatcctgcgacactacatgcgtcagcattactggtggccagaaatggtgaaggaaatcgaggcttactgccgaacttgcgcatcctgccaagctagcaaacccgaacgagccgcaccgagaggaaagctacaccctatccagctcccgttcacagcatacgaagagatttcgattgatttcaccggaccgcaccctgtcagcattgatgcggacggaatcgcgagattacattttcaccgtgattgacgccgcctccggagaagtcaagctcattccgtgcatgaaggccggtttgacgagcgcaaaatgcgcccaaatcttcctcgagaaagtgtacccgcaatggggtactccgaagacgatcctgtcggaccaagacgtccgctgggtttccgcgttctggaaagcgttccacaacgctctcggaacgacgctgcacgtgtcaaccggagcggccccttgtcgagttggccgccgctccgattggccaactcggccgctccggccatctcgacaggggatccggagcttgtcccggcggccgctgcgatggctcgattccatgcagctgatttgttctaccgagcgcatgcgagagatttacagtcgaccaccctatactaccgtgatcttgtggcgcgcaaggggcgcggtgctgcgcgccgaaatctgtatggtattctcaaactcaaatgatccggatcggctggcgcggctgcaagaggcctccacttgattggttgcctcgagaacttgaagtagtcgctagatacggttgacttagccgtttaaatacaagctatagtctcgcaaatagcgatagggaggagaatagctaaggacagctagtgtcggtagaattcgcccgagggagaagaaggaagacaaaagtcacgacgagaactacgctcagagtgcggagaccgcgggtacatgtggggggaccgggacaggtacatagtcacgatggagatcacagaaaggccgtgcttgtcgatccagattcgagaggcgagagagggcaggaagtcggaggagcgaaggatgatcgcttcgctcagaggtgtgacttggcgaggtgactcagagagcgaccctttttagcggtcgcggcggcggtgcctttgcaggtacgcttgcggcgaaccgagatcttcgcggaggtcgtttcggccgtatagcgcgggagcgaggcgttcgcgagacgaggggatcgacggagcttttggggcgacgacgccacggcgaccactcccggcatgatcggctgttcggcgcgtggggtgtcatgacgaggggtaacgggagcttgatcgacctccggcgtcggtccggcgaagtgagcggcaggggcgaagagttcgggagattgagcgcgttcgtccgcgtcgctcgagctcgtcatcgacggcgtggggccatcgaagagacccaatcccgcagcgttgatcaccaccttgaggtacgcgtcatcgagactccgaatggcgggttgtccgggttgagcgggagcgtgaagggccaagtcgagatccggcacgaaaggttgaggatggtgttccccgctcgagctcgcgagcgcgttccttccgtagaggtccgcggtgccaaagccagggctatcgaggctgccttcgcgaggagagaattccgggctagtgacgggcgagtgcgtaggccgaaaaccaggcgaaggaggggacttgcgtccctcgtcggcccagcggacgaagtggcgggctgacgtggcaggaggaggcggcgcagccgactcttgcgagggcgcggctctcgcagcagcgctcgatctcgctcgcggcagcggcccttcgcctcgtgctacacatcgacaccgacgactgtgcaccccagggcacccgcccgatctctcgagtacgcccgactccgcttttgaggactcgacggcaggacctttgtcgacaacaatgcaagttggaggccctctccgctcggtcgcatgggcagcgacaccctctcactcgagagtccgcgcgcagcatgcacgcagggcaacgacggcgttcttcgacggcataggcatcatcaacctttgcccgagacggccgcaggcgctgcgatccgtcgacgatggcattggagggaggaggcgccggcacgctctcggctcgctcgggaggcgtcgtatcccaggtgggcagattccttttgagagacgcgtgtgaagagtaacatgtgctgatgcaaagactacgatgtcggcaaaaggcgaccgaccaactcggaccttgagactcgaactgtgggcccgctgcactcagaccttgggtgggtccgacccaaggtctgagtgactgaggggcggcttttggcggcatgcctcggttgagatcgagatcgcaacaagggttgctcagcacaggcttgttcgcggagatgaactgactccgagttgcaccacagtgtagtcgccgatcgcgtgacgaaatgacgaccccgacaccgctggtgagaacgttgtgccaaaaagtatccgcgggctttcggtcgctgtttcgccgaagcagtacgccaatctgacgcgcgtgataccgcactcggttgttccaagttgacgggacaagaggctcagaatacaaggcggtatgggtggcaagagtcgcgggaacgggtgggcgtgcgagcctcgaaggcaaactgctgcaccaagtctgcactgactacgtcggtacgaagagacgtgtcacgtacggtcaagaggatgagatcgaattcaggggcggcggggtattgatcgatcacacgagatcgaaagggaaccgtctcgcgctgacccggttatcgtcgtttcgaggctggcccagagccgcgaggctatcctgctggcgatgaatggctcatgcgcagtctcaagactgaacaaggagcccgcagtgctgatcgacgctcgactccggcgagcacagaagggaagccgctcggacgcggatgccgctctcgcgtgcaacatcgccacgacgcgcatcgtgatcgaactgcgaccttggtcgaagggcgactccagtcctgacgtgcgacggacaggcgaacttgctcgagctctccctcgtcgcaatggcctcctgacttaaaacggcgtgctgtcctcgtgaccgaccgtcgataagaggagcagatggcattgacggagctaacctcaagcgctcatcgctgactgcgcgagtgcgccattctttgctacgcttgctctggagcacgcgataagctcacaagctggcagcgggccgaaatcagagcttgagcgccaaagaacccgcatgcgacgctgcgaacggaacacgcgggtaatgaactgcgacttgcttcatgcgtgacagtcaccatagcgacgcttggagtgcccgcttggaggggaaaaagtcgccgcggacaccccgcgagtgggcggacgggcgaaaggacttctccctttctcgctctaacatttgcctttactgcaaacgcttgaaggagacctcgcctcgcaccaaagcttgctctaagcgctcatatcacccatttccaaccccgccggctgcctccgctctcaacctccgactctcgaggcgcacgaaccccttctcccgttgtcccctcgacgacaaccgccgaatgctgctgccgcgcacgcagctcttgcttgcgctcgcggcttccatcgtactcgcctcgttaaccgcccgcctcgccaactggacgggaacaggaaaacagcagtccttcggagtccgcggagccggcctcgtgcacggacccttgtgagtacattgagccaagttttaccgcgcggcaaaggaaactgatgcctacaatccacaacacagcgacatgggccagaagaccctcatggcgcacttgcggggcatcgcgcgcgagcagctccagacggcgcacgcgacgaccatgatggagaccgggaccggcatcaaggccacactcgggctggtcccgaggagctttggcggaagtgagttggacagctgcttactcatagccagcctcgactgaccagtggaccatcggaacagacgagtatgtcgttgtccgcgacctgaaccccgtacgattccagcttcgccaagggacgctccagtcggcgacgtgggtgagggacaagtccgccacgaacgtcgccaacaacctcgcagctgccgagcgagccaagatcgaagagatggaccgcgagatccgcgaggtcctgggcgccgagaccgtcatcatcaacattgtcgacggcgacaagaggccggaggcaaaggcagctaccctctccgaccgtcaccgtcgcttctcgcggaggcaccaccaggaatcgaagctgccctgcgggaagaagcgcgtcgagctcgaacagaccccgcccaacgactcggactggatccaccgcgctgtgagtcctttgtctggtccagtcacacacataacggagcgggagctcacgcaaactttcaaaacagggcgacgagaagacgatctactttgttgcgcccgacgaagcagatcgcctagtacagcatcttgtgacgcagtcgttcgacacaccaaagtacgacctccccgccaactctcccttcgccaacagcaacatcgatcggctcatcgacatcgtcaagcgatacccgccgtggcgtcgaattatccatacgcgcgacctcgatgcagtcatgcacacgacggcgtgcgaggcatggttcgtcctcctcacctcgtggtcaaaagtcgaggagggggcggtccttacctcggacgccacggtactcgaagacatgctcgagccgtacgttgccgagggagcgcagcggctgcattccgtccagcgcgatgtttctgctgccgctccctctgcaccaaggactggccgtggcggcgccctaggcaagaaggcgccgctgccagctcgtccaaacctccccgtgctcttgactcagctcggcgcacagtcggcattccgcccaacatccctcgacagattgccaaccgaacgacgccggggcgatacaatcgtcgtctttctccccggcgtcgacgctctcccaggcttcggcagagatcaatgtcgccgtgcgcgcgtgtcgagccttctgggaaacgactacaccggcagcggcatcaaaggcatctcttgggcgctcgtctcgagcggtctcggcgagtctttgctttcgatgagggaagaggactggtccgaccctcaaaagctcgagtcgcaggtctcttccctcgtctccctcctcgcctccaccgccgccagagccaagacgtggcgggctggaggcgactttggcgaggtcgccaagatctcgagcaagagcacgtcgatcgggcgcgagcagatcctggacctgatcgagtcggtgcgcgttattcgaggtgagaacgtcaactacgtcgcctcgacgttctaccacaacggcgatccgcgcggacccctgcagttcaagcaagctccgccgtcgactcgcccaaatcgctacgacgtcgactcccgccagccaagccatccctacctctctcgcccaggtccgcaacacgtcgtgccacaaggtctgaaccagtcgccgacgctgccgacgagcatcgtcaacccacgcctctcgaacccgctacaaccgtctcggacggtgcccgctccgggcgagaccgatccctcccgtccaaagatgtcgaagattcgtgttcggccgctgcagatgggaggaagcgggcagagcgtgttcatggctgcgcgaacgcatggtcccgagctcactcctctcgacgacaagaccatcgcgcgaatcatacaagcagacgccagccttcctgtcgaggtcaacgacgacgacgacgcggtcgactcggaactggagattgttcccgaagatgacgacgacgacgacgacgaagacgacttcacagcagtgccaaagcaaaaaggaaagctcaatcgtgtggagtcgtactttgcaacgatcacctcgccgggcaagaaccatgccgccgcgagtcgcaagatcagcgacatcacagagtcgccccgaccagtctcgaccgcttcggcttctgccaacaatgccggccgcagcggcgcacaacagaccgccacgcgtatcacgcgtctcacatcggcaagagctcctccgccagaaccgtcgaggcgcaaagatcgcgaaccagtgcccgcgccccggcagacccgactcgcggggaatcccgcgatcaccgaacaagaggcagctctcgcatcgccagacccgatgctcctcatcatgtcgctcgccgtcaagctcgggaatcgctttgtccacagtgcgtttgcgttcttgctggaactgctgctggaacagggggaggcagggatgatggcgacgagggatctgctactccagcggaaccgagcggcgcagtgcctcggtcgtcttgctgctggcggagcataccgtgcggcgggggagcagtggttcccgcggcaaacccttgttatctctgagctggagaaggtacgtccggtcatacggtcagaatcgagatggacaagagaactgactacagtctctgagcaggaggccgtcaactcggccctcgcctccggtctcgtgcctcctcctcgactctcggtcaaggcgttcacaatagcctacgctcccttccaaaccaacctgaccgaatggccgcgaacgcacacgcgagacgaactcgtcaacttgggccagttcgtcgcgcgcgacctgtccaagaacgcagcagaagcgctgagcaaagtcctgcggaaggcgcacaaggcgttctcgctcgatccggcatcggaggctgccctgcagtcggcaaacatcgaggcttccgctcgattccgcgcgggcctcgggaactggttgggcggggtgctcgcgactgctccgttcagccaggcgtcggctcacgcaggcgccgcgaacgaagaggacaagggactgccgagtcgagaaaagaccacgtcgtacaacttgcgaaagggcacgaccggcaagagcggcgacacgcttcagcaacagcacggcctcggcccgaagatcgacccgactgacccgcgcgaaccccccgctctcgacctcgggaaagagaccgaaaagtcgctcgagcagatgatcaaaaagctcgtcgactcggtcccgcctggcagcatgttcaatcgatcagatatgcatgacgcgctactgcaagacatcaccacgatcgcgcagcgccttctagcatgccgggaccggcatctcgagatggcgctggtgctgctcagatacaagaagatcgagaacgcgacgaccatggccttcgacgacgtccttgcagggaaaatgccagagatgggggccggaacgcttgccaaggggttgctagctctggtgatgagactgcgacagatgagaacgctatcggggatcgagctcataccggtgagctgactggcacggcggcgtcgagcatagtcaaagggagactgactggcttgtccttttgacagtatttcgacccgcaatgggtcgatgtagacctgtacaccctcctccagtccggccaccggcaccgcttcaaggtgctctgcacagatctcgaaagaacctgtaccaagatcgcatgcggcctcctcccgttcgtcgatgaagacgaagggagaagagtcgagctctttgacctcttcaggcgggtgttcgaagtgtggcggattgacgaggacgaccccgacaacagagacaaggactcgccttggtcctggatcgaggccgagaggacacggtcgacgagcatccgcctggtcgtcaagaaggagagcgtgtccctcgtcgccaacctcgatcgggtcctgcgcattgtgtttggcgtggaggagaccttctacacctacatgaggcggaccggagctcaagtcgaggtgatgaaccagctcttcgatcatcgaatgttgccgaacaagttcgttcccaccgggcacatgcgcatgtcctcaacaaaggtccagttcaccggagtcgacattacgaagatgaccaaacttggacgagaggcgctgccggagaagagtatggctgtctgatgccgaaaagaattgagctgcgctgactcgccctacccagatctcgacgcaggaaccgcatgggcgcacgtctcacaactaccgctcactcaactgaaggtcaaggagtactttgccaagatgatgccgtcctttcagcgtcgcgtcgtcaacggcgagatcgtgtttgtaccgatcgtcgccatcgcaaaacccgacgcagacgtgatgctctcggaacggcgcgatccattgccgcccagatccgctcctcaggaagggctctcgcgcaaagagcgacggcgcgagcggcagcggcaagacgccctggaccgagatcgctccccggtcgacctccgaacgccggtacgcgagaaggcgccaccaagtcgaacgcgaaaggggataccggtgtcttggccaaacctgcgattcgaggggggaaggaagttggtcaatgactttcttggagacaccccgctcgaccacatccactccgccagcatcgacaccggcgtcgtctgtccagtcgcgaccttcatctcgaatccggttcgggacggcttaccaacgcagcgtgccgaggcggtggcgacctattcgcgtgagactctgctcacccagcagcgtcagaccagccgccaagcttcacacctcaactcgtatctgtcgaaccagttcgactttacccgatgggcggatccagcttccacagatgttcgagcgtcgggtacgtcgccaatgccagaaccggatccgatgcaagaccctctgctggtgaccggtctgcacttgctcaagagcatgcactcggtcttcgacgggcggtcgatccagagcaaggtcgagcgcaaggccgaggtcagttcggtggcatctcagcacgtcgatctgatattgggtggcaaggatcgctggaccgaagaggaccgcaagacgcgcaaggtcgttgtcatggtcggctcagcggacgatctcgcgaaatcttccggaatgaagggtgctgtcaccgccaacgtccttgtgcgggaaatctctgccgagctcgcgcgccgcagggtcaacttcatgatctgcgttgttcccgagaactacacatcccaacggtgcccgaacccggactgcgtcgatgcgcagggtcgccgatctcggtacgtttgctctcgtgtactctgagggtgatgcagctgaccgactggtgatctttggggacagagcggagaacccgcgtcaccagggtggaggaccaaactaccgtctcctccaatgccagcgatgtagggcggtcttccaccgggacagagtcggggctgccaacattgggagtatggggtggtgcctgctgcggagtgggttgcagctgtggggggagaactggatgggaccaggaggaaaaaaacttgcggaagcgaaaaatccctaaaaaaggggggatcaatgggatctacttgtagaaccctcgctttctccgtgatcaatctgacttctatctcctgtgtgcggtaaccacaaacaggcgcttgcgcttgcgcttccacgtccgcaaagaggcgcttggcgcttctgctcccctatggccccggcctgcttgagactccgtgtgtggactcgcatggtacagatcgacgggtctgaccgttgagaatgccggacaacgcgccggcgcgtgcgacagagcgcccgaagctttggagccggatcgggattgccggatttctcccctctcaacggtggaaagggcgtctacagatgcacatgtaccccctagtctgatcaagcttgcaccccgcggttctgccgtatccaacggtctgcgacgacgctggcacaagggcctttttcggcgaaagaggcgcttctcgcaactcgccgacggttcccgcagggatgctgggtaactctgggacggttgtaaccttcaaatggactgtatctaccgttttcaacaccagaatacgttcgtgggagaggcggcgaggccgacgactgccctggccgagtcttggagcacccgccccggcctctgcacggtcgaaaatcccaaaactctccctcatacgaccaaaaatcgtcaccgagatgctatgcttgatgtacggccccgcgccgagctctccggaacagtccgggacccaattcctgactttctcgccactcagtctcagtgttccaacttctaagcgcattgtgggtctggttacttctttcatcttgttgacagcatcagaactgacatgtaccatgttgacggattccgtcgtatcttcagaccgagctggcaaacatgattctgagccaggaaaagccggtgagttcagtgtgatgaagccatggcttgtcctgaacagttctctttgtgaatgcattcttctgaaatttgctgcttacagagaaatgactcggccgagggccggcaagcggtgagctcgagacttccaagccgaagaagcgcctgagccctctgctcaacactctgcagagccgagcaagggcagcggaccgcatgcgataccgagagcagcattgggagttctgaatgcgagaggtttgagagcccctcaaaggttgtctgaggaggagggaagaggaagagggagaggtggcaaagccggcttgctcctttttgatacgcgagcgaggtgcagcgaccgcggtgtctcttactcttgcgacactgcccacgggccgcttttcgagaaaggtgttccggcggcggccggccttaacaaaaccaaatccaggacgcgcgagaacgctcaagtcgagacaaggagacgctctcatgcgcgagggcactgaccttgacgggatcccagccctttgaatgcgctacaaagagtgtgtttcccagtgtccagccaagcaaacccgcggctgcagctgcgaggtgcgcaagttcaggagaaggtgcgcaagttcaggagattccaagacgtgacctcccgttgttcactcgttcgcacgcgtccaccaggttattgtatctgcaattttagctcgacggagcgaagccctgctcatgtatttgactatggagcatttgactgtgctgcattgcccacattcttgcagacacgggcaagtcagagaagaagaaaccgagcgcgagttgcgccacccgcaaataccctccggactgaaccgctgaagggccgacgacctgtccctgaccagtagaagtgtcgggatcccttgacttacgaccagcaggtcttgcatgtcgcccagaatcgtcaaaactgattcctcctggttgcgctcaaaagccggatggtcaggccgtgtagacccaaatcgcctgaaacttcgcaccctgggcccctataggtcaaagtccagccggccacaagctcagcccatttcaacggcggtagaggtctgccgagcgaggcgcttgtgggaaattggactagagctgtaagccttgtcgtgcagcatatcgacaatctgaacggtcaaaataatcgtgaaggtgtttgaagctgttcaggcgaaaaagatatccatagagcgcatgcttgctgagatcaggcaagcgcctcttagttgtaattaccgtcgtgcgtgccagttccgacccagcctggctcaccagctcgagatacatgctggatcgctgacccttgtgctccgcccccctccagaatcttcttcttcggtatgtctgcagcggagtctgaagtcctcgacgcgaagttgccaagtcccccaagatgaaaattaacgttcttttgttcgtgcaggatatgatcaaggaatgatgggcggcgtcaacggcgctcttgactacgtgaccacgatgggactgggatacgtcacgccgggcgtagatggggccaagccgaccgccaccgtcacgcagtcgacgaagcaggtgagtcgtcggcaacgcatctatcttgtttttgtcccgccggccacgatacctttactgaactgctgtttgcatacagggaggaatcgtctcggcctactgtacgtcccgatcgtgtctccttcccgttttcaacctgacaccggtttctctccagacctcggaactcttttgggatgcttgctcggcgggtggctcggcgataggctcggtcgcaagaagaccatctggattgggtgcatttggatcactatcggagctcccttgcaggtgagtcggagttcactcttgccaccgttccgaaagccgcgatttcactttcgccaccgttccgaaatgaactcccgccaccgctccggaagctggcgctgacctccctctctctccgacaggcagctgcacagaacgtcccctggatggtcatggcgcggatcatcaccggagtcggcacgggccacctcaacgcgatcgtcccagtctggtccgccgaaacttccggtcatctctctcgcgggttcttcattgcgcttgaattcacgctcaacatattcggcgtggtcggtctatggttattcattcgtcttctgacccgcgtcctcgtggctgacgaagttgattcaccgccgccccaggttgtcgcatactggctcggttcgtttctcccgcgtctattgccgaaggagacggcgctgagtgaacgcgtcatacagagtatggactgtccttcatcggcgacgggaacacccagatccgctggcggttcccaatcgcgttccagctcgtgtaagtttcgcttacccgaccgtcgcagcagatcagacatactgatgtacgccggctctatagacctcttctcggcctcgcaatctgcaccttcttcatgcccggtacgcatttcgcctttttccggagcggacttcctcgctgactctcccgacaattgcagaatcgcctcgatggctcctcaaggcagggtatcgcgacgaggcgctgcatgtcctcactcgcttgcgctccgaagacggtcagatcaacgcggaagcccaggccgaatttgacgagatcgaccgagcgattcaaatcgacggtgcggcagaacccggctacatcgacatgacattccgctcgcacggcaagctgcatctgtcacgaagggtacgtcagattggcaaacagcgatgaaagctccgactgaccgaatcgctgttaccaacagactcagctcgcgatgtgagatcaatttgtctcctgctttccgttcctcgcgctgaccttttctctcgttctcagctggatccagatccttcaagagtggggcggtatcgccgctatcacgggtgagttccttatcgggctggtcggacgagaaaagcgcctgacgattcttttcccttcagtctaccaaccggtcatcttcggtctcgccggcttcgacgcttcgaaggcaggctgggtatcgggagtcaacacgatcacctacatgttttctacgtgagtattcaccttctccttgccacttggcgagacgtggtcgctgcaactgagtcgattttcttttgcagtcttatctgcgtcttcactctcgaccgtatcggtcgccgtgtcacgctcttctggggtacgttccacttggtcttttctttcttcggcttgctcttgaagcgatcactgacgaaacatgaccatgcgcaggcggcgcggttcaggctttcgcgctcatcatggcgggcgtcttcgtccaccttctcaccgttcaccccgaaaagacggctcagtacggaggtgctgctaccgctatggtgttccttgtgcgtcaagaaatgttgtctcactgtcacagactcggaatttgctgaccgggtctttcttctccagtacaccgcaactttcggcgcaacttgtgagaagtctcgccgcttcttctttgagcgaaatgaacctgacctttgtttcactacttcttaccgaaagggctcaccgtaccctggatctaccccgtgagtggcgatgccttccgccaagcgtagtcttcacattgctgacgccactcgtcttcaggccgaaatctggcccgtcaacgcacgagcgaaaggaaacgctatgggagtcgtcggatggtcgatcggtaacggatggtgcaccctcctggtccccgtcatgttcgacaagattaaggaggtcagtcccggtttttttgccgtccgtcgtcttcgctctgcctcaggtatgctgactgcctgcggtctacagaatgccctctacatcttcggcattgctaatattctcgctatcgctgtcgtgtgggcattctaccccgagaccgcgaaccgcactctcgaaggtgcgctcgtccgttcctcttccaaacgctcgcaaccccttctgactttcgagccttgccgtcttcacacagagatcgacttccttttcttcagcgacagctggttcgtgtggcacgccgaggcagagtactcgcgcctcaagaaggaactcgaggtcaccggcgaggtcccggacgatctcaagacgtcgacccacctcaaggagaagatcagcctcgacagcgccgcggcttgaacacaagagcactttccgtcggttctctagactcgtgtatatataaattctttgcctcgatcttcgcaatgtaccttcttgatgggagttcggtcctttcggtccttgatcctcttccaccttagacacattgttaccatgaggcgtctctccacgtcggaagtacggcacgctgccaacagtgcgggcgatgcgagataattgaatgggtcgcagagcaacttatgaagtctacgagatgtcaacattgacgcgattgacattcgggcgactccccgcttggcctcttcgctctcacccggcacgccaccgccacagtcctggggcctgcaagggggtcaacgtccttgcgttgcttgattgagaccggctggacgtgaaacggacgcgctctcaagcggcgccaccggcgacaagagatccgtgctggacgaggaccgtgtcgtcaaacctcgagcggtcgtgacaagatgcctgtggtcaccaacccgatcacacccacgctgagcgtctctgaactacgggcgctcgcgaaccggcacgcgctgccgcccatcgtggattctcaactcgccaagacggtgacgctgcgcacgacccgcccgcttcgcgcaggcaagacgcgccagtacagtctacccgaaatcgactttcaactcttggaggccttgggagacggcttactcgaggcgagcatatgccgagtcttgtacacgaacgtcacgagtcgggctgaccgttccgcagtgctgttctccgtgagttgggtttgcgtggtctttactgccgttcagggggtcgcgtggcttgttagggtatgctccccatgcaggcttatcggagtgtactccgcaacaatgggctactcgcccagctctcgcacggctaccgccttcatctgacgatgtcgccgcctctcgaccccgcgggcacggcagcaggcgcgccgttctcggtcagcgtgaccaagattctcgccgactcgttcgaagcatacatcggagggttgacgcaggcatcgggcgagcaagtcgcgaggtcgtggctcgaaccactcttgatcgacctgatgggtctgatctatccggccgtggaaggaccggatgcggtttcccgcggtgagtgtcaaagatgcgctggcgttcccgcgctgcagagctgaagaccctttcctttttacaggccagcgtacgccccgtaccgaaccgaacgccacgcctcgcaccgaacccgtcgccgccgaacccgtcgcccagcgacctccgaagcgtccgcgcgacgacgcatagcaaacatggcagtgtcgctcttctcttttgcttgcttgactagcttgacttcgagcctgtgtgaattcgattcgaacagcaattctgcggcgagcttgcaccaagtcaccagagatccagaacgaaagagagactggctacgagagctgtcttcgttcagtggcttttggggtgccaagagtatagtagggcgtagaagaagctgaaaagagggaccgagaaagaacacgatgacaactctgtccatttcgctacacacgtctgcaaacccgttctacatgctcgtgtccacccggcaaagctcagtcgcgaccagcgcacacctcgccacgggaaaagatcccgagattgtctatatgatatccttgaaaaccggctcgaaacacttgtgtccttcagtggaagggcacgttgcgaatgcgaccgcccgagccaaattgccggtgcggcagcgcgacttcaaggtcgcgacgaacgcggcgagtcaggcgcttcgagtcggccttggcgagcgagcaacccttgaccggtccggggcagacggcgtcgatcgagcccgacttggtgacggcgttggtgacgcactgctggacctgcgagatgcacgagacgtacgcagcgccgtacgaagtctggttgttgaagaacgactcgagcgacgagttgagttcggcttgcgtgaggttgtgcgcgttcgcggtcgagttgagcagagtggacgagtagtcgacgaggtcggcgaagaaggacgaggggaggtagccgtcgtactgctgtgcgatcgagaggatcgtcgtctgcgtgacgacgggagcggcggactgggtgatacattcctgagcggcggtggcgttgccggctgtcgagaaggtcgacttgggtcagctcattggatctcgaaagaagggcagaaggtcatcgagacgcactggatatgagttccgcagcgcacgactgcaagatctcggcggcggtgaccgtgttgcccgagagcgacgacgcgaccgagttgatcgcgttcgagatctgggcgccgacctgcgcgccgagctgagcgctcggggtcgtcgcgttctggatgttgtacgagaggatgttttcgacgctggtggtcaaggaagcgggcaagacgccgacaaactgctcgaggacgccgttcatggccgtctggagcgtcgtgtaggctccgccgggcttggtgaagcacgcgagcgaggaggtgttgccggcctgctggatcgcgtccgtgtagcactgcgagacctgctcgagagccgtgaccgagttgccggacagcgaagcgatgaccgactggatcgaagactggatctgagtgacgagggcctgctccgacgctggcaagagagtgccgagcaagggcgtaacggcgtcaaagacggacgagaggatcgtgttcggaaggatgccgacgaactgtgtgcgttcaagtcagtacgagcgcggaaaggcggacgcgcacgcgatgaaagctcacctgctcgaggatcgtgttgagcgtcgcctggagaccagccgagtcgctgccggtcggagtcaagcacgagtatccggagggcatgccgcccgccgcgagaacctccgagagacacttttcgagcgcggccgtcgtggtggcgttcaggtcgctctggctcagattcgcggcggcaaaagcctcgtcgagagcctgcttgatgttgagcgaggcagtgacggcgtccgaagttgtgatcagagtcgaagtcgagacttggagctcggtgatgttgcgagtgacggtgatgtaaaccggagccggagtcggagcgaggagagccgagatggtgccgttggcggcgaccgctgtaccgttcacggatgcggtgctgttggcgacggcactggcggtggcggtagcagtgatgttgttggccaagatggtcgttacggcaggcttggtgtgggtgactggagggagcgattcgggatcagcaatcgcgcgagaaagaagacgcgaagaaaatcgggaccaactcaccggtgatggtagtcgcgctaggcttgccgacttgcttctggatgacgctcgagatggctgtatcccccgaaacgcgagtcagtaaaggtggaagacagcaaggatttccgcgaaactcaccgccggaaagggcgcccgcgactgccggcgggatgtacgagctgttggcgaacgatccgacggcttcggcggcacccttggcgacagtctgcggcgaagcgccccggaccttgggcgccggcttcgacttgatcttggacgcgttcttggtccacgacttggacgagccggacgagggagacttgggcttggaggcggtctgatccgacttgttgacgacgggtgcggcgttattagagttgtcttgcgaggaggaggaggacgacgagcccgacgacttggacgacgacgacgacgacgacgacttgtgggaagcctgcttcttcttgctcgacgatgacgactttttcggcgacgggttgacgagcttctgaacctcgggtacggtgtactcgcccggcttgtggatcacgcccgggtgatcggagcaaggttcgggcgaggcggcgaccaagagcgcgagtgacgagagggcgagcgaggtgaggctgaaggaacgcatgacggagtcgagttggtcttggccggtgtgtgtgagggggtggtagtacgagggagtgtgcgacgcgtcgggtgaaaggggacagggaaagaaagtgtgaaggtccgcgggacgaagcgagcgtaaatttaaaggaacgagtggaaggtccgcgggcgaagtgcgcggtgggggtccgagagccgctttgtgacgagagtgcaggaaaggaggagatggagaaggagagaaagcgagaaagagagaagggcgcaagacgcgaagaaagtcgcgtcgcgtcgtaaaagcgcgccgccgaaagattcacgtgcgcgtcgagatgatcggatcggcggccgacccgcatgcattatggccatcgcaactgtatgtattgcgaggctgcaaagcacacagagttgtacagaggccgagcgagcatcccgtccaacaaactcgggtcggttccagcaaatcgctcggagcgactcggaaggcgaggtaccagcgtagcctcagccacaggggacagcggactccgacgaagcctatcaggtcgtacgatgaagcatagtcggccggtcgctgagagttagagcggcggtctatgtgctgttccagggatggccttggatgacgtcggcggttgagctgcctggtctggcgaggacggcgggccgcgtgctatggcgaggagaggcatggtacgaataactggccgatgtgtccccgcagcaggcagtctagccggttgagtgatccggagcaaagtccaacaaagtcgaggagagaaaaagagaagcgtcgctgctcccga

SEQ ID NO: 131 - DNA, 21152 bp, unidentified; identical to SEQ ID NO: 130
  misc_feature 1..21152: note = Fanzor polypeptide
  source 1..21152: mol_type = other DNA

SEQ ID NO: 132 - DNA, 21152 bp, unidentified; identical to SEQ ID NO: 130
  misc_feature 1..21152: note = Fanzor polypeptide
  source 1..21152: mol_type = other DNA

SEQ ID NO: 133 - DNA, 21152 bp, unidentified
  misc_feature 1..21152: note = Fanzor polypeptide
  source 1..21152: mol_type = other DNA
acgtccgcgccggcgcgtcatcctcgcctccgacatctaccgcgggatactccttcagccggtctttcaggacaaccccatccctgatggcctcacccacgccaacgtcatggaccggtggagcgaggccggcggcatgttcgccgtctcactcttcaccgacattgccgtctttcgcctccttggaccttccctaatgttgtagactagtagaccttatttgttgtttgttgttagtcttattctcccccagacagactcgtcagctcgtgttacagagacgagtcagcagaagaggagagcaggcattggggacctttacacaccgcgtgtaaaaaaaatcccgcgaagtctgcaaacgggcttttctgtacggtcgcggggcccatctctgccctatactacgtatacacttatcgctacaacatacgcgactgctgcaactgtgtgccgtacccctcaacttcaccggacttgccattcggctgtgaaaattcctgagatgcagagggcactcgtctcaagcggatgcgagacgaggctactctgctgacagggagatgaccgtagagagacactcaacaataacactgaatcgagcgtagattgcgagatgtgagcggtgaagaagaaaagagaggggagcccgagggcgagctacgacaaagtgcgcccgagatcctcctccaacctccacttgccgcctcatccgaataacgtgtcgtcgtcttgatcttgagcccgagagtatggtagtagtctagggggagagatcaagtcagcgagggttcgaatgaaaaagcgagcgagtgaaaaggacttagatctggaaaaggccttgaaggagcgagagcgagacgagtctgcagaacgagtcctagcatgagacttaatggacgtagcgagagcgccacgcgttatatgactccgcctttagcaatcgccccactcccgacgttcagaccattctaaagacaggcaccctctgtgtcgcttgtacttacgaggcgctgtacggccgccgccaccttcttgtcaataactgcagtcggccttgcgcctgagaaggtcccgttctaacctctgcacacggccctacacactgtattcgggtaagataagagctggaccagaatcaagcgggttcaatccgctatatctgtccaatttttccgcagatttgcgttccgaaagacacagaacctccgtctcctttgaatcggcgagcggaatcgccttgttccgtcggaagcatgtcccatatggccgctttctgcttcattctgctctcaaaaggtaatgccaagtgactgaatgccgtagtcagtggcacgaatccctcacgagtcctccggcaagtattctgtctcgaagacgattttcggtgggtggcggagtggcggcacccaccaaaagcgctcgattgcttttagcgtgtcaatacggagcccataggagtcggcgttgtagtggtatgccgctacagctggtagctccagatatcacccgttatgcagctccatgtcccactctatcgtatatgcgttgaccgccttgattgcacgcatttgtgtctcatttgcgtatatagctcaatttgcacagaacacttgcaatacgtgagtaacgtagcggttaaagtgttagcgttcggttcggtatacactttttgtcagccgagcgttcgcttcccggtgagagcatagagacaacggttctgcgttcagacggccatacttatcgcacctcctctcagacgctacaggctgctcagacaccgtccagatgacccaagtaagccaggccgttcagacgctgtccagactgatgaatccctttggcacggttgctgatcgggccgctggcgccttggaaggccgctcatccaaggagatcttcatcgagcactaccactcaatgctaggacatcagtccgatcgaatcctgcgacactacatgcgtcagcattactggtggccagaaatggtgaaggaaatcgaggcttactgccgaacttgcgcatcctgccaagctagcaaacccgaacgagccgcaccgagaggaaagctacaccctatccagctcccgttcacagcatacgaagagatttcgattgatttcaccggaccgcaccctgtcagcattgatgcggacggaatcgcgagattacattttcaccgtgattgacgccgcctccggagaagtcaagctcattccgtgcatgaaggccggtttgacgagcgcaaaatgcgcccaaatcttcctcgagaaagtgtacccgcaatggggtactccgaagacgatcctgtcggaccaagacgtccgctgggtttccgcgttctggaaagcgttccacaacgctctcggaacgacgctgcacgtgtcaaccggagcggccccttgtcgagttggccgccgctccgattggccaactcggccgctccggccatctcgacaggggatccggagcttgtcccggcggccgctgcgatggctcgattccatgcagctgatttgttctaccgagcgcatgcgagagatttacagtcgaccaccctatactaccgtgatcttgtggcgcgcaaggggcgcggtgctgcgcgccgaaatctgtatggtattctcaaactcaaatgatccggatcggctggcgcggctgcaagaggcctccacttgattggttgcctcgagaacttgaagtagtcgctagatacggttgacttagccgtttaaatacaagctatagtctcgcaaatagcgatagggaggagaatagctaaggacagctagtgtcggtagaattcgcccgagggagaagaaggaagacaaaagtcacgacgagaactacgctcagagtgcggagaccgcgggtacatgtggggggaccgggacaggtacatagtcacgatggagatcacagaaaggccgtgcttgtcgatccagattcgagaggcgagagagggcaggaagtcggaggagcgaaggatgatcgcttcgctcagaggtgtgacttggcgaggtgactcagagagcgaccctttttagcggtcgcggcggcggtgcctttgcaggtacgcttgcggcgaaccgagatcttcgcggaggtcgtttcggccgtatagcgcgggagcgaggcgttcgcgagacgaggggatcgacggagcttttggggcgacgacgccacggcgaccactcccggcatgatcggctgttcggcgcgtggggtgtcatgacgaggggtaacgggagcttgatcgacctccggcgtcggtccggcgaagtgagcggcaggggcgaagagttcgggagattgagcgcgttcgtccgcgtcgctcgagctcgtcatcgacggcgtggggccatcgaagagacccaatcccgcagcgttgatcaccaccttgaggtacgcgtcatcgagactccgaatggcgggttgtccgggttgagcgggagcgtgaagggccaagtcgagatccggcacgaaaggttgaggatggtgttccccgctcgagctcgcgagcgcgttccttccgtagaggtccgcggtgccaaagccagggctatcgaggctgccttcgcgaggagagaattccgggctagtgacgggcgagtgcgtaggccgaaaaccaggcgaaggaggggacttgcgtccctcgtcggcccagcggacgaagtggcgggctgacgtggcaggaggaggcggcgcagccgactcttgcgagggcgcggctctcgcagcagcgctcgatctcgctcgcggcagcggcccttcgcctcgtgctacacatcgacaccgacgactgtgcaccccagggcacccgcccgatctctcgagtacgcccgactccgcttttgaggactcgacggcaggacctttgtcgacaacaatgcaagttggaggccctctccgctcggtcgcatgggcagcgacaccctctcactcgagagtccgcgcgcagcatgcacgcagggcaacgacggcgttcttcgacggcataggcatcatcaacctttgcccgagacggccgcaggcgctgcgatccgtcgacgatggcattggagggaggaggcgccggcacgctctcggctcgctcgggaggcgtcgtatcccaggtgggcagattccttttgagagacgcgtgtgaagagtaacatgtgctgatgcaaagactacgatgtcggcaaaaggcgaccgaccaactcggaccttgagactcgaactgtgggcccgctgcactcagaccttgggtccgacccaaggtctgagtgactgaggggcggcttttggcggcatgcctcggttgagatcgagatcgcaacaagggttgctcagcacaggcttgttcgcggagatgaactgactccgagttgcaccacagtgtagtcgccgatcgcgtgacgaaatgacgaccccgacaccgctggtgagaacgttgtgccaaaaagtatccgcgggctttcggtcgctgtttcgccgaagcagtacgccaatctgacgcgcgtgataccgcactcggttgttccaagttgacgggacaagaggctcagaatacaaggcggtatgggtggcaagagtcgcgggaacgggtgggcgtgcgagcctcgaaggcaaactgctgcaccaagtctgcactgactacgtcggtacgaagagatgtgtcacgtacggtcaagaggatgagatcgaattcaggggcggcggggtattgatcgatcacacgagatcgaaagggaaccgtctcgcgctgacccggttatcgtcgtttcgaggctggcccagagccgcgaggctatcctgctggcgatgaatggctcatgcgcagtctcaagactgaacaaggagcccgcagtgctgatcgacgctcgactccggcgagcacagaagggaagccgctcggacgcggatgccgctctcgcgtgcaacatcgccacgacgcgcatcgtgatcgaactgcgaccttggtcgaagggcgactccagtcctgacgtgcgacggacaggcgaacttgctcgagctctccctcgtcgcaatggcctcctgacttaaaacggcgtgctgtcctcgtgaccgaccgtcgataagaggagcagatggcattgacggagctaacctcaagcgctcatcgctgactgcgcgagtgcgccattctttgctacgcttgctctggagcacgcgataagctcacaagctggcagcgggccgaaatcagagcttgagcgccaaagaacccgcatgcgacgctgcgaacggaacacgcgggtaatgaactgcgacttgcttcatgcgtgacagtcaccatagcgacgcttggagtgcccgcttggaggggaaaaagtcgccgcggacaccccgcgagtgggcggacgggcgaaaggacttctccctttctcgctctaacatttgcctttactgcaaacgcttgaaggagacctcgcctcgcaccaaagcttgctctaagcgctcatatcacccatttccaaccccgccggctgcctccgctctcaacctccgactctcgaggcgcacgaaccccttctcccgttgtcccctcgacgacaaccgccgaatgctgctgccgcgcacgcagctcttgcttgcgctcgcggcttccatcgtactcgcctcgttaaccgcccgcctcgccaactggacgggaacaggaaaacagcagtccttcggagtccgcggagccggcctcgtgcacggacccttgtgagtacattgagccagttttaccgcgcggcaaaggaaactgatgcctacaatccacaacacagcgacatgggccagaagaccctcatggcgcacttgcggggcatcgcgcgcgagcagctccagacggcgcacgcgacgaccatgatggagaccgggaccggcatcaaggccacactcgggctggtcccgaggagctttggcggaagtgagttggacagctgcttactcatagccagcctcgactgaccagtggaccatcggaacagacgagtatgtcgttgtccgcgacctgaaccccgtacgattccagcttcgccaagggacgctccagtcggcgacgtgggtgagggacaagtccgccacgaacgtcgccaacaacctcgcagctgccgagcgagccaagatcgaagagatggaccgcgagatccgcgaggtcctgggcgccgagaccgtcatcatcaacattgtcgacggcgacaagaggccggaggcaaaggcagctaccctctccgaccgtcaccgtcgcttctcgcggaggcaccaccaggaatcgaagctgccctgcgggaagaagcgcgtcgagctcgaacagaccccgcccaacgactcggactggatccaccgcgctgtgagtcctttgtctggtccagtcacacacataacggagcgggagctcacgcaaactttcaaaacagggcgacgagaagacgatctactttgttgcgcccgacgaagcagatcgcctagtacagcatcttgtgacgcagtcgttcgacacaccaaagtacgacctccccgccaactctcccttcgccaacagcaacatcgatcggctcatcgacatcgtcaagcgatacccgccgtggcgtcgaattatccatacgcgcgacctcgatgcagtcatgcacacgacggcgtgcgaggcatggttcgtcctcctcacctcgtggtcaaaagtcgaggagggggcggtccttacctcggacgccacggtactcgaagacatgctcgagccgtacgttgccgagggagcgcagcggctgcattccgtccagcgcgatgtttctgctgccgctccctctgcaccaaggactggccgtggcggcgccctaggcaagaaggcgccgctgccagctcgtccaaacctccccgtgctcttgactcagctcggcgcacagtcggcattccgcccaacatccctcgacagattgccaaccgaacgacgccggggcgatacaatcgtcgtctttctccccggcgtcgacgctctcccaggcttcggcagagatcaatgtcgccgtgcgcgcgtgtcgagccttctgggaaacgactacaccggcagcggcatcaaaggcatctcttgggcgctcgtctcgagcggtctcggcgagtctttgctttcgatgagggaagaggactggtccgaccctcaaaagctcgagtcgcaggtctcttccctcgtctccctcctcgcctccaccgccgccagagccaagacgtggcgggctggaggcgactttggcgaggtcgccaagatctcgagcaagagcacgtcgatcgggcgcgagcagatcctggacctgatcgagtcggtgcgcgttattcgaggtgagaacgtcaactacgtcgcctcgacgttctaccacaacggcgatccgcgcggacccctgcagttcaagcaagctccgccgtcgactcgcccaaatcgctacgacgtcgactcccgccagccaagccatccctacctctctcgcccaggtccgcaacacgtcgtgccacaaggtctgaaccagtcgccgacgctgccgacgagcatcgtcaacccacgcctctcgaacccgctacaaccgtctcggacggtgcccgctccgggcgagaccgatccctcccgtccaaagatgtcgaagattcgtgttcggccgctgcagatgggaggaagcgggcagagcgtgttcatggctgcgcgaacgcatggtcccgagctcactcctctcgacgacaagaccatcgcgcgaatcatacaagcagacgccagccttcctgtcgaggtcaacgacgacgacgacgcggtcgactcggaactggagattgttcccgaagatgacgacgacgacgacgacgaagacgacttcacagcagtgccaaagcaaaaaggaaagctcaatcgtgtggagtcgtactttgcaacgatcacctcgccgggcaagaaccatgccgccgcgagtcgcaagatcagcgacatcacagagtcgccccgaccagtctcgaccgcttcggcttctgccaacaatgccggccgcagcggcgcacaacagaccgccacgcgtatcacgcgtctcacatcggcaagagctcctccgccagagccgtcgaggcgcaaagatcgcgaaccagtgcccgcgccccggcagacccgactcgcggggaatcccgcgatcaccgaacaagaggcagctctcgcatcgccagacccgatgctcctcatcatgtcgctcgccgtcaagctcgggaatcgctttgtccacagtgcgtttgcgttcttgctggaactgctgctggaacagggggaggcagggatgatggcgacgagggatctgctactccagcggaaccgagcggcgcagtgcctcggtcgtcttgctgctggcggagcataccgtgcggcgggggagcagtggttcccgcggcaaacccttgttatctctgagctggagaaggtacgtccggtcatacggtcagaatcgagatggacaagagaactgactacagtctctgagcaggaggccgtcaactcggccctcgcctccggtctcgtgcctcctcctcgactctcggtcaaggcgttcacaatagcctacgctcccttccaaaccaacctgaccgaatggccgcgaacgcacacgcgagacgaactcgtcaacttgggccagttcgtcgcgcgcgacctgtccaagaacgcagcagaagcgctgagcaaagtcctgcggaaggcgcacaaggcgttctcgctcgatccggcatcggaggctgccctgcagtcggcaaacatcgaggcttccgctcgattccgcgcgggcctcgggaactggttgggcggggtgctcgcgactgctccgttcagccaggcgtcggctcacgcaggcgccgcgaacgaagaggacaagggactgccgagtcgagaaaagaccacgtcgtacaacttgcgaaagggcacgaccggcaagagcggcgacacgcttcagcaacagcacggcctcggcccgaagatcgacccgactgacccgcgcgaaccccccgctctcgacctcgggaaagagaccgaaaagtcgctcgagcagatgatcaaaaagctcgtcgactcggtcccgcctggcagcatgttcaatcgatcagatatgcatgacgcgctactgcaagacatcaccacgatcgcgcagcgccttctagcatgccgggaccggcatctcgagatggcgctggtgctgctcagatacaagaagatcgagaacgcgacgaccatggccttcgacgacgtccttgcagggaaaatgccagagatgggggccggaacgcttgccaaggggttgctagctctggtgatgagactgcgacagatgagaacgctatcggggatcgagctcataccggtgagctgactggcacggcggcgtcgagcatagtcaaagggagactgactggcttgtccttttgacagtatttcgacccgcaatgggtcgatgtagacctgtacaccctcctccagtccggccaccggcaccgcttcaaggtgctctgcacagatctcgaaagaacctgtaccaagatcgcatgcggcctcctcccgttcgtcgatgaagacgaagggagaagagtcgagctctttgacctcttcaggcgggtgttcgaagtgtggcggattgacgaggacgaccccgacaacagagacaaggactcgccttggtcctggatcgaggccgagaggacacggtcgacgagcatccgcctggtcgtcaagaaggagagcgtgtccctcgtcgccaacctcgatcgggtcctgcgcattgtgtttggcgtggaggagaccttctacacctacatgaggcggaccggagctcaagtcgaggtgatgaaccagctcttcgatcatcgaatgttgccgaacaagttcgttcccaccgggcacatgcgcatgtcctcaacaaaggtccagttcaccggagtcgacattacgaagatgaccaaacttggacgagaggcgctgccggagaagagtatggctgtctgatgccgaaaagaattgagctgcgctgactcgccctacccagatctcgacgcaggaaccgcatgggcgcacgtctcacaactaccgctcactcaactgaaggtcaaggagtactttgccaagatgatgccgtcctttcagcgtcgcgtcgtcaacggcgagatcgtgtttgtaccgatcgtcgccatcgcaaaacccgacgcagacgtgatgctctcggaacggcgcgatccattgccgcccagatccgctcctcaggaagggctctcgcgcaaagagcgacggcgcgagcggcagcggcaagacgccctggaccgagatcgctccccggtcgacctccgaacgccggtacgcgagaaggcgccaccaagtcgaacgcgaaaggggataccggtgtcttggccaaacctgcgattcgaggggggaaggaagttggtcaatgactttcttggagacaccccgctcgaccacatccactccgccagcatcgacaccggcgtcgtctgtccagtcgcgaccttcatctcgaatccggttcgggacggcttaccaacgcagcgtgccgaggcggtggcgacctattcgcgtgagactctgctcacccagcagcgtcagaccagccgccaagcttcacacctcaactcgtatctgtcgaaccagttcgactttacccgatgggcggatccagcttccacagatgttcgagcgtcgggtacgtcgccaatgccagaaccggatccgatgcaagaccctctgctggtgaccggtctgcacttgctcaagagcatgcactcggtcttcgacgggcggtcgatccagagcaaggtcgagcgcaaggccgaggtcagttcggtggcatctcagcacgtcgatctgatattgggtggcaaggatcgctggaccgaagaggaccgcaagacgcgcaaggtcgttgtcatggtcggctcagcggacgatctcgcgaaatcttccggaatgaagggtgctgtcaccgccaacgtccttgtgcgggaaatctctgccgagctcgcgcgccgcagggtcaacttcatgatctgcgttgttcccgagaactacacatcccaacggtgcccgaacccggactgcgtcgatgcgcagggtcgccgatctcggtacgtttgctctcgtgtactctgagggtgatgcagctgaccgactggtgatctttggggacagagcggagaacccgcgtcaccagggtggaggaccaaactaccgtctcctccaatgccagcgatgtagggcggtcttccaccgggacggagtcggggctgccaacattgggagtatggggtggtgcctgctgcggagtgggttgcagctgtggggggagaactggatgggaccaggaggaaaaaaacttgcggaagcgaaaaatccctaaaaaaggggggatcaatgggatctacttgtagaaccctcgctttctccgtgatcaatctgacttctatctcctgtgtgcggtaaccacaaacaggcgcttgcgcttgcgcttccacgtccgcaaagaggcgcttggcgcttctgctcccctatggccccggcctgcttgagactccgtgtgtggactcgcatggtacagatcgacgggtctgaccgttgagaatgccggacaacgcgccggcgcgtgcgacagagcgcccgaagctttggagccggatcgggattgccggatttctcccctctcaacggtggaaagggcgtctacagatgcacatgtaccccctagtctgatcaagcttgcaccccgcggttctgccgtatccaacggtctgcgacgacgctggcacaagggcctttttcggcgaaagaggcgcttctcgcaactcgccgacggttcccgcagggatgctgggtaactctgggacggttgtaaccttcaaatggactgtatctaccgttttcaacaccagaatacgttcgtgggagaggcggcgaggccgacgactgccctggccgagtcttggagcacccgccccggcctctgcacggtcgaaaatcccaaaactctccctcatacgaccaaaaatcgtcaccgagatgctatgcttgatgtacggccccgcgccgagctctccggaacagtccgggacccaattcctgactttctcgccactcagtctcagtgttccaacttctaagcgcattgtgggtctggttacttctttcatcttgttgacagcatcagaactgacatgtaccatgttgacggattccgtcgtatcttcagaccgagctggcaaacatgattctgagccaggaaaagccggtgagttcagtgtgatgaagccatggcttgtcctgaacagttctctttgtgaatgcattcttctgaaatttgctgcttacagagaaatgactcggccgagggccggcaagcggtgagctcgagacttccaagccgaagaagcgcctgagccctctgctcaacactctgcagagccgagcaagggcagcggaccgcatgcgataccgagagcagcattgggagttctgaatgcgagaggtttgagagcccctcaaaggttgtctgaggaggagggaagaggaagagggagaggtggcaaagccggcttgctcctttttgatacgcgagcgaggtgcagcgaccgcggtgtctcttactcttgcgacactgcccacgggccgcttttcgagaaaggtgttccggcggcggccggccttaacaaaaccaaatccaggacgcgcgagaacgctcaagtcgagacaaggagacgctctcatgcgcgagggcactgaccttgacgggatcccagccctttgaatgcgctacaaagagtgtgtttcccagtgtccagccaagcaaacccgcggctgcagctgcgaggtgcgcaagttcaggagaaggtgcgcaagttcaggagattccaagacgtgacctcccgttgttcactcgttcgcacgcgtccaccaggttattgtatctgcaattttagctcgacggagcgaagccctgctcatgtatttgactatggagcatttgactgtgctgcattgcccacattcttgcagacacgggcaagtcagagaagaagaaaccgagcgcgagttgcgccacccgcaaataccctccggactgaaccgctgaagggccgacgacctgtccctgaccagtagaagtgtcgggatcccttgacttacgaccagcaggtcttgcatgtcgcccagaatcgtcaaaactgattcctcctggttgcgctcaaaagccggatggtcaggccgtgtagacccaaatcgcctgaaacttcgcaccctgggcccctataggtcaaagtccagccggccacaagctcagcccatttcaacggcggtagaggtctgccgagcgaggcgcttgtgggaaattggactagagctgtaagccttgtcgtgcagcatatcgacaatctgaacggtcaaaataatcgtgaaggtgtttgaagctgttcaggcgaaaaagatatccatagagcgcatgcttgctgagatcaggcaagcgcctcttagttgtaattaccgtcgtgcttgccagttccgacccagcctggctcaccagctcgagatacatgctggatcgctgacccttgtgctccgcccccctccagaatcttcttcttcggtatgtctgcagcggagtctgaagtcctcgacgcgaagttgccaagtcccccaagatgaaaattaacgttcttttgttcgtgcaggatatgatcaaggaatgatgggcggcgtcaacggcgctcttgactacgtgaccacgatgggactgggatacgtcacgccgggcgtagatggggccaagccgaccgccaccgtcacgcagtcgacgaagcaggtgagtcgtcggcaacgcatctatcttgtttttgtcccgccggccacgatacctttactgaactgctgtttgcatacagggaggaatcgtctcggcctactgtacgtcccgatcgtgtctccttcccgttttcaacctgacaccggtttctctccagacctcggaactcttttgggatgcttgctcggcgggtggctcggcgataggctcggtcgcaagaagaccatctggattgggtgcatttggatcactatcggagctcccttgcaggtgagtcggagttcactcttgccaccgttccgaaagccgcgatttcactttcgccaccgttccgaaatgaactcccgccaccgctccggaagctggcgctgacctccctctctctccgacaggcagctgcacagaacgtcccctggatggtcatggcgcggatcatcaccggagtcggcacgggccacctcaacgcgatcgtcccagtctggtccgccgaaacttccggtcatctctctcgcgggttcttcattgcgcttgaattcacgctcaacatattcggcgtggtcggtctatggttattcattcgtcttctgacccgcgtcctcgtggctgacgaagttgattcaccgccgccccaggttgtcgcatactggctcggttcgtttctcccgcgtctattgccgaaggagacggcgctgagtgaacgcgtcatacagagtatggactgtccttcatcggcgacgggaacacccagatccgctggcggttcccaatcgcgttccagctcgtgtaagtttcgcttacccgaccgtcgcagcagatcagacatactgatgtacgccggctctatagacctcttctcggcctcgcaatctgcaccttcttcatgcccggtacgcatttcgcctttttccggagcggacttcctcgctgactctcccgacaattgcagaatcgcctcgatggctcctcaaggcagggtatcgcgacgaggcgctgcatgtcctcactcgcttgcgctccgaagacggtcagatcaacgcggaagcccaggccgaatttgacgagatcgaccgagcgattcaaatcgacggtgcggcagaacccggctacatcgacatgacattccgctcgcacggcaagctgcatctgtcacgaagggtacgtcagattggcaaacagcgatgaaagctccgactgaccgaatcgctgttaccaacagactcagctcgcgatgtgagatcaatttgtctcctgctttccgttcctcgcgctgaccttttctctcgttctcagctggatccagatccttcaagagtggggcggtatcgccgctatcacgggtgagttccttatcgggctggtcggacgagaaaagcgcctgacgattcttttcccttcagtctaccaaccggtcatcttcggtctcgccggcttcgacgcttcgaaggcaggctgggtatcgggagtcaacacgatcacctacatgttttctacgtgagtattcaccttctccttgccacttggcgagacgtggtcgctgcaactgagtcgattttcttttgcagtcttatctgcgtcttcactctcgaccgtatcggtcgccgtgtcacgctcttctggggtacgttccacttggtcttttctttcttcggcttgctcttgaagcgatcactgacgaaacatgaccatgcgcaggcggcgcggttcaggctttcgcgctcatcatggcgggcgtcttcgtccaccttctcaccgttcaccccgaaaagacggctcagtacggaggtgctgctaccgctatggtgttccttgtgcgtcaagaaatgttgtctcactgtcacagactcggaatttgctgaccgggtctttcttctccagtacaccgcaactttcggcgcaacttgtgagaagtctcgccgcttcttctttgagcgaaatgaacctgacctttgtttcactacttcttaccgaaagggctcaccgtaccctggatctaccccgtgagtggcgatgccttccgccaagcgtagtcttcacattgctgacgccactcgtcttcaggccgaaatctggcccgtcaacgcacgagcgaaaggaaacgctatgggagtcgtcggatggtcgatcggtaacggatggtgcaccctcctggtccccgtcatgttcgacaagattaaggaggtcagtcccggtttttttgccgtccgtcgtcttcgctctgcctcaggtatgctgactgcctgcggtctacagaatgccctctacatcttcggcattgctaatattctcgctatcgctgtcgtgtgggcattctaccccgagaccgcgaaccgcactctcgaaggtgcgctcgtccgttcctcttccaaacgctcgcaaccccttctgactttcgagccttgccgtcttcacacagagatcgacttccttttcttcagcgacagctggttcgtgtggcacgccgaggcagagtactcgcgcctcaagaaggaactcgaggtcaccggcgaggtcccggacgatctcaagacgtcgacccacctcaaggagaagatcagcctcgacagcgccgcggcttgaacacaagagcactttccgtcggttctctagactcgtgtatatataaattctttgcctcgatcttcgcaatgtaccttcttgatgggagttcggtcctttcggtccttgatcctcttccaccttagacacattgttaccatgaggcgtctctccacgtcggaagtacggcacgctgccaacagtgcgggcgatgcgagataattgaatgggtcgcagagcaacttatgaagtctacgagatgtcaacattgacgcgattgacattcgggcgactccccgcttggcctcttcgctctcacccggcacgccaccgccacagtcctggggcctgcaagggggtcaacgtccttgcgttgcttgattgagaccggctggacgtgaaacggacgcgctctcaagcggcgccaccggcgacaagagatccgtgctggacgaggaccgtgtcgtcaaacctcgagcggtcgtgacaagatgcctgtggtcaccaacccgatcacacccacgctgagcgtctctgaactacgagcgctcgcgaaccggcacgcgctgccgcccatcgtggattctcaactcgccaagacggtgacgctgcgcacgacccgcccgcttcgcgcaggcaagacgcgccagtacagtctacccgaaatcgactttcaactcttggaggccttgggagacggcttactcgaggcgagcatatgccgagtcttgtacacgaacgtcacgagtcgggctgaccgttccgcagtgctgttctccgtgagttgggtttgcgtggtctttactgccgttcagggggtcgcgtggcttattagggtatgctccccatgcaggcttatcggagtgtactccgcaacaatgggctactcgcccagctctcgcacggctaccgccttcatctgacgatgtcgccgcctctcgaccccgcgggcacggcagcaggcgcgccgttctcggtcagcgtgaccaagattctcgccgactcgttcgaagcatacatcggagggttgacgcaggcatcgggcgagcaagtcgcgaggtcgtggctcgaaccactcttgatcgacctgatgggtctgatctatccggccgtggaaggaccggatgcggtttcccgcggtgagtgtcaaagatgcgctggcgttcccgcgctgcagagctgaagaccctttcctttttacaggccagcgtacgccccgtaccgaaccgaacgccacgcctcgcaccgaacccgtcgccgccgaacccgtcgcccagcgacctccgaagcgtccgcgcgacgacgcatagcaaacatggcagtgtcgctcttctcttttgcttgcttgactagcttgacttcgagcctgtgtgaattcgattcgaacagcaattctgcggcgagcttgcaccaagtcaccagagatccagaacgaaagagagactggctacgagagctgtcttcgttcagtggcttttggggtgccaagagtatagtagggcgtagaagaagctgaaaagagggaccgagaaagaacacgatgacaactctgtccatttcgctacacacgtctgcaaacccgttctacatgctcgtgtccacccggcaaagctcagtcgcgaccagcgcacacctcgccacgggaaaagatcccgagattgtctatatgatatccttgaaaaccggctcgaaacacttgtgtccttcagtggaagggcacgttgcgaatgcgaccgcccgagccaaattgccggtgcggcagcgcgacttcaaggtcgcgacgaacgcggcgagtcaggcgcttcgagtcggccttggcgagcgagcaacccttgaccggtccggggcagacggcgtcgatcgagcccgacttggtgacggcgttggtgacgcactgctggacctgcgagatgcacgagacgtacgcggcgccgtacgaagtctggttgttgaagaacgactcgagcgacgagttgagttcggcttgcgtgaggttgtgcgtgttcgcggtcgagttgttgagcagagtcgacgagtagtcgacgaggtcggtgaagaaggacgaggggaggtagccgtcgtactgctgcgcgatcgagaggatcgtcgtctgcgtgacgacgggagcggcggactgggtgatacattcctgagcggcggtggcgttgccggctgttgagaaggtcgacttgggtcagccatgcgatctcgacaacacgtccataaggtcatcgagacgcactggagatgagttccgcagcgcacgactgcaagatctcggcggcggtgaccgtgttgcccgagagcgtcgacgcgaccgagttgatcgcgttcgagatctgggcgccgacctgcgcgccgagctgagcgctcggggtcgtcgcgttctggatgttgtacgagaggatgttttcgacgctggtggtcaaggaagcgggcaagacgccgacaaactgctcgaggacgccgttcatggccgtctggagcgtcgtgtaggctccgccgggcttggtgaagcacgcgagcgaggaggtgttgccggcctgctggatcgcgtccgtgtagcactgcgagacctgctcgagagccgtgaccgagttgccggacagcgaagcgatgaccgactggatcgaagactggatctgggtgacgagggcctgctccgacgcgggcaggagcgtgccgagcaacggcgtgacggcgtcaaagacggacgagaggatcgtgttcggaaggatgccgacgaactgtgtgcgttcaagtcagtacgagcgcggaaaggcggacgcgcacgcgatgaaagctcacctgctcgaggatcgtgttgagcgtcgcctggagaccagccgagtcgctgccggtcggagtcaagcacgagtatccggagggcataccacccgcggcgagaacctccgagagacacttttcgagcgctgccgtcgtggtggcattcaagtcactctggctcatattggcggcagcaaaggcctcgtcgagagcctgcttgatgttgagggaggcagtgacggcgtccgaagttgtgatcagagtcgacgtcgagacttggagctcggtgatgttgcgagtgacggtgatgtagaccggagccggagtcggagcgaggagagccgagatggtgccgttggcggcgaccgctgtaccgttcacggatgcggtgctgttggcgacggcggtggcggtggcggtagcggtaatgttttcggccaagatggtcgtcaccgccggcttggtgtgagtgactgagggtacaaacgcgggatcagcgatcgcgcaacaaaacgacgcgaggcaaatcgggaccaactcgccagtgatggtcgtcgcgctaggtttgccgacttgcttctggatgacgctcgagatggctgtactctccgaaaggcgagtcagtacgagtgaaggggaccagagaagccataatttctgcgcaactcaccgccggaaagggcgcccgcgactgcaggcgggatgtacgagctgtcggcgaacgatccgacggcttcggcggcacccttggcgacagtctgcggcgaagcgccctggaccttgggcgccggcttcgacttgatcttggacgcgttcttggtccacgacttggacgaggcggacgagggagacttgggcttggaggcggtctgatccgacttgtggacgacgggtgcggcgttataagagttgtcttgcgaggaggtggaggacgacgagccggacgacttggacgacgacgacgacgacgacgacttgtgggaagcctgtttcttcttgctcgacgatgacgactttttcggcgacgggttgacgagcttctgaacctcagggacggtgtactcgcccggcttgtggatcacgcccgggtgatcggagcaaggttcgggcgacgcggcgaccaagagcgcgagtgacgagagggcgagcgaggtgaggctgaaggaacgcatgacggagtcgagttggtcttggccggtgtgtgtgagggggtggtagtacgagggagtgtgcgacgcgtcgggtgaaaggggacagggaaagaaagtgtgaaggtccgcgggacgaagcgagcgtgaatttaaaggaacgagtggaaggtccgcgggcgaagtgcgcggtgggggtccgagagccgctttgtgacgagagtgcaggaaaggaggagatggagaaggagagaaagcgagaaagagagaagggcgcaagacgcgaagaaagtcgcgtcgcgtcgtaaaagcgcgccgccgaaagattcacgtgcgcgtcgagatgatcggatcggcggccgacccgcatgcattatggccatcgcaactgtatgtattgcgaggctgcaaagcacacagagttgtacagaggccgagcgagcatcccgtccaacaaactcgggtcggttccagcaaatcgctcggagcgactcggaaggcgaggtaccagcgtagcctcagccacagtggacagcggactccgacgaagcctatcaggtcgtacgatgaagcatagtcggccggtcgctgagagttagagcggcggtctatgtgctgttccagggatggccttggatgacgtcggcggttgagctgcctggtctggcgaggacggcgggccgcgtgctatggcgaggagaggcatggtacgaataactggccgatgtgtccccgcagcaggcagtctagccggttgagtgatccggagcaaagtcgaggagagaaaaagagaagcgtcgctgctcc

SEQ ID NO: 134 - DNA, 21152 bp, unidentified; identical to SEQ ID NO: 133
  misc_feature 1..21152: note = Fanzor polypeptide
  source 1..21152: mol_type = other DNA

SEQ ID NO: 135 - DNA, 21152 bp, unidentified; identical to SEQ ID NO: 133
  misc_feature 1..21152: note = Fanzor polypeptide
  source 1..21152: mol_type = other DNA

SEQ ID NO: 136 - DNA, 20549 bp, unidentified
  misc_feature 1..20549: note = Fanzor polypeptide
  source 1..20549: mol_type = other DNA
ggctacgacatgatgaatgaatgcacggcggaaacatgtcctcgtctccaaaagacaccacggcggcacctgtgtgtcgtgtagtgttgtgtcgtgtcgagtcgtgtcgtgtcgagtcaactctgaatagaatagtatattccatcatcactcatgatctttgcgtattcaagttgtaacgggttggccttgttcttccgttcgtgatggttatctagtacgcttgtagtgtaccaagaacatctcagtatggagttaaatgtgtcttgccatgatctacggattgaggttccaaactctcgcaagagagtcactttatcacgaccgagtgatatgcatacactgctaccttgattgatgacacaaggcttatgtaaaactttgtgccaaccgcgtctcgatgtgtaacggaactcgcaatcgacgataaatcccgagagcacgcctaccatctatatccatatagccaataatgatgagttggacatcgcgtggcaagcggtgcaacattaacattatgtcgttactgtaagcctagtcaaccgtctaccgttatactgtttacacgtaaaatttggcctgaattcatgttttctcgttgcaccacataataatgggcgttgttcgttgacatagctgaagtggccacagagctccgttctggcgatcagatcctcattcggacagcggggagcaatgagatcttccatcatggaatctttgttggtcccatttcaggatttcagattcccaatatcaaatgtacctacctgtatgtagcaacatgcccttcatcgggattgtgaaggggaaaccgcgggccccacggagccatgccaagccaagacacgccaggacacgccaggacattccaggccacgccgacaccccaagccacccaggccacgccaaatcacgccagaggttgcggcatctgcacttcaggggaactcgaagcaaattgttacttaagcgctggacccactaacaagaaaatgggctacaagccagatcttacagtcgtagacgcaatttgtgggacaccctaccggtgatccttgaacccaatgggtagatcagctaaaggcgagcacatatttttgcctttcatctctgtatttcagcatttaagctggcccaaaggataacaaggcaagctgctgacaaacccaggtgggtcggtcggtttagcgctcacactcgcctctctggaaactggggttttagggggaggcgagggaacacagaatacatacacgttgtcgaagcagaagaaggttcttggcagcgttcacgatcgtcgggtcttttatcatgtccggcgatcgtttgtacagccgccactcaatacgtttacactcgtttttagaggaacggcgaccactctcatcaaggacggcggcatctgtgtcgagtcgagtcgagtcgagtcgagtcacatcacatcacatcacatcacatcacatcacatcacatcacagctgcgaagggtggcaagagtaacggccgccgtccggctgaacgaccaagcacccctccttgatcgcatctgccatgccatcctcatcaaagctctggccacccatgcacaagcgcacatcatgggtgcatagctcgctgagcgccttcagctgcatgagatagttgtgccgccccccgggtggtgtgatgttgtcgcggaggccatgcatgagctggaccagtttgtcacgcttcttcgctgtatccttcacgttctccttgctcacgcggtgcttgcactcaaccaacaccaagagcttctgcggagcgcggatcacctcgaagacgccatcaaatgagtaggcatgcttgccatccgggcccagtatggccttgaacatcgggagctcctccacagactcggcacctaggctcatgtagtgcgtctcgactgcatggttgacttctgcttctgcaccgaagtcctcgttcgtcatccacccacgatgctgccccacagatgtagccagcttgttgacggtaccgatcgccgttgccaaggcctcctccatgacaagctgttgccgcagaatagattccacgagggcatggctctctgtagacgccatggacacacggccctgctttagcatcctgtagcacatgaatgttgaaggtatagacgcattgatgaattgtgcctactgatgtctggtaagttttacaacggagagccacttgcatcatagcgaatcttgtccacacggtagtcgagtcgagtcacatcacatggcgaccgacctctcgcatcatggcggaaactgtagagtcgaggcgagtcacatcacatcacatggcgacctctcgcatcaggcggcggaacgatgtcgatttacgggggacgatcgctcgcatcgcaaccggtgatcacatgtcaagcatgggtctgctagacaagcactctcgtatatcgatagggggatcgcggagtggggggattcatttgatgactcgcgtacaccatcactgtaacacttgggcttgcaacaacaagcccaaaaatacaataatcacacacaatttccttatataatgggcgttcctgcctcccggccgattttttaaaatttctaatcaggatttagagcctcttgaacgactcgctagcttgagacataagcaccaaggaatcacaattccgctccataccaagtttcgcaaccagtcaaaataggccgggaggcaggaacgcccattatatgagactttgccaaaaagggaaataacggatgaggaagacccggtaaaagtaatcgcaaactgtgatcacatgtcaagcagaggcctgctagacaatagatctcgtatatcgataggggaatcgcgggacccacggagtggggcaggggaattgagctgcagaagccaagaaccttcttctgcttctgacaacgtggatggacgggagagagcgacctgaggcattctgtgttccctcgcctccccccaaaaccacagtttccatcgaggcgagtgtgagcgctaaaccgaccgacccacctgggtttgtcagcagcttgacttgttatcctttgggccagcttaaatgctgaaatacaaagatgaagggcaaaaatatgtactcgcttttagctgatctacccattgggttcaagggtcaccggtagggtgtcccacaaattgcgtctccgactgtaaggtgtccttagtaccggtgggagatcaacggctgctcattgtttgtactgtcccctccgatgtatgaaatgattgagagtataaataaataatgagttgggatattaaataaaaggctacagaccatcctgtgcgcttgcatgcattgtacacacatgtttatagaacatgcattcgcacacgcgatcatcgttaatcctaacgcttccccatgacattcttgatcgtattgccctattctcttccaaccccaagattgtattagtgtgtaaaactctgcacaaaaaattttcgggatggccccttaccggattgatccaaccaccgcagcgagttggagagatgatggcgaaaggggggcgcgccgaccctctagcagtatgcttggtgtccaatcctcttgtacatgttcagggggccctacaattgagggcgaaccaaaatgaaaacaagcttctctatgtggctgccaaggccggtcacgccgatgtctgcaagctgcttatggatccagaggcagctggacttgagtttagggccagggcgaactctagctacagcttggccttggtggaggctgccaatgaaggccactcagatgtctgcaacctgctgatggttccacaggtggttggacttgagtatagggctctggagaactctagcgacagcagtgccttgtgggcggctgccaaggcaggtcacacagatgtctgcaagctgctcatggatccagaggtggctggaattgagttcagggccagggcgaacaccagagacagctgggcattgtgggacgctgcgagggaaggtcacgcagatgtctgcaagctgctcatggatccagcggtggctggaaatgagttcagggccagggcgaactctagagacagcagtgccttgtgggcggctgccaaggcaggtcacacagatatctgcaagctgcttatggatccagaggtggctggaattgagttcagggccagggcgaactctagcgacagctgggcattgtgtgcggctgctaaggaaggtcacgcagatgtctgcaagctgctcatggatccagcggtggctggaattgagttcaggggcctggcaaacaccagcgacagctgggcattgtgggccgctgcgaaggcaagtcacgcagatgtctgcaagctgctgatggatccagaggtggctggacttgagttcagggcccgggcgaactctagcgacagcatggccttgtgggcggctgcgaaggaaggacacgcagatgtctgcaagctgctcatggatccagaggtggctggatttgagttcagggcccgggcgaactctagcttcagatggaacttgtgtgcggctgcgaatgacggccacgcagatgtctgcaagatgctgatggatccagaggtggatggacttgagttcagggcccgggcgaactttagcgacagcatggccttgaggtgggctgccaaggatggtcacgcagatgtctgcaagctgctcatggatccagcggtggctggaattgagttcatggcccgcgcgaactctagcgatagcagggccttgcgtgaggctgccaaggcaggtcacgcagatgtctgcaagctgctgatggatccagcggtggctggaattgagttcagggcccgcgcgaactctgtcaacagctgggccttgtgtgaggctgcggaggcaggtcatgcagatgtctgcaagctgctgatggatccagcggtggctggacttgatttcagggcccgcgcgaactctagcgatagcagggccttgcgtgaggctgccaaggcaggtcacgcagatgtctgcaagctgctcatggatccagaggtggctggaattgagttcagggcccgcgcgaactctagcgatagcagggccttgcgtgaggctgccaatgcaggtcacgcagatgtctgcaagctgctcatggacccagaggtggctggaatttgttggtcatgggatggcatgtactccaccaggcgtgcacctgagtcctcgcgtgacactccgaacaggccattcaatccagcaattgcatcttcgagttttacatcgatgtagtagttcttcacttgctgggatggttccgactcctcgagtcacagagagactgactgactgactgacacacacacaaaggaatggacttaacagaggctgaaccacatgaacacggatggggagagaggggcgggtgattgacgaaagtgggcaggggaaactctaccgcaaccatactcgcaggcatgaatgacctggacgtcatacccaagaatttcgagtattttccatttcaagctaaaccatgtcacagttaagtcattggtgatggaacctaccaggcttcggacgggggtcgatgttttttccaccaacacacgtaattctctttcgtattcttcttgcaacattttgacagttcacgtcaaaattattattatatcaatgaagaaactcctttatgttgttctcaaataatatggtttgcctgttcctcgaacaacactttgtagtccgcctcaagctgccgcaaacgattatcaaagtcactcatcctcccttccctacatgctcaaaattattttggaaatgtgaacggcccggacagcgcatttctgctgaaggaggccaaagaacgcttcaagacatgcgaatatttcaacgggaaactcagcacgatcaagaccccgttttcttttgggccacggtaccggggaagaggcgatcgcttaagtgcggctggtccttcaatggatattctcgttaacatcttgcaatttgttgattcacaatcgtattggtgttccactgccccgtggatttctacaccgtacacgaagcagtttcattttagtattccgttgactgtagtgtaaaagaatggtcccactttacttacttctttacataaagaatggtccaactttacttacttctttacataaagaatggtcccactttactttatttgagaacaacacaaccgtgagaatttatataatgctcgacatcgaaattagtcacatactggatcgagtaaaagccggagaatgcaaatgggattcgggtcacttgagtgataatccatacctgacatgggacgtcgtgtcgagtaacccagacaaaccatgggattggtattggttgagcacaaacgccagtgtcgtcacgtgggacatcgtgtcgagtaacccggacaagccgtggaactggagtggattgagctcaaacgcgagtattttgtgggacatcgtgtcgagtaacctggagaaaccattgagttggtattggttgagcacaaacaccagtgtaatctcatgggacattgtctcgagtaacctggacaaaccatggaattggtattatttgagtgcgaatcccggagtagccacttgggacatcgtctcgagtaacctggacaaaccatgggattggagtggattgagcacaaacaccagtgtagccacatgggaaatcgtgtcgagtaacctggacaaaccatgggattggatttggttgagcacaaacaccagtgtagccacatgggacatcgtgtcgagtaacttggacaaaccatgggattggaattggttgagcactaaccccaatgtcacatgggacatcgtgtttagtaacctggacaagccgtggaactggcgtggattgagtgtgaatcccggagtagtcacatgggatattgtctacagtaacccggacaaaccatgggattggtattggttgagcaaaaaccccagtgtagcctcgtgggacattgtctcgagtaacccggacaaaccatgggactggcgtggattgagtgtaaaccccggggtagccaccctggatattgtctcgagtaacccggacaaaccatgggattggtattggttgagcacaccctccagtgtagccacatgggacatcgtgtcgagtaacatggacaaaccatgggattggtattatttgagcacaaaccccagcgtagccacctgggatattgtctcgagtaacccggacaagccgtggaactggcttggattgagtgcgaatcccggagtagccacttgggacattgtctcgagtaacccggacaaaccatgggactggcatttattgagtagaaaccgcaacatgttggtatccgtccaagacgcgtgccgtttagtgcgaagacgcagagccgcagcgactattcaggaaacatggagacacgtgaatacaaacccgagttatgttgtgtgccgacgcagactcttgaaagaattaattacactcccgttggtgagtacaatgtaagaagtagtacattgttacactcagaccggtcaataatgttacagtatattgaatcaattacaattctctatgtacaacttggacagacggtcgattgttgtacacatgtacacattgctgcaaagtttgaggagagtggctatacttgcgaatgtaagccacatgacagtctcgaggtggatctcaaaccccactaaaaaagtgtacaaccggaataaacctacaaaatcgtatgtggtcatagaattcttaaaggcgtcattaaaaatagatccattcacatctcttgctgttcttcgtcataaggtaaaggatgctttcggatttgaggtatcaaaagaattgattcgcgttgtgataaaaaggcttgggctcacaaagaaaaaagcaaagttcttctccaggcctgataacttatatgagaaaaccacgtcattcataagccaaagggaacggttaaaagaggaagggaggacttttgtatcgatcgacgaaacttcatttggaagacatacgagagacgtgtttggctactcaccaaagggagagctactggttgtaccgaggttgagacctagggtgacgacaatgtcggcactttgtcttattcaacaaggaaaaggagacatttattttaacatcaggcaagggtcttttaacacgcatacttttgttgagtttttagaaaatttggactgtccaactgacacagtaattatacttgacaacgttgctttatcaccactccaagaaggtcaaaacacttgcagcttcaagggggtgggagctcctatacactcctccctactcaccttggttcaacccaatagaaggggtgttctccatcgtcaaacgcgatttctataaaagccaagatgtgtataaggctttgaattctgttaaagagaaacacgtagaggctttttttcgaaagtcattgaatacaatttctggaccttgatacaaggaaatagatacattgtctactaaatggagacgatagtcaataaagagcctccggacaagcgtacgcgaccggaccgggcggccaaaattaaggacaggaaaaacggcgaggagaacgtggtaaagtgtacactgagtcggatcatagcggataaggacaacaaggacgttatcaccaaggtgattaaggagcgggtcgacagcgtatccaagaggacttatcttgccggtgttgcggtgaaccggatattaaaagaagtcttcgaaggggtaccagatgcgcaacttcacactgtaagtgtccctagcgtcgaccagaacttcattcggcagcttatggtggggtcgagacaggcgcacatggagacgagggacgccacagtcgaaaggttctttcacaacaactattggtttagggagaagattgaggggcgcgaggtaattgtgaaaaagaagaaacaatacgtgggtgccatcgctcgctacgatggcgatcgaaacctgtacagccacgcgtcgaagaagtacctgaccaatttcaataaccactacagagtccatctctccacatggatcaagaagttcgtttactcgaaggaaaacaggatcttggccaaggagttcaaagatgagcacggcattgacgagaccgtattccactgatacctcctctacgatatccactcttggggagtaaaggaagacctcatagcgatacattcgctcctaccggagcgaacaaagatgttgctgaagattcagcactcgatcatcggacgggacgagatcaaccgacagtggcttaagagcgtttccaacagcgccaagatgatccggtacaacgtctttatcaatcgatacctcgaggccacagaggacgagggctacgccaagctggtcaacattgctcccatcccaacagtcaagcactccttcatcacgatagacaccgacggcctactgggcgtcctcaaggacgtgggtctcgtcgagagtctcgaaaagacgctgacaaacaaggagcactgggagtcggtcttcgatgtggaaaacatccgttctactgggaaaggtgtgtttacatgcaccatagacactgacggtgtaatggcttgtacccactttcttagggccgagaagaaaaagatttcaatcaaggacgacggaacggcgattaagaagcagaccaagactctccgcgagttttccgtgtccgaccccaatgtggtggtcgttgcaaacgaccctggccgctgcaacattgcctttttgacttggaagaaaaataaggtcgaagaaaatgataaggggggtaggaagaggaagaggcactgcgagttcgggagcaagagactcacgcgggagcggtactacgttgagagcggggtcttcaaatctagaggtccgaccaagaagtggttgtctaacatccaggactgccttgacgacctgaaggacaacagtcccaagcgcacatctctagagtcgtttgacgcttacgtgactgtaatggtcaaccattgggattcttaatggggggagatgtccaagtcgcggtggggcgcgcagcgcctgcggctctacggtggcaagaaacgtgtcttagcacgcttcttcaacgaggtccaggcggatgtcggtgagaggaaaacaattgtcatcgcatacggttcttctaagtttgcccctggtggcaagggtgaactttctgtccctacaacgagcgcgttcaatgcgtttagagaccgtttcaatgggcgagttgccgtcattgacgaattccgtaccacaaagatctggcacaaggacagcaccaccgtcctccagagtgtgcaatccgaaaaaaaagggcgcacggttcgaggcttgctatggtgcagttccaccatggagaacagcaagttgtttgtaaaccgtgacctaaatgcagccattaacatccacaattgctttacaatgtacccaacccgccccggaattcttgcgaggccaaagaaatattgcaaactagaagttgtggtaggacgcacaattgattacaagctgacaggttctttacagaacgcagtgtcgagcgaagtgtagaagataaacacatacaagaggattttgggggactcggcatattatgtaacataattcccttgtccgagtgtataaacaatgctgattgagtgaaaagataaattgtgagcgaattacatgtcctgcactcgacgtaaatacggaatcccttgccaaccatattccaataaatgtccccgccatcttgctcacattccaacctatgcaggtgacagcatcgcttacttggaaagactggataaggcgaaaaaagaagtggaggcccaggtcgttgtcatgtcagcccaagctgtacaggatgcagccaggatagaccatctggcatctcactccaatgtcatgtcagcccaagctgtacaggatgcagccaggatagaccatctggcatctcactccaatgtcatgtcagcccaagctgtacaggatgcagccaggatagaccatctggcatctcactccaatgtcatgtcagcccaagctgtacaggatgcagccaagaccaactatctggcatctcactccaatgtcatgtcagcccaagctgtacaggatgcagcctagaccaactatctggaggccgctaggtttccgcacaacccgggtatacggcattactactactacagtcaacggaatacttaaatgaaacatccaaataaacggtataaggaggcgatggtcctacaaaatggcccgtccagcaaagaaacctccttacatgacgcaatgcacatcaacaaagaccccgtgttcttttgggccacggtaccggggaagaggcgatcgcttaagtgcggctggtccttcaatggacactctcgaaagtaccgacaaaagaacgatacggagtctgcaggatggagggccgtgatctaaaaaataaccacgatgttctctttaacatcctgcaatttgttgattcaaaatcgtattgttgtagacaccactcggtccccctccggtggtcgcgacaacattaggttacaccgcaaggtgtgccgtacacgaagcggtttcatttaagtattccgttgactgtaatctcacaagcattcatcgggaattattggtcagcttggcaaggcaaacacttgtcaacacaccaagcaaattcatgaactccccgcaccccccttcagaattccagagtgatgtcattccattgagttttgctgttttcaggtgcataaagggttctaagttcatgatggtattagaactgattgcgtcaactgcggccgctgcaacgctggcagagaaggcgtgttgtcatcctgccactcaaaaggtggtagttcattgcacaatgtggatgtgcggttgcttactaccactgagtatcagattgatgctatcttcttctaggattagacgctgctctggacacggtgatttcaagactgctactagggcattgctagttttgctcgagacagccacaccgtatgctgtttcacctgtgattatgcgcaaagcatcaaagggggttgcgaggatgctacagtactacaacgacattacgactgagcttacattggacatgaacggtgtttcttgcttgatcgccagcatgcccaccgtctttctgagcgctgcgcttaatgtgtgtggtcggcaggtcagcataggtaccgacaaggtcagcccacagttccaccagctgtacaccgacatgttcattcggacatgtaatgagcgtacacaggaacactgtcatctggtgggactggtcagtctcttcattgcaactcgttcccagtcacagatgcttgccgtcatagatgcactcagtcaagacggtcttggaaatctgtttcgacttttagctgaactaccagctaagatacccataccatgcatcgatgtgttcatccatgtggccaatgaatgtgtagcgacagcacatctgccagcaggggtggaggatctctttatccggtccgcgattgccatactgctagacaatgagacagcgggggccactgttgcatcaatttcaaaaacgatgctgcgtgtagcaatagcagagcctgcttacgcccaggccatggcaacagcacttgaaccgcacatggctgtcgcgccaacgcgtaagcttgctcgtgatctgcttctgaatccatgctctattcatttacccgattatgcactgagacaattggggatgcgccagtctcttcatgacagggtacgcatagtatgcgaattgattaccttggatgtccctgcggaagcattgctaccactaacgcagacactgccctcgcatagtgatggtaggttagtggacataaacggcgtggatggactgcaaaatagactttgcgaccatgtgtgcgatacaagtaaagcgaaaattcaggcggctacaaatttgttgtgtgaaatggtcaaccaacatggagcgcaccatcctggtgcccaactccttatttggctctgcacagttgctgtagagttcaagccaagtatcgaccgtatcagcaccgctatgggaatacgcatcctcttgagcagcagcttcggctactcacacatggtcacaatgactaactttggcattggttacttagcatgcgtgtatcctcaacaccgttgggtaaccggcgacgacgatatgcactgttggatgctcttttacgaataagtttcttacactgcaaaagcagtcaaagcggagctccacgccaacatatgactcacccacacacatcgcttgtctcaagcaggcttctgcttgacaattaggcagaggatcattttggaatcgtttacccacacaaggccctttggaacaagagaaccagaacatggcgcgcccctaaacccgtgtaaccctcgtatgaatcatttatatatttttattagttttaagcagagatgggtatacactcttatttcggtatcggaacgataataatttcaaccattggtgttactatggttatgttatactatggtaaggagattgtagaatttagcaaagatattgcagaatctagaaatagtattgcagaatctagaaatagtattgcagaatctcaacgcgagactataagtatcttatcatctcatattaaatatacaaaaaaacttgcagaatctagaaaaaaacttgcagtgttgaaggcgaataacgctaccctgactaagatgttgaagcgtattttgcggtctattactgttgcggatgcagataatttttcagcggaagaaagacgatggtatgttgataattgttctgcgtacaacgtccattgtttgttgtctgatgttgactcttctttgcctacatccgcttaaagcttctctttattgttcaataacaaagaacatattgtttcttttgacagaggaactgctcgtcttagcaagcggtggcggtgacctagacagcactctcatcgattcgagaggtaagccaacctcgagtgtgcgatcagacatcgaaatactaaaatgaaaccgcttcgagctggacaggttcttgaaaaaatcacgctcatgatgcgtacacgttcactatagctttcctgaaatcccttatttctcctgcaatcttcactctcgtgttcgcgctttcttgagtccacatggggcatttttttagccattcattgaatttggctttgtaaaacggtcctgcttcgtttaagtatggtaaatggttcccttgctttttcccacacaccagcatcgccgcttcttcagcaagaccaatgcagtgtaggaaatgtttcttgatacagtctgcgcagtatttgtctctgacgagtagatgttcctcaagcagaattgactgttttgctatttccctcatgttgtattctggttcacttacgggatctatggcttggcaagtgtggttaggttgattatttgttatgttttgatgcttacaataccaaaagataaaatcgtgagagtgtctttctgacgatccgtaagcatggcgacggatgtatgttgtttacattacaaacgtttttttgtcaccccagcactcaccagcacgccccatgggggtcgtcttggtaaaacatggagacgtttggataacgcacagttcatatcaagcatgagacacactactgggtgcacaagcaagagtgataggcgaacggaggaaacatgatcggataacgcacgcacggcggcggatgtcacgacgcatgcctcacacagccttacacacgcgaatctctctctctgtccaactgcgactcattcaatgcgccgaacaaaccagaatttgccccccgtacacacacgtggtggtggtgcaatgcatttgttcaggccaaaaaaatggggagacgttgattcattttgttcgtccaccgagtgtagagacatatcgaccaaacggaagaaaaagtccaatgatcgacactttgcaatatagtgtgttgcacggagtattatgtgcactgggtcctgcagacagtgtccggttggaatcatgctcgaaatctcttaaccattccattacagtcggagacgcaatttgtgggacaccctaccggtgacccttgaacccaatgggtagatcagctaaaggcgagtacatatttttgcccttcatctctgtatttcagcatttaagctggcccaaaggataacaaggcaagctgctgacaaacccaggtgggtcggtcggtttagcgctcacgctcgcctcgatggaaactgtggttttggggggaggcgagggaacacagaatgccacaggtcgctctctcccgtccatccacgttgtcagaagcagaagaaggttcttggcagcgttcacgtctcggttccacgttgcaccacagcgcacattggatgatgcgcttttgacactgtctctacagtgcagtactttgtggaccttgacgttcttcaccaccatcttctgcttctcaacagttatagacccttcgattggggactctttgcaaactccgcgccagactacgctgtctgccttcatgttgacaagcctctggaagcagccgtgacatttacaagaagtgttgcgttcgtcgacgtttttgaacaaaacattcttacgacgtgagaggcacctcctgatctctttgatgggtccagaacatgaacgactgataccatacccttggttggaccagttgccgaagccaacaacggtcgtctgtgcccttggtgcaatcacatcgcataccttttcaatcgtcttctgtttaccaacgtatcgaaagaatcgcatagatcggtagcctttgttggctctgtgttgtaggaggatcgggagcgccttgagataagctctgacatggtcctgcaggtcggacatgttgctcgtattaggcgatggaatggacttcacgaggtcttgagtctcgtcattccatttgtaggtgcgacgcttgcttgtattgtacccagcaacttcgctaaagcgagccgagctgaaagactcgatgcgacctgcagaagatgctaccgtgacgatatctgtcattccagggtctactccgacacgcagcgcacccactgcgtcattgcactgtacgatatttgcgtcctttggatagcctgcgttttctccttcttcaacgacctcttctttacccgtctgcttcatttggacggatacccctttaccgtcgctgaggattcggttgtcaaagcgagaccttttcgtctcaagaccttggacattaaagtactttcggcacagcattgtatggttctcgtaacgtccatcgccagagacgctctcgagtggcgaatcacccatgctgagaatcttcatgaaagtcatggaagatatcgggacgtacgaaattgtgaagccgttcttgcgaggaaggatactgaacagacgggggtgatttgttcttgtttttttatctttcggatccactcgtccgacctctcccaactctgtaagcacgtgatggaacaatcgcattgtcaggtgcgctctagtgttgaactgcttccctcttggcatcggaaagagagccctcaagtgactgacaacctctttgatgtggatcgcatgcacgaggccctctgagatgattgtgtcgattttcgattctgggtactggaccaccgctttgacaatcttcttgaaatgtttcttcagagagggatgtttcaagcgcaggtacttgataacgaccctgtccacgtttgcccagacgctgttgcacgccatcgtcgccatttgtattgagacgtctgcgattacttgtccccaaggacgaacgtccaccttcacgtaccctgcaggtcttagggcgtcgaaagcaaccatggtatcattgaagctctggcccagagtatcctttcgaacattggaggttgataccgcaagtaggcacctgtaataaaagttccgatccaggtgtggcaactgcttgacgtcaaagtctccatcatcgaggcatcttgtgatatgaaagtttgcgaataagtatgccactgcaactgcgtggttgattaagagtaccatgctttgtatccttgaggagatctgatgcctcgatacatccatgcacagagaattaagcgtcttcttgacgacgctgatgttaatatcgtcatctcctttgtcttgcactacccccattaagagggggtgagtattctttttcttttggtgatataatattgtacccacatttctttataccatttcatacgttatcatgattgatgcagagataagacaccgcgcggttgttcactagattagatgcattgaatttttgtgtcaatcacctgaagacagtatctgtattgacaagatcggttacaaatcttgatttggtcaacttttcagaatccccaaatataaggtgtcccaatatcaaatgtccctagctgtatgagtttggcaagtcttgagactttgataccaatactacgggagcgattgaaggaggcttgttggtcactattacaagctgggtattgtgttggagtcagaaatacacttgccagttccatatcgagctgtatgtcaatgtatgatcgggggggggggggcgtttgactgtatgcattacctaaaaaataaaaaattgaaaccatttccatctgagcaaagcaatgaaacaaccaacccaactctatccacaacgttaaataactaataatgtcaacagtcggtgagaaaatatggttgcaacttgctaatgctgcatacaaatcacaagatccgtctctgattatctttcccaacgaattagctttgttgttcacattcggagacgctttcttcccagcgttctctcagttcgtggacaatcagatctatggaatggacatgtctgaatgctttgactccatattgtatatggacaaaaggaacagacacaaattgtttgcgctgaaagccttgtttgtgtccgaagacaatccaaccatctaccgaataatggagaggatgtacatcacccgacctggattggacatcaacatcgacttatttggctccgatacactgtcgatctcttactttgatacagaaatccaggaggtcttcttcgagaagatttgcatgtcttggctgcgcgtcagtaaggcagttcgagtgatcgcagagcgataccgcgaacacctccagaggaaaaggaatcacatggtcagtcacgtgctcgtgcctttcatcgtgcgaaaccacgtggcaacttaaaaaccacgtcaactagaccccgttctctgtattttttccatgaatacgggggctctgcttggtatcgacagcgtttcgaagtttagttattttcggaaagcaaacgaggcaactactgttgcaacctcccacaaattgctgtctccgactgtacttccgagagatccttgacagttcacatgcaaacgcaacggcggaaacctgtagcctctttctcgtccacacactcactctgtgaaaagagaaccagtcaaagtttcgccattttttttgtttttgtgtatttgtgttttgcatgcgggggacctggttggtcatgggatggcatgtactccaccaggcgtgcacctgagtcctcacgtgacactccgaacaggccattcaatccagcaatcacttgcttggatggttcttcacttgcttggatggttccgactcctgcatggttgcttgttgtacaatcggacaagggaattatatacaggattcacaacaacgtttacactcgtgtttcgaggaacggagaccgaccgaccactctcatcaaggacggcggcatctgtcgagtcgagtcgagtcacatcacatggcgaccgacctctcgcatcacggcggaaactgtcgagtcgagtcacagcacactgtgatttcgcagacccgtaccgtccccacgttcgtccatccatcctcacacacaccaaggcggctttcgctgacttcgaggcgcgcgaaaaacgtggcagaaatgccacgtttacactcgtattttcatgggcgcgcgaacacacgtgtcagatatgctgacatgtttcccctggttgcgtctgccacccctcgcagaaaaagtctgccatgggtactacagtcggcggaacatggcgagcatcgaggctggcatgtggctgcatatggattgcgtcaaccccatcggccatgtgcgtactaaaatgatggagcaggaggacaacaccgaggtctaggaactgcaataagtgggggaataaatacttgcgcaagcgtcacaaggaaggggcatgggcctcggtagtataaataaataatgagttgggattttataaaaggctatagaccatcctgtgcgcttgcatgcattgtacacacatgtttatagaacatgcattcgcacacgcgatcatcgttaatcctaacgcttccccatgacattcttgatcgtattgccctattctcttccaacccaaagattgtattagtgtgtaaaactctgtgcaaaagattttctggatggccccttaccggactgatccaaccaccacaacgagttggagagattatggcgaaaggggggcgcaccgaccttctagcagtatgcttggtgtccaatcctcttgtacaggttaagggcgtacaattgagggcgaaccaaaatgaaaacaagcttctctatgtggctgccaaggccggtcacgccgatgtctgcaagctgcttatggatccagaggttgctggacttgagttcagggcccgggcgaactatagctacagctttgccttgttggaggctgccgatgaaggtcacgcagatgtctgcaagcttctcatggatccagcggtggctggacttgagttcagggcccgggcgaactctagcgacagcagtgccttgtgggcggctgccaaggcaggtcacacagatgtctgcaagctgctgatggatccagaggtggctggaattgagttcagggccatggcgaacaccagcgacagcttggcattgtgggccgctgctagagaaggtcacgcagatgtctgcaagatgctcatggatccagcggtggctggacttgagtatagggcccgggcgaactctaccgccagcagtgccttgtgggcggctgccaaggcaggtcacacagatgtctgcaagatgctgatggatccagaggtggctggaattaagttcagggccagggcgaactctagcgacagctgggccttgtgtgcggttgcgaaggaaggtcacgcagatgtctgcaagctgctgatggatccagcggtgtctggaattgagttcagggccctggcgaacacaagcgacagctgggcattgtgggccgctgctaaggacggtcacgcagatgtctgcaagctgctgatggatccagtggtggctggacttgagttcagggcccaggcgaactctagcgacagcagggccttgcgtgaggctgccaaggcaggtcacgcagatgtctgcaagctgctgatggatccagaggttgctggaattgacttcagggcccgggcgaactctgtcaacagtctgcaagctgctgatggatccaga

SEQ ID NO: 137 - DNA, 20561 bp, unidentified
  misc_feature 1..20561: note = Fanzor polypeptide
  source 1..20561: mol_type = other DNA
gcgcttccgaagacgtacggcaactctttcaggacgttcctgaactgctggatcgggggaaatggaatgaaggccggcatttgactaacatacaggtgtcggtggagccttacagtagttctcaaataaagtgggacacaccttataatcatccagactgcagatcgttgcttttgggcaacgttggggggggtgaagaggtaaccgtcacatctgtcacatctggcgcatctatcacatccgtcacatctgtcacatctgtcacaaccggtggcctccggtcgcccacccactcggttcctcgcggactcctttatgggggctcccctctggtcgcccccggtcgctccgctgtggggaggtgaaaggggctccgccgcttgttgaataaaatctgcaactgaatacctgaaggcagttcgaacagaaaatccctgttcgtaaaggacagcagccccgggggagttgacccctatgatacccctatggagaattcattgtctttattactacatttcccccggacccgatgatatacgggtagcttaaattcaacggtagcattcagccaggccatcatgctctgggctcaacatgtcatgagctcttggacacgttgtatatattacaaaccttcctcagactcctcacaaaatatttgtagtgaaccacggacctgtatctggtttcaggggatatcattcaaattatactgagtttcccaaaattatttgagaacaactgtatgcattacctaaaaaataaaaaattgaaaccatttccatctgaacaaagtaataaaacaaccaacccaactctatccacaacgttaaataactaataatgtcaacagtcggtgagaaaatatggttgcaacttgctaatgctgcatacaaatcacatgatccgtatgctccgcatctgattcgctttggcaacagattcacttttccagctgtgatgttcacattcggagacgctttcttcccagcgttctctaagttcgtggaccatcagatctatggaatggacatgtctgaatgctttgactccatattgtatgtggacaaaaggaaaaaacacaagttgtttgctctgaaagccttgtttatgtccgaagacgatccaaccatctaccgcacaatggagaggatgtacatcacccgacctggattcgagcacatcaacatcgacttcttggacgaaactacactggataccgcttactttgatacagaaatccaggaggtcttcttcgagaagatttgcatgtcttggctgcgcgtcagtaaggcagttcgagtgatcgcagagcaataccgcgaacacctccagaggagaaggaatcacatggtcagtcacgtgctcgtgcctttcatcgtgcgaaaccacgtcaactagacgtggccacttaaaaaccccgtcaactagacggggccacttaaaaaccacgtcaactagaccccattctctgtattttttccatgaatacgggggctctgcttgtcatgaccaccatttggtatcgacagcgttccgccgtttagttattttcggaaagcaaacgaggcaactactgttgcaacctcccaagaatcttttacaaacaacgtacacattgtgtaagacttaaaagttacgtagttgatgtgaactgtgggcccccctccggtcgcccacccactcggttcctcgcggactagcttaaattcaacggtagcattcagccaggccatcatgctcttggctcaacatgtcatggagcaatgatttggttgctccaatatttttggattagaacccgggtcaaaaccaataccaggagagggtgcgtgtggatatgcgggttaagacactacacaagattttgatgcgatcatgcctgcctgcagaatgaacgatctatcccctttcctaagatctgttgtaatagcgcgcagaatgcgatccacctgatcggatgatgtgtgcactcctccacccgtcttgcacatccaggcgaaacactcacagttccatctgataaggcggtactcgtgcaagcttgcatggggcaactggataagcagactggcaatgttgactgctcgctcacgttgcatcgcctcgtctccttcctcaccactgcaaggcacgcatccaaacttgcggtgtccagctaagaacacgtcgtagcgcacaaactgaagtttggcatcgcgcattttgctattcccggtgggggagctgaagttagcgatgcttggtgtatcgctggtgtgagggcgagatacaatgccatggtgtgcataaccattgcgccaccccccgatcatcacaacaacgtggtctccgtggcgtaaggtctcgaaagccagagctgtgttgtgcacgacggtgtttgttggggccaacgaccaatggccagcatcctggtcctccagcaattgcaataacgaagccatcttgcgtcgtgagcaacggagcaaatgcccttgcagtgaggtgattgcagatctccattggcgcgggtacaggcagctctgaatgtgtattgtcaaactgcgccatacgttggaaggaatctgcttcatgcataacatgctcaatgttggtatctttatcgtgattagatgagacgacaatgaggggtttatatttgttccaggttcagtgaagctcagtgaagctcagtgagtgtgactgaggactcgtacgctattcttcttctacttttcgagagtgtacggccacaccggagtgtaacctaatggtgtagcaattcatggggcaggagaaaatgattttttttcgtgttcattgtacgcagggggactggacaagtagcagttgtgcaaggcactgagtcctacttagtctacaaccggatgaggctagacgagggaccgtcttggcaggttcttcatgttaggttccttgccatccaacatgaccagagctgcctgattggactcgggagtcacattcgaaatacatgtgaaaaagcttagtcaaacaaattgtcgtgtgtacactcgtgcaacaacaggattccttgtaccggcttcagttccgagcggatggtagtcgctcacactcaatgatgttagtgtttgcttcgtctacagtaattctcaaataaggtgggacacaccttataatcatccagactgcaggtcgttgcttttgggcaacgttggggggggcagataccactctcatcacggcggcacctgtgtatgcacaggtgccgctatggccctccccatcaaaaaataacgaaagtaacaaaattcagggaaacctaccattctacatcacggttgttctcatcctcaaccaaccaacctaaaaactgcttgtcaatggatgagaaccaccgtaccgcattaaacaagtggcggagcccctttcacctattccccacagcggagcgaccgggggcgatcggaggggagcccccacaaaggattccgcgaggaaccgagcgggtgggcgaccggaggggagcccacagtgtaacatcaaccagcagacacacacacacaccggagggggcatgtcgaagcagaaatcgtgatcgtaggcgcgaaacaagcaacgcacgaactccatcttgagggcatcgtcattcctgaaggcacgggcgagacggcatcttcctgaaggcagttcgaacagaaaatctctgtttgtaaaggacagcagccacgggggagttgacccctatgatacccctatggagaattcgttgtcttccttacactcgacggaatactaaaatgaaacagttttacaaaatcggcctcataccacaaaacgagcttgaactgcgcatgaaaagagagtgcgagaaacaattgccgatacgtacgtcggatgttcaggctgaggaggcacagcagcagctgcctcggttacctcagcccggcggcagagttcttcgatcgcatcatcagcttgaggggtgccgagcatcgccctaagctccgatacgtcctttgtgtccatcctgtatacaactgttcaagacatatatattacgtggcaaaacgagaagagatttcttcaaccccaacacaactacacaaattttaacatattcaaatacagtcgacggaatactaaaatgaaaccgcctcgtgtacggcacaccttacggtgtaacctaatggtgtaacctaatggtgtaacctaatggtgtagcaacccacggggtagtggaacaccaatacgattttgaatcaacaaattgcaggatgttaacgagaatatcgtggttcttttttagatcacggctctccatactgcagactccgtatcgttcttttgtcggtactttcgagagtgtccattgaaggaccagccgcacttaagcgatcgcctcttccccagtaccgtggcccaaaagaacacggggtctttgttgatgtgcaatgcgttatgtaaggaggtttctttgctggacgggtcattttataggaccattcactcaaacaatatatgattgtcaccacattatacctgttttttgatgtttcattttactgttccgccgactgtaggatatacgggtagcttaaattcaacggttttacaaaatcggcctcataccaaaacgagcttgaactgcgcatgaaaagagagtgcgagcaacaattgccgatacgtacgtcggatgttcaggctgaggaggcacagcagcagctgcctcggttacctcagcccggcggcagagttcttcgaacgcatcatcagcttgaggggtgtcgtacatcgccctaagctccgataaggtctttgtgtccatcctgtatacaactattcaagctatatatattaccgtcttataccgtttttttgatgtttcattttactgttccgccgactgtagttctcaaataaagtgggacacaccttataatcatccagactgcagatcgttgcttttgggcaacgttggggggtgcagcaggttgaagaggttctcgaagatacaagcctctttggtacaagccaagctcacttctctttgcatgacgaatgccggttgaaacaaagaacctcgcatctcgttgtttgcccccaccagatgcaagacggatccgttgaacacacgcatgtgacagcgaatggcgtcctcaatcccagagtaacaacaacattccctggtatacatgatgctgccgatcgctttcacaaatgcattcagtgtttgcgagttcaagactgcgtcatcggttgcagagatgaacatgcaccgtcgaagtttgttgttgttcttgatccctctcagtgggttgaggccctcggaaggccgcgcaccgcaaaacaacatgaaaggcaacactgttcctctgtgatgcattgtcgcatttgacacctcctccagtgacaccttcgccccgttggtcatgacgagttggccggaggatccatgaccacacaagacgatcacgagcaccgagtcatcatgtgagtgtgccacgtgatcatccaacagatccatcagctccgccttcttcaagtgcccaggaagcacaacgacatgaaagttgagtgggtgcaaaaagcgaacccacgtgctgtggtgaccttgcatgtccaaaccatccacattcttgcccaacattgttcctgcttcacgcatgtgcacacataaagtcctctgaatgtgatccgtaggaacataagtataatcaacatacaacaaaagtgccttgctactggatgatgaagagggcgagttggttggcagctcatgttcatggtggaaaaattgatgatctggctcttcttcatcatcatcatactgcgggagacgccgacgcatttcgtcaaatattttgaccctgagtacagtaaacacacgatttcccccttatccacattcacttgagtacagtaaacacacgatttccccttatctacattcacctcgcggtggggacctgcaagcaagctatcagggtgcaatttgtgatcttgggccgcatgaatccacgaattatgatcccaatcactctggtgtccaactaaaagtcctaattaagtttttgatctcagagatgtcggtgagaggcgttggccaggcagagaatccatgattctcaggatatgcgagccacattgtaacccgatgtctaaagtcatcgatagcctctgatattgttccccctattcccccctgacatgccaacaaggaatcttccacagttcgaatactgcaaatgaaacctgatatcggactactgtcgtctgtatactgaacggtgactgtgtacgttggtggcatttgtatgatttttagaatgattgggctttatttgtaaataaagcacgccttataatctaaaaactgaagatcgttgcttttgggcaacgttgaggggtgtacgtacccatgtcatcgtactcacctccttatattcaagcatgtgattttggcacggcatgcaacgcatctcttggaggggtatacagaggcaggcagcgtcggtgataggcgacctgaactgtcaagtcatacacgtccgtacacacgttaagctggatgaatacaatgaagcttggtgggcggactctacaagtggtctgtgacaaacgtaacagcttccgacccgctcctgcgcttttcttgtatgtcgagaattcttaacgccaattttataatggcgatgtcgtacatttatttccaaatattgtcgcttatgtattaaaaacaaccaacatgggacacaaatttgtcatcgtatctgcctcttgtccgtcacttgaagcatacaaccatatattacatccactataggaaatcatggggtttcgcatcatagcactggataagccccttacatattgcattactgaactactatcggtgtggcaggtgacttcattgccagccatcagagatgacaatggactcttctgcggccgtcaagcactgatgtgggcgcaggagaaggggttcgacatcacagaggatgctctcgatgcatgtagtgtcacaatcagcgaattgaaacaactgactcgcgaaaatagaccaggggggcaaagagtgaatcctgtgcatacattataattctctacggacattcaaaagaaaatgtagaaatgttctgtgacaagtacagagaaagctctaacgttgtttgtatcgacgaagcaggattttacgcaggcgaacaaagaaaatttatcttttcagaggtgttcatgtgaacacgtttaaaatagggagcaattcgttcaattaaaatccggaggaattcttcagtatttattttttgttgaaataattgttgttcacgagatggagtgtgcgtttttgctgagtttgtgagcaatgcacttgtcattcagcgcggatacgtgttcggcccctgacaattttatagaagtgcctacacctgttcttcattggagtcccgtcactccacacatgatattgtaagcagttgagacaagactgcagctgcttgttgtgttgcaccttgaattccgcaaaaatgtcttgctctacatttttatacattgttaacgaaactagatcatgcaacacctttgagtcgtacagcatgatctttgtttgcgtatcaatcatgttgatgatcgtgtctaacacatcttgtggcaatgcacccatgagctaagatgtgtttttagttacactcagaccggtcaataatgttacagtatattgaatcaattccaattctctatgtacaacttggacagacggtcgattgttgtacacatgtacacattgctgcaaagtttgaggagagtggctatacttgcgaatgtaagccacatgacagtctcgaggtggatctcaaaccccactaaaaaacgaaacttcatttggaagacatacgagagacgtgtttggctactcaccaaagggagagctactggttgtaccgaggttgagacctagggtgacgacaatgtcggcactttgtcttattcaacaaggcaaaggagacatttattttaacatcaggcaagggtctttcaacacgcatacttttgttgagtttttagaaaatttggactgtccaactgacacagtaattatacttgacaacgtggcgtttcaccactccaagaaggtcaaaacacttgcagcttcaagggggtgggagctcctatacactcctccctactcaccttggttcaacccaatagaaggggtgttctccatcgtcaaacgcgatttctataaaagccaagatgtgtataaggctttgagttctgttaaagagaaacacgtagaggctttttttcgaaagtcattgaatacaatttctggaccttgatacaaggaaatagcgacattggctactaaatggagacgatagtcaataaagagcctccggacaagcgtacgcgaccggaccgggcggccaaaattaaggacaggaaaaacggcgaggagaacgtggtaaagtgtacactgagtcggatcatagcggataaggacaacaaggacgttatcatcaaggtgattaaggagcgggtcgacagcatatccaagaggacttatcttgccggtgttgcggtgaaccggatattaaaagaagtcttcgaaggggtaccagatgcgcaacttcacactgtaagtgtccctagcatcgaccagaacttcattcggcagcttatggtggggtcgagacaggcgcacatggagacgagggacgccacagtcgaaaggttctttcacaacaactattggtttagggagaagattgaggggcgcgaggtaattgtgaaaaagaagaaacaatacgtgggtgccatcgctcgctacgatggcgatcgaaacctgtacagccacgcgtcgaagaagtacctgaccaacttcaataaacactacagagtccatctctccacatggatcaagaagttcgtttactcgaaggaaaacaggatcttggccaaggagatcaaagatgagcacggcattgacgagacagtattccaccgatacctcctctacgatatccactcttggggagtaaaggaagacctcatagcgatacattctctcctaccggagcgaacaaagatgttgcttaagattcagcactcgatcctcggacgggacgagatcaaccgacagtggctcaagagcgtttccaacagcgccaagatgatccggtacaacgtctttatcaatcgatacctcgaggccacagaggacgagggctacgccaagctggtcaacatcgctcccatcccaacagtcaagcacgccttcatcacgatagacaccgacggcctactgggcgtcctcaaggacgtgggtctcatcgagagtctcgaaaagacgctgacaaacaaggagcactgggaatcggtcttcaatgtggaaaacatctgttctactgggaaaggtgtgtttacatgcaccatagacactgacggcgtaatggcttgtacccactttcttagggccgagaagaaaaagatttcaatcaaggacgacggaacggcgattaagaagcagaccaagactctccgcgagttttccgagtccgaccccaatatggtggtcgttgcaaacgaccctggccgctgcaacattgcctttttgacttggaagaaaaataaggttgaagaaaaagataaggggggtaggaagaggaagaggcactgcgagttcgggagcaagagactcacgcgggagcggtactacgttgagagcggggtcttcaaatctagagggccgaccaagaagtggttgtctaacatccaggactgccttgacgacctgaaggacaacagtcccaagcgcacatctctagtgtcgtttgacgcttacgtgactgtaatggtcaaccattgggattctcgatggggggagatgtccaagtcgaggtggggcgcgcagcgcctgcggctctatggtggcaagaaacgtgtcttagcacgcttcttcaacgaggtccaggcggatgtcggtgagaggaaaacaattaatgggcgttcctgcctcccggccgatttttttaaatttctaatcaggatttagagcctcctgaacgactcgctagcttgagacatcagcaccaaggaatcacaaatccgctccataccatgtttcgcaaccagtcaaaatcggccgggaggcaggaacgcccattaattgtcatcgcatacggttctgctaagtctgcccctggtggcaagggtgaactttctgtccctacaacgagcgcgttcaaggcgtttagcgaccgtttcaaggggcgagttgccgtcattgacgaattccgtaccacaaagatctggcacaaggacagcaccaccgtcctccagagtgtgcagtccgaaaaagaagggcgcacggttcgaggcttgctatggtgcagttccaccatggagaacagcaagttgtttgtaaaccgtgacctaaatgcagccattaacatccacaattgctttacaatgtacccaatccgccccggaattcttgcgaggccaaagaaatattgcaaactggaagttgtggtaggacgcaaaattgattacaagctgacaggttctttacagaacgcagtgtcgagcgaagtgtaggagataaacacatacaagaggattttgggggactcgggatattatgtaacataattcccttgtccgagtgtaaagctaacgggataaacatgtatctaagagttacgcgcgcgacggcgtaagcaaaaactgcggtactaatgggacaggggggggcacgggcaaactcggtatacaaaatataatgggggtggggggcaacggggaatagagtactgaaaaagaaggtggttacaatatcccgagcgtttgtgggttgctacacccttacattaccatgcgattcacaccaaagcgtttccacctctacagtcggcggaacagtaaaatgaaacatatataatttccatctgtttcattttactgttccgatgactgtaggtcacacttgtacttgtcaaattacgtccgacgattgttgtatgcatctttgaaattagtgtaaagttacaggcggcggcgcgacgctcccccagtgcatgtttgtaagtcaatcatcagtgtcacagtaagccttcatctgacgtagttgttcctcacgaacattcgctaccctaacggatcctccatgtcaagtcgtagcatccatagtggaaccgttgcacacaaacatagcttgctgctgctgtctgcaaatccttagaatttgaatgccgcagtaagcgatgacatatgaccgattaatctcgatgatgtagctgttctccacacgcgcagccttaatggcagttacatctgttgtatcatgcacactcatctcaggtgtgaacactgtgataccatctgcattctctgtccaaacgcgtcccgtgtggtttgacaagctttgaagcttgatgactatgtctggcgccatgtcactccggagcatgtggacggtgcgattcatatagcttatcgacatgggaacaatgcctgtagaagtcatgacagcaggtgtattacacacacacataaatagttgctttatattaagaatgaggcctccgacaaaaaagaacggacgcttgatgaatggatcaagtgggccggtgcgctccgcatgaacgcatcgaattgcagaaaaataacaaaatgcaacgagaaagtatcggatgcgggtgaagtcgttgacaaaacttcaaagccccgtcatcctcacgcaaacggtgtcgtccagtcatcaatcatcctcgtccatcggagtacacacgcacactgtccagtcatcctcatcaatcatcctcacacatgcacggcggcttgcgcatacccttgttcgtccatcagcgtccaaacgacacacgaatatatgtcgctggggccgggctggggtcttcagggtcttgaggccgggacaaggatatgtcgcggaggccgggctggggtcttcagggtcttggcaaatcagggtctcaggtcgcgacaaggatatgtccgacagggcgatgcggggaatcaaagacaactcacgtagaggagactgggacaagagacgggactccaggggtgactcttgactcggggttacaagtgaattaagatataattgaagactcaggcgtaggcactctattcatagcttttcctatcggaatattcctaaagaacattcctcgaacattccttcgaaaattcccaattggatcttctctcaaagggtcgctcccaaacagacctttccctaggaaaatcccccacggaaccttccatcggccaactagatctcggatcgggaacattggacggcctactattgcgacggaaccttacgcaggtcctcgcccaaactacaactcaaagctctcatatctgactgtactgcgctacgtgcgtgtatctttgtgtcacacccgaaaatctgacacacgaaaatctgagaggggggggggtcaatccacaatccctagctacatcaggtgactcgccagggcgtgcatctgctactgcaagtttttggtcgacatacacatattgcagttgcagccgctcacgacgtgtcctgcggctctcatgataccctcctcgtcctgcctgatctcgaaaggtttctcccgaaaaagtacacagaatgcatgttagccattgtacatgcgtcaaatgaagtgaggcctctctcgaatagcatgtgcatgatggtaatgtgcccgtgtgcgaatgccttgtcatagtgatcgtcggcgtagccagttctgtctatcgcattagcgtccagtaggatctgcacgacctcagcgtacccaaacttgcaggcaatcatgaatgggtcgtcgaagtggttcagacggagacgcacgggtcctccagtgatgaggaaactcctcacgatgtctgggcggttgcgtctgatggccaggcccatgcactcaatgacaatcttgtcattgatgacatccttccagtattcttgcatgcatctcaaagcttcaatgctcccgtcactgtgtatggccgccgacgtctcactgagcatgcaagagcgtgctactttgggagagacatcagagttatcttggactaaagcgagtatgcacttcatgtttcccattgattgcatggcacgaactgccttccgcatggagcagaatctattcaccaacagatgtcgcatgtacccaggggtctcccacgctgccttttgcatggagcggctcagcgcccacggaaaaggtgttgaggatccgctacggtccacagtcaatgatgctatgtgtagccacacctcggttgggatcccatgatatgggacggatcccatgatgttgattgttgtgcctaagggaaacaagtgcgtggaattaaatgttgtaatcatcaaatgaaggaatcaatgaatagtcgatgatattgatcgtgtttaccttggacgtgaataagcaagtggggataagtagggatttatttatgtggtgaatgggttttgtgaatgaaataatgaaataatggaagaataaatagatggcaaaacccgctccgcgggtatccttgtatccggggttttagctcctatggtttacaaatgatgggcatcgttcctgccgcccggtcgatttgcacggcacacaccgcatgccccatgcaaccccatggcacacaccgcatgccccatggtacacacagcatgccccatggtacacaccgcacacaccgcatgccccatggtaacgcacacacgtacccgcaggccatgggtacacacacatgcccatggtaaccaagaacaacgcacacaaacggaactaccgcatgcccccgttacacaacatcccaatgtaacagaccgcacacataaccaagaccgcatgccccatggtacacaacctcacacaccgcatgccccatggtacacacaccgcatgccccatggtacacaccgcacacaaaccaaagccatatccgcaatgcccgtggtacacacagcatgcccccattgtacacaccgcacacaaccgcatgccctccgtgtgtacaacccgccacgagaacaggcagccccattggtagaacacctcatcccccatgttacacaccgcacacccgcatgcccattgtacacaaccgcatgccgcatggcacacaacccgcatgcccatggacaaccgacaccctctgcccccttgccaccctcatgacacaccaacattccccaaatggtacacaccgcacacaccgcatgccccatgcaaccccgtggtacacacaacatgccccatgcaacctaaagacctcaaatgccgggcttcgcccctgcacgaaacgtgcgtgatcctgtgttgtaaatctatctatcactcttcttcacgtgcgtgtgcgtgcgtttgcattattgcatgctttcggtcgagtccgacctttgcatcaatcatattaacgcttttaacgcgcacaatgtgagacagcaggagaaaagacacttctgaacgggtttgatcggttacaaagattgatggtcaactgtcaaaatcccaaggtgtccattttcatcagatcaaatcacaaacgtagcggccgtcgcgaaggggtgccgattgtacagaacacacacttgtattggcttcttttccaacagtcttcgcatcttgcagctttgcattccttgcatgaagaccccttcgtgcgcagatttgcgcattgagggcaacaccagttagcacccgcggcaccctcatcttcgttatcatgcgtcaagtccacttccaatgctctctgcccacgtttggcacgttgcacagtcagaggcacaacactaacactactagggccagctatggagttgcggcaaagagggcacgaattcagtcttggaaagcagtctccgcacacgaggtgatcgcagggaagggcgagcgctgcaacatgattgtttaggcagcaaggacacttccacaaagggcgctcgatctcaaccacctcgacctcattatcaaccacctcgacctcatcctcaaccacatcgacctcattctcaaccacctcgacctcattctcaaccacctcgacctcatcctcaactacctcgacctcattctcaaccacctcgacctcatcctcaactacctcgacctcatcctcttcatctgtagtcacaggaataaaatgaaaacccgtgtcagatattaataaatagagaaacacgggaaatgtaaaacgacatcgcagttgtacattatattaaaagcaaacaattgcatgtaccttggtcctctgacgacgacgatatatagcctgtcaagttgacataggatgacttgggtatgtttcctgtgttacgaaaaaatggagcataaaatcagtcaggcaggcagtgcagcaacagcatttgactatcctgtaatatagatcctacaagctcaactcgatctagcatcctgtaagttatcgaacaattgcgacagtgcaggcaggcattgcagcagcagcatttgactatcctgtaagctaggtccgaccagctcaactcgatctagcatcctgtaagttatcgaacaattgcgacagtgcaggcagcattgcaagcagcatcatttgtactatcctgtaatcatatccgaccagctgaactcgatctagcatcctgtcagctatcgaacaattgccgacagtgcaggaggcaattgcagcagcatctaacactatccggtaagctaaggtccgaccgcgagctcaacctcgatctagcatcctgtaattttcgaacagtcgcgaagtgcggaatggccttgtttgcctctcattcaagcaggcaagcagtattgactatcctgtaagcaagatccgccagctaactcgatctagctcctataagcgatgaaacaatcgcgatttaaaaacgccgattgagcgagcgagcaagcaattcctgagcaatgcgagcaagcagtttcctgagcgatgcgagcaagcacttcctgagcgagcgagcgagcatttcctgagcaatgcaattcggcaatgcaattcaaattagcgaacaggcgatgcaactcgtcgcaaaatcatggaagctatttcaaagacacctcaccttgggcctcagaatttccaggaattgagtggtaaccagcgaaagatgtggtgcatcctcgctggaccgagcatatgaacctaccaaacccttatcatgtttcagctgaaactctcgacgtttgacatgtctatcctgtgacacgtcacctttcaccgatgcgagcgtttgctgtcagccagctagcgacacgaacctccgggcatcgtgtggtttcgcatgtccgggcagcgtgtggtttcgcatgtccgggtagctcgcgacacgaacctccgggcatgccccatgcaaccccatggcacacaccgcatgccccatgcaaccccatggcacacaccgcattccccatgcaaccccatggcacacaccgcatgccccatgcaaccccatgcctcatgcaaccccatggcacacactgcatgccccattataccgtttttttgatgtttcattttactgttccgccgactgtagggataggaggaagacgggtatagatatcgggcaggaagggggggggggggggggggggctttgggcaggagatttggcttgcggggccagagaggtaaggtgatgtcgggattagggagaagggaattgatggtgttccgcagggggtggttggtgttccgcagggggggtccgcaggggtgttccgcaggggggggggttggtgttccgcagggggtggttggtgttccgcagggggggtccgcaggggtgttccgcagggggggtggttggtgttccgcagggggtggttggtgttccgcagggggtggtgggtgttccgcagggggggtggttggtgttccgcaggatggttccgcagaggtgttccgcaggggtgttccgcagggggggggggggggggggtggtgttccgcagggggggggggggggggggggtgttccgcaggggggggggggggggggtgttccgcaggggggggggggctttgggcaggagatttggcttgcggggccagagaggtaaggtgacgtcgggattagggagaagggaattgatggcgtgacgcagtggggtggttggtgttccgcaactggatgcagttgacttttacaaaaaaaatcatggatgcgcttaaactgccaagcacattcacgtgcaatgactttgcagatgtcctggagaaacacggcatacacgaacacaacctgagttataggcccggattcatatttccacctttgtacacagaggacaaattggcagcgtttgtgagagagtgcggggttctcaaacgacagtacacggacatgttgagaaacgattgagtattcaacttttacaacggagactaatatagattttgaaactgaagtagtttctaggcaactccgtgacccaaactgtatcagaaacacccccaatcaaagggggtgtgatcaggcctgcgcgcattgcagcttctaggcagctcccaaagccatcaatcgtgctctaaccaccaaatctcaagagaagtttggcaacttctacgtgtccaccctgtctagccaacgccagagcacgccccctctggcgtctaactgcttccataagagcagctcctcctagacagtctgcgtgtgtagggtggactggagcagacaggaggagtctgaccacctcggtgtggccaccctcggctgctctcagcagagcaccatccatctggtagtccgctcgcgcagggtgggctggagcttccatgaggagtctgaccacctcggtgtggccaccctcggctgctctcagcaccaccgcatcgatggcctcagctgacaccagctgtttgtaagaacataccaatgtaccgtgacgtggcgacccctcattcatgccatgcccacagaataacaaaagagcaacgtccacggagggctccaacaaccaagccaattggttcatgacggtcctccggtacacggtgccttcgagaacactgatctccataccagaacccaaaaccttgttgacaaaaacatcatggtccttcatggctccgccacatctgtaccccttcaagtcccttggcagcgtaccacactcttgcaatgtgtgcataagcacgggtcccaacccgtctacgtagtaacttggaaaaattaacaaggcgcgacgagtcttcacggacgccatcatgtgctcctactctcaaataaagtgggacacgctgtaatttccttttttgccaatccgataccgcgaattaataataagaagtgtctgtgaggtgtgctggcagtgataagagtccgccgtgttgttgttatgctgcaatcaatgacgatcgatttccagtgtggcattctcaagccgccgcgtggcatgatgtgtgataaggatggacgagacgctgcctctgccgtgcgtgatggggctgggcgataagccgccgccgcatcagttccgtgcgtgtgcgtgatgagtctggacgaggagccgccggcgtgcatggattctttggattgctttgacttgcatggacttgagttatctcatgagttcttcttgcagagctatctacttgcttgatactgtattggaccgtacttgtttgtggatgcattgagatgagatgcattgaggtgagatgcatgagattgcattcaagcgtcagcactttgtctctgtacgtttatatatagcgttttcttgtctgctgcgcctttagggacatgaacatggagccggcccccctgcaaaaccaactacccttctacgtcacccaagagcagctcgttgcattcgagctccgcatcatgcaacgcatgcagcaacagttgaacgacattaatgatgcgcgcactgagctcatcacagccaacatgcacatgcaacaacagatcaaccacgtgcgcgacgcagtgcgggcgctggagcacaggtgcggtgttgggacattgacctgtgcggcggttgcgctaaattcgagattttaaccgggcactttttgacacatgcctgcaggtgggatgccggtgcccaggatgcgccactggcagagaacaagaagcgctccgcaaaaagctcctgcacgaaacacgaatttgcgtaagttttaccctatagtgcatcccggtgtctcacatgcagaagcaggggcacaagccaagctcacctctctctgtttgactgatgacggtcgaaacaaagaacctcgcatctcgttgttcgcccccaccagatgcaaggcggatccgttgaacacacgcatgtggttgcgaatggcgtcctcaatcccagagtaacaacattcaccggtatccatgatgctgccgatcgctttcacaaatgcattcagtgtttgcgagttcaagacagcgtcatcggttgcaaagatgaacatgcaccgtcgaaattggtagttgttcttgatccctctcagtgggttgaggccctcggaaggccgcgcaccgcaaaacaacatgaaagacaacactgttcctctgtgatgcattgtcgcatgtgacacctcctccagtgacaccttcgccccgttggtcaggacgagttggccggaggatccatgaccacacaagacgatcacgagcaccgagtcatagtgtgagtgtgtcacgtgatcatccaacagatccatcagctctgccttattcaagtgcccccgcatcgcatcgacatgaaagtcaagcgggcgcaacaagctaacccacgtgttgtggtgacccggtatatccaacccatccacattcttgcccaacatggttcctgcttcacggttgtgcacccataaagtcctctgaatgtgatcagtaggaacataagtataatccacatacaacagaagtgccttgttgcgggatgctgaagagggcgagtaggttggcagctcatgttcatggcggcaaaattgatgatgatctggctcttcatcatcatcatcatactgcgggagacgccaacgcatttcgtcagatattttgaccctgagtacagtaaacacacgattccccccttatatacattcacctgagtacaccagaaactcctgatgatggccactgtagagaacatgaccatgaccaggcatgcagcaacgactcccgcatgtccagggtcgatccggttccatggcatgctgcatgagcacgcaggaaaggtacgatgactctctcccccaccccctgttactcagctaattgaatctcctgggattgctgattgaagatcctgaaaagtacattacccccccttagaacgagatagttgcctatccaggtgacgataaaaaaatcattcccaattcgtgcagcagggatggcagagtctgctactatcaatgtgaccccctctggaatctgaattggctggtagatgataggggcctcagcctgggtatcctcagccacggggtgttggacctcaaaccggatcttggcaatgttagggtccagtcgctccatgaccatgtgcacgccatctccgatcagtctgcggtacaagttgtcattcttgtagctgaac

SEQ ID NO: 138 - DNA, 22982 bp, unidentified
  misc_feature 1..22982: note = Fanzor polypeptide
  source 1..22982: mol_type = other DNA
agtggtgaggttaggtacacacaatgtattctccaatgtaacctcaaacttgcattgtggagtaacagtcagtatatccacatcacctgagcacaataccggcatagcacttgaatttgctgccgttatctccggaatactcggcgtatagcacacgtttttcatcttgtttacgtcggttatcatatgacgactcgcaccactatccaagtaaaagtcatctttactataatttccgttcaggaaaatagccgaaaacgcatgtgtcttctttatttgcgaattattctgtttgcattgtgatttgtagtgcccaaatagcttgcatcggtaacatttaatatttttctcagatttgtttacatttgagccggccatagacactggctgaactgacactgcgccgccatgactaaatccgccatgatgattcttcgcatgtctgccaacatgaccgctggtagcacgactgtgctgccctctgctcaaaaatgcattaccggtttctgcattgtcacccgccatatcgaaaagctttgtcttcacgacgtctgccgtaatggcgattcccgaatgttctatggccattatcattgggtagtatttttcaggtagacccgccaacatcaaacagccgatccactcgtcatccactttaaagcccgttcctgataatttttgagcggtttcaattaattgcgtgacgtaggtagtcatcgaatcgcacgtatcaagtcgaatcgagatcaagttacgcaataaactgattcttctcgcaaaaccggaatcatcgaacatagcttgcaatttctgccacaaatcctttgtgcatctagcttctttaatgtggacatacagcgacggatcgatagttaaaattaacttggctttggcttttgcatcttctgttagcgttgattcttgctttatatatttctccatgttttccaacaccaacatattctccgctgcaaacacccattcgtgatagttctcacgacctctcaatttaggcacgttggtcaaaaaagagttcgaagccatttttaattttatcacttataatgtttatctggcgattatcactgccgcacctactcctatgctagctaacctaaaacaaaactttttagaattaacctatagggcgcgactgggcccataacctaatctgataaaaagaaacgacttgttcgtttgatacccaatggcggacagactttattcaaaaaaatcataagacaggttataaacaccacagacaaaagataggtacttatttcttacaacaggtggcgcagcatgtttatttgatgttaccattataaaataatactttctaacacttttctataagagaatacaggtcactgtttaagaaaggctatagtattaccaatatgccttctctatacatcccaaactctacaccgcgtttaaaccgacttcattcacaagatttagtccaaaaatccacttgagtgagatccttccaacatgacaccattcataatcctcgctgtaatgctgggaatttcagaaggtgccgctcccggtaccaggtgtaacgacttcgaagccaactttaatctgaaggatgtgattggttcgtggcatgttgtggcaataatacctgagaaattgtttcctgaaaagcaagtgacgtgttacaaggtggatattagtgagactgatgaggtaagccttaataatttgataattatgattgcaagtataatccagcaaaatgggacagtagcacgtagcagcaacgtttgcagattgaatttgtcaaaagtataatcagaacgagaataaattgtaaaactttatttttacaacttacataaaggtgttcaatagataaagtaccgcttattgccatctcccgcattatagcaagttctctacttgctaataaaaatttaaacctttaataataattgtatgatctttcgaaatcgttgacctaattttaactaaccagttaaattttaacactattggaatgtgttcttggtaccagtgatctcgttgaaatctacattgacacagtcaaaaacttttaaaaaaaaaagctgtagaaatattgatttttcgacacccaccatccatagggcttactaccagttcagaaagaaatattactacctttctgaaagagagatttcgcttcaatatagtgatataatacaatatttcaccactttcacacgacgccatgtaatctcaaactaagcaaagattatattataaagtactagacaactgacaaaatatcattctaaatgcaaacaaattaatttaaattactcccagacagagaacaaataatcgtgctcatcacataaacattaatttgccctgggtagaaattgatccgacgacctccgctatagcagtcaggaccactaaccactacaccaacatgttattaaccgcaatctttatattacaagaagggttatattcagtttcgttacgtattcagctcgaagatattccgtacttattcatcatcaaatttaaattcctcattccacaggctggtctccgatggttaatcaataaaacaatagagtctccaacgtcaatgctgccgaacaacaagacaggtattataatacgccagcggtaccactccgaacatccctttgatgtctggtctaaatccgtgagcgaagtcagcggctgcttccaacaagttatttcattggatttggggaaacatgacattcgtaagtaaattgatgaaatcattgtaaatgaacgaaccgaacaaaagcgaaactaaagtattgatataccggcaggagaaatacatcaactgtgaataattagtagatttaaaatgaaaatacccacgtttttgtcactccattgaaattttatcaacctcggttcagccgtttaataattgtaaattgcattgtcatcgggtttgaagctaccctaaaaatttcagcctgctagtttatcgggaagtgcctcaaaattgagttacaaaaatccaaccggaacgaaaaataagcaagaaagtgagtttataaaaaaacgtggggaaattgcaactcagtagttattacgattcatgagatactacctggtgacagacagcgaggcttttaaccctttggatagggaatcgtttcgcgggtttgatccccgcttaaaacaagtatttgtgtggtccaagaatgcttgtcctgagtctgggtgtctttttgcttgtgacttgaatattggtaaataccgcacggcaaaaaaataaaataattaaccattttttcattttgattttgtttattttatagataaagccctgaaacatgacgcgatgatgcagctccatctgctgcaagagcgaggctcggagccattcctgctgcagctgctgtggggacggatgatcactgtcgtcatctacaaaaggaaacaggtattacttaactctacaaaatatatgaaacagatgtggtaagaaaagcagtgtaggataagtttgtttttttttgggcagcatattaaaaaaataacttattataccaagataggcacaggcttttttccgtacatgataagattgagaattgagtcatttctgaggagattaattttatgaatataatataggtatttattactattcctagaatggctcatgatgagcatctttagttactcaggcaaatacctatgtttatgccgtgtgaatgtatttttattattagaatttgctttgttgtggatctaggtacttctcaatttgtaaactagttgttttatatctaatcatttattttattttcttttagggagtgactcaagatgaactgaaaccagtatttgagttcatgaaccaattacgaggaccacagcggcttccgaagatttgcgacagccgattaaaagacttgcttgtgttttagaaacaagaccttgatattaaaatgttaaacaaattattttcctgtaatatttttgtatgggcccatgtaggttgcattaaatttattttataccaccgcgattactcaattattataaaataaaaaaacctttaacaaataggtattattgtaataactttcgtgaggcggataattcataacgtttttactaggattatccgactagtttcggacccaactccagtcagataaatctgctctcattttctcaatttttgcaactttattttgaaagtttttgctagcaagtaagaacataataaaacctcacatgatattgcttatcaatttaaaatccaatgaatcttcgtttaaaggtatttgccgtagaccatggacgatgaccggccagtaacaaatagtgctcgctcacgccaccataaccctgcaccgctatattgtaacgaaatgccaataaagcaaaaataaactaacgttttgcgccaaagagtatcatttgattcacagatatggctacattttgttgtaggtattaactccgtccgtctgtgtaaggttgtgttttgttacattttattaaataaagttgcagatttattgagaaaaaaaaatcatttttcagggtcatcttctttaaccgtggcgatttgacgtgacgaatgaagatgcttcttaacccgttggtgtggctcgggaaattaagaaaaaaagtgttctgaatgccttgatcgatacacaaaatacccctcctactggtttattatatttcgatcgttgtatttgattactaacgcggataactaagtgaactaagatttcttcatgcaagaattttcagatcatgtagatctgaaaattcttgcatgaagaaatctcttagttcattttctacttaaccgctatagacggaaagcatattttcaggtcctttataaataaattaaggaacaagtctcgcacgacgtctctacagcaattattttaatctatccagtcttttctattgtagtttcgtgacattaccttattaactgcctttctttattgctcgctatttcaaagataattctttttggttgtgttacgttttgtgtggaacggtgacgttatgtggttcattttgtcattacgaacattattgcggttaacttttagtaaattgttgaataattcactgaagtagttaggtgacacgaagggtcaaaaccgatatgagaagtacaatatttattgtgctaaaggcgagcattgtatacctcttaagctctgagtttgaacctacaacatattatgtgcctattttaccattgtaattttaatatgtaaatattaaaactaaacaattacgttgtggtgctctggcctatagattttttgattgtttcaatgcacagaaaggctttcttgcgagtataggtagcccagcggcatcaggtgttgtatgaaagcctgtgattgattcgcgtcggacaactcgaactacaaatgcattgaatggatttttgtatacaggttgatttattttaaggacaaaaaatgaataataaatgtaaatttttgtaggtgttacagttggggagaaatcacatctaacttagaagttaccgttaccgtttattaagttaacttttatgcaacgaaaacaaaataaaattaaaaatacaatcagagtcagttactagtactacgcacgaagtggtatacatttcaagaaaagaaaattagcctcatcagaatgtaattttaacgtaattttccttttttttatttattttcttactaactaaaaaaatgtcatcttaagacagcattttacgaaaaatgacaaaaaaacaaattcccatcccctgtagcgtatgacaggcgatacacgctgagtccaacacaaagggggttccactcggctcgttttatatctattgtttatgcgcgacggggacccttgacggaatacatgcttaatgacggtagccacggtataaataaaaacacgcttttattataaatggcaggaggatgtttcgatttgaatacatcctgtatatattgagtttggtgaagattttcttttgtttttcaactagcagaaaagcaaagcctgttgtttgagacctcaactcaggtgaaaaacctgaacactactttaatttctgttgtgatttttgtttaaatattacattacctacatttatttgggcagtcgtgaaataacgaaatgttgcaaaagccaaatacaaaaggttttgtctgctattaccaaaccttaattcaaatcttttccaaagattaacgatcataccaaactaaacgagcagcccataaccggaatagttatcacagaatccaatcaaacattttgattgtcttaaccgggtgaccggaatatcaaaaacttttaataggtatttaacttcagaatctcatctttgcactgacgtaattacctaagtcctttagcaataaaatggatataaagaccattttataatagggtcgtaaagtgagtaagggtgagattgaaggtactttttctaattttacgattcgcttcggatggctgagggcagttttttgttcacctgcgttttactgtcttatgctgattagtttaattgtggagataagttatcgttgaatttggaagttagattgacgattttttatttatttttgtgtttagaccttgataagctgtgggcttcagataaacgcaataaaatatctatttataaatgcagatgggttttcagcaggcctgtttcagttctggaagcaacaatgagcaatttacgtaagccagaagatattgcatgatcataacctgttacacacaacattggcaattttacttatgtacatcaattcatcaattatattgtactcatcctcatacacttttcgctttacaatatcaccggatccctgacttttttgggtcttcatccattcaaaagttaatgacatatcaaagcgcggtctcaattcaaacagccgccaattaatacggtcagatggacccaaacactagcacagccttccggagatgtccgcgcaatttttcattaacccgagcgtgcgagcgattattgaaagtcgttcgtgcgattaattagtcgccgctagggtcgggctttcattacattgattattgtttagatatatatgttgttataggtgatatagtgtagatgtttagatgttagggttattgatttggtgtcagggaagtgagaattttttggtatgacgaattgatgacgaagtgcgtcgagatttaattgttctcctgcagagcattttttttaagttttttgtgattggattctaattttatttgaactaaaaaattatacgacgttggaaaaggcagaaaaaagaaggactaaaatcacagtaattttatactttcgaaatttagggtaaactagctgttgctcgcgacttcgtccccgtgggtagaagatataagttatgatttataactgccctgcttttttcacatttcccattgtatcttcgctcctattagttgcagcgtgatgatttatagcctacagccttcctcgatgaatggcctattcaacacaaaaagaatttttaaatttggaccagtagttcctgagattagcgcgttcaaacaaacaaacaaacaatcaaacaaactcttcagctttatatattagtatagatttgggtgtttttgtatgttaattatgcctctattatgataaaactaaagcaccgatttcaatcaaattcaatattcgtactttgtaaataatggaacacgaaaagcctacacagaaataactttcgtgtatacaacttgtacaaaaaatcaataaaaacgaaaataaaagcattgaaaatcaccccaaaataaaatcaaacggttctctttgtcttttttatataatcgcatacacaccaatacctggataccataaaataaatagttaaaagtaacacattttgttccattgtctacgaatcgaagcaatgaagccaggctacttaaatttaatgtacactaacgtaatgctataaaaacaagttaatctcaatacacggatcgcgcttattatggatagggatgggggaggatgctatcgatagttttataatgaggtatcgataaaagtgtcacatgtactcacatatcatattgttggtcgtttttgctagtgcgattcaagggtttgaaaaatgaacatacttaggaacttaatttatttatattaagtttgatttttcttatacctttagaataagaactgctttattttgaactaaattgtgttttctctactatattttttacgccacattataattcacataacagaatacatatatgttgtacagaaccacattggtttcaaaatttcgaccatttttagaatacgtaatgcgagatacacacgtacaatctgttataatattactttagctggtagtactaaggtgttgctaaaagggtaaatctaacgattgctatttttcaactcacatctaactcgtaattcagttttaaggttgttaagacataacatcgataattgtcccatcactaaacgccaacactaccggaaataaaaatcgtaaatgaagccattcgtgcaccgaggcggtccccaaacggaattaaatacgtttttcaggactacccgcgtttaccgtccttttatatcaggtggtaacgttagttatttatacgaagccgaattagccactgaaagtcaatttacgacagcaatttatgtgtatacaacttgaatgtaatgttgactgtttgttgatctacattatgtatgtatgtgtaggtcgaaatgtccgagcttatactgcggcaagattttcatattttacgaaatagtatgtgattttatagggattatgctatttttgtatacgagtatgtaaaactatgaatgccgttgcattcttaatcaacatttaattaagtttaaataagatctccgggaatttgacaatcatcagtatattttacaaaataactaactcaggcttttgattagcacactatttttatcgctcacttaaaactacaatgttccaatatacaacataccaataatgaaatcgagaaaaagattgtatcattgaatcaagattacgaggaggctttggccaaggtatctcaacttgaagagacacaaaaagaaaatagtaattgcattagcaatcttgaaaagcaaattcaagaacttcaacttaagtgtcgatcgtcggcaattgaaattagaaacgtaccagtaatgccaaatgaaaaaataaacgaccttcttcagattgcctcgtgcttgggacagactatccaaatggatctttctagttccaatatccgtgatgtttatcggttgcctggaaaacctggcctcactcgttctatactagttgaattctcaacggtatatttcaaaaataacgttttaagtgcagtgcgcacttataacaaagagcgcaatatcagggataagttgaacacagagaacattggcattgctggagaacgcaaaccaatctacgttgatgaacatctctctccaactacaaagaggcttttttaccttgctcgagacttcgcgaaacgcaacagctacgatttctgctggatatctaacggaaaaatcctaatacgaaaaagttgtgatacaaaggaagttcacttcgtgaagacagaacagtgtttgttgaaattggaatccaagcaatgactattcatcccaaatttgaactcgaatattagcgtcagtagtgatcattgtagcttttctcttttttataaaaagtttcttttctataataagttttttgaaaatattttttttaaatgttcctgtaacttatacattcttaaaaaacaagttcaaacatgtaaatttctaagtgactttagccaattacactttataactgtaataattatatattcttatagtgagatatgtaacgtgactgatatttccgtgtatatgccactgcaacgtaaacctatagtattgcttaatcatttaaattgcatcattctttattatcgcttaaggcaggtttcgttgctctctaaagataactgttacatcaaaaatgactgataacataaatattatagctaatgacattgatgacttcaaagtagcaaattcccacatttgttcaccaaatgaatgttctgagcttgtcgaaaatcctaacactactttaaaaattatacacattaatataaggagcatcaataagaatttcgatcagtttgtgtgtatgttatctatgataaattttaatttcgatattataatcctttcagaatgctggttaaaaggggcggcttcaccacctcatcttgttaattactcttttcatgctacaacgaatcacttaatacaaaatgatggtgttgtgatatatgtaagaaatggacttgaatacacaatatctgaaccatcttttcgggatgcaaattgtctaatatgtactgtgggtaatactgcaatcgtgggcctctatcggtcaccatcttattcggacctaagcaacttttatgacagtttagagacggtgatgtgtactttgaaatcatttaaaaacgtggccatgattggggatctcaatgttgacattaaggataacaacaatgttgatcgaaactctagtgaataccttttatttactgcatctttaggattgctaccagcacatgtgtttccgactaggcttggtaactgtctcgatcacattttaatgaagacggacacaactgtaaatacaatagtacttgagacccatattacagaccatttacctgtgatcctatgtctgaggtatcacaataaaatatacaataatactcaaaaatttataacgcgcttagactatgcttctattaaggaagatattgacaaatatgatttcaattccatcatgaatgaaactgatgcaaataaagctgctgataaattgatttcggacattcaaaatgtggtttctaagtacacaacacagaaaaaaaccagtaggcgcacgcgcattttgaaaccatggatcactgaaggaatgcttcgttgtatcaggaaccgagataaaatgcatcttaatgttaaaaaaaatatcaataacaacattcttctcataacatataaaagataccgcaatttttgtaatacccttcttagaaaattaaaacgtgagtatgaaaaaaatcaattttgtaaagctcagaataatccaaaagcaatgtgggacgttataaattctatctcaggcaggaaatgtcagtcaccgtcagcaacagaacttttgcgactagaaactagtgcgaaactctctgcgaaccgggtcaatcaatatttagttaatattggaaaagacctggcttccaagctagttcctcctgattcttcgaccgctaacaacttaggagtgatagcttcacaatgcaactcacttggaattgaatcggttagcgaagatcaagtgtcagcgatcattgcatcgcttcggagtaactgtgcaactggctgggataatatcccagctttagtgcttaaactttcacagaaagtcttggtaacacccattacacacttatgcaacctttcaatatctaccggtgtgttcccaaacagcttaaaaaaagctttggttactccggtgtttaagggtggggacagaaagcttgtgaggaactatagacctatttctgtcttgagtgccttatccaaaatcctagaaagaatactcaataattgtttaacaaagtatctcaaaaatttttccataatatccgataaccaatttgggtttcgatctggcatatcgactgaagatgcagtaacaaacttcagtaatgcagtagttgattgtttagataaaggatacaaatgctatggtatatttttagatatatcgaaagcgtttgatacggtttttgcaccaatacttttatctaaactagagcttatcggggttcgcggtccatctctagatatatttagggactacctatccaatcgctctcaggtagttaaaattgatgatgttattagtgaggaagaacaaatcgaatacggagtcccacagggaagtatcctcggccctacactattcataatctatgtcaacgacttgtgcaagatgaagcttgatagttgcaatatttttacatacgccgatgatacagccttattagtctatgcgaagacctggttagaagccaaatccttagctgaggctaacctgagaaaaataatgatatggatgtcttcaaacttacttactctaaacatagacaaaactaaattcatacgtttctatctcccaaattctcctacaccaccaattgaaaccacaacaatcacggctcactattgcaacaaaacctcagcaacgatctgttcttgtccacctttagcaaatgttccctgcattagatatctcggtgttatgattgacgaaagattaaattggcgcactcaaattgaaactcttaccgggcgtgttagaagattactttttatctttaaaaatcttcgtcattctgccgatctatcagttatgcacacagtctatgttgccctgtgtcaatctattctcagttattgcattcctgcatggggtggtacttataaaactctgtttctacaattagaaagggcccagagataccttctcaaagttatacactgcaaacctcgtcgctactcaactacagatctgtataaggaatgccagttattgactgttagacaattattcgtccttcgcaccatactgcggcgacattcacaactaccccttagtaatcaaattttacaaaaaagacggggtgctcttgtatgttctcctgttggatgtaggaccagtttcgcattacgtcaatataacgcactgagttctagaatttataacaaaattaataataaaatctcactgtataaattaaataaacataacttgaagattaaattaacccattggcttaagtctttaaattataatgaaacagaggaactcatagtaattgtaaagtaaaatataagtacctaaatagatctactgtaagtaatcaatattgcacaaaacttttaatgatattgaaattgtaatagcattagagaggagagccgccgattcccgaaatacgagctagtctcagtttgggaatcagtgtgctatttttaattaccccactgtacaattaatatgcttatctttgtgttgtgttgatttgcttattgtacttttgaaggaaataaattattattattattattatttgtatctctttttagtcacgggatcacttcatgtgaagagacccggtcctttttaaaggcttgcacggggacacaggtccaacatgtagaggccttgttgagaactttaatctaaaatgtgatggggtatctaccaggggccatccacccctgctctattaaagaacaaacatggacgacccaaggtagcttcaaaactattgcaaattgtaatgtgtataaataataagggctattggtattaataatgttaaatggaatggtttcctttaaagctatggaaaactatagcacctgcctttcaacacataaaaatggaattaaattggcaggcggtgactcgccggctcaaaaatgggccccccatcataccgccacgataggcagcgagaggcaacatcagtgagataggctaagggtgtagagaggtgcgacaccgatttcaccatcgcgggtcacggacccggagcgggtttcctcgttattacgccattagacacttccacccccgagcatatagctctagcgacccctctctagccagccagttaaggcaagaaagagctgggagtccccgtaaagagtgaccccctggggcattcaggttccgttgtgtcgctactcacaaacagctcgccacaagctgccctgcggatgtatgctcctacatataccttcagacacattttttatttatatctcaaggtttgaaaaagcatactattgtaccctctggtcatgcgttattcccatggagagagagaacgactagccccgagggggcttattattattattattatttcctttatttcattaaaatacatataaattacatttttaaatatatataaaaaacaacatacatttaaaaatataaaaaatagtgtccaaccggcaacgggtacagggcccaagctgccggtggtcagggctccagagagaggaacctcctcacgatgcgcgccgtgtccagaagtaccgctttctgaatcaaacccttgacccagacgcccaacgagagcctccgaagatgttgatcgaggctcttggctattaagccattggcacttacgactatcgggacaatgattgccgagtccacctcccacaagtcgacaacctcgtgagctaaatccaaatatttcaattgtttttctttttctgctttcacgaggttctcgtcatgggggatagtgatatcaacaatcattgtccgacgctctgatcgatcgatcaccactatatcaggcttattggcaacaatagtcctgtcagtgatgatagatcgatcccagtacagtgtgatatgaccactttcgagaactgggtcgggcacatacttatagtacggcacctcagattccacaagtttgtatttcagagcaagctgctgatggataatcctggccacttggttatgtctgtgcaagtattcaccgttagcaagacgagaacatcccgaaactatatgtctcaaggattcaccgggacagtgacatgcccgacagatgtcaactgtaccatccttaattatatattttcggtagttattcgtcatgataacttcatccataattgcacatacaaacccttcggtttctccaaagagatctccgaagcgtagccaggccacggacgctaagaaatctacatcggccccgtgaagggtccgataatagcgtccgtgtagctccttgctttgccatacatctttgcggtctttgacgcttagtacgataggtttgtgccagttctctttacctagagagagcggagtgaagcccttatccactgccaccacatctcggtgcatccccacgtccactcggaggaaatactccctgaggttacatacctcgcgattatggagggtcttggcatttaggaagccacgacccccacactttcgcgggatatataacctcattaccgatgatcgcgggtggtgcattcgatttgcggtgagcagtgtgcggactcttctatccaaggcgtccagttcggtctgtgtccacttgagtatgccaaaggagtacattatcactggcatgacccaaccattaaaggcacgcaccttgttaccgcccgataaggaactttttagtaccttattcaggcggccaaagaaacgtgtctgtaacgattgtttcatgtcagcgacattaatgcctaacgcctctgacatacccaagtatttgtaggtttccgttgaggagagggacctaaggtttatagaatccgagagctgtatgccctgggattctacaatcccacctcgttttacatgcatgactgcacatttgtcaacaccaaattccattctgatggaattactgaagctttcagtaatcttcagtaacttcatcagttgcaacttgttggaagcaaacaatttcaggtcatccatgtacaacaagtgggagattacctggcttcctctccgcaacgaatagcccagccttgaattctcaagcagagtgctaagaggattcaaggctaaacagaaccacaggggactcaaactgtcaccttgaaatattccccgctcaatcctaataagttgaccgctcttttggatatcccgacatcctggatagtgaagcaccgtagtccattgccccatacatgacttcaaaaaagtgcgtagagttgtattgattttatacaactctagcaccctcatgagccatgcatgtggcaccgaatcataggccttcttataatctatccaacatgtcgacacaccctttttggagcggcgaacttgttggcaaatagtcatatcaataaggagtagctccttagtaccacgtgacccattcctacatccattctgagaggcagacatgatagaaaaccgttcaatatggtcattaatcttttctctcagaatggatgtaagcagtttgtagatggtgggtaaacatgtaatgggtctataatttttggggtccgtggtactacctgttttgtggagcagatgggtggaaccagtagtgaagaactgtgggagcacgcccgagtctacggcagattggaattgggatgctaagcaaccatgtgaacttggtagccatttcaaccagaagttatgcagtccatccgggcccggggctttccaattggccaacggacggactgcattggctacgtcttggggactaatatcaatagcccccatttcttctattcgttcacacgattgctcaacatcacgtatccaatccccctcagagtgggttacaggtgccgaccagatgctgcgccaaaacaaatttgtagcgacatcatccggcaggcgtccggcaccctcctccgacgcaggttgctcccaagatctgtacacccatctttggtctctttggaacatacggttctggtgaaatcggtccacccgagtcttgtaccgtcgaatacggtttgcccaggcacacaccttttgcttaaaaaagtcaatgcgttctgtaactcgggcggtgtattcgctggggctaatattagtcccagcaaacgcccgctttacaaaacgcatgaccctagggcgagtgtttccgccccgaaacgcaacaagtttggctatgagtgtcctggcctcagcaacacgcttctcaatcctgcactgccaggctggtgccgcttgcttaggccgtgcagctgtgttatctcgaaaggtaacaccagctacacgacacgccgcaacagccgcacagtacagaagcgagtgcgtgtcaccgaggtcttcgctgttcccaaaataactggatagcagcgaatccaggacacccattagcgccttgtttcggttgtgcatgggcaagcgaggtagtcgcggtctctggtcccggggtgttgaccgatactccagaaccgcctgttccaatgtactccttatatgatcactgcactgggtacttacagttatagcaccgtcatcatctcccccgtcagcagggttggcaggcagcgcgcttgcagctggcgcttccgctattgacggggtaacgacgacagggctagtctgcacttcagagcgcaatcgatcaagcgtcgcgtcatccaacctgtgattacgttggataactcgcacttgatccgacaaacgttgtgccgatacgtcgacgtccggttcaagggcccgaaacagagagagcattctggtacggtacgcagtgaggttagttcctccccctgtcgccccatagtaggcgcgcatgacattctcgttcatgggtcgagtccacttcatgcgctgcactacaccaccgggagcgggagccctgttcgaggccggttggcctgagggcgccaagctgctcggcggccggcgcctccccggccgacgtacaggtgttggcgacgtcggcggggatgtgcgaaaccacatttgctatcagtcccattaatgatttcttattagacaattattatatttcctcatgaatgaatatattgtgacatctggtgttctttagtatttagttctaggctttccacgatatcccctgggccacctgaaatcagccaacgcactaagcatttagagagtcttaaatctacttccttacgcgccagagcccagcctaccctctctatggtctcattacagtttcctaggccgacacggtggcgcggttcattcactgactcccattgtgtggtgatgtttcgtttcagtcactttccatacttcgtgacgtcatcttgcgtgtaatcatctattcaacctccagtaacccaaacgtaagtcttcaatacacgcgaaaattcaatcatcctacaatatgtcaccacctttacttagtttacccaaatttaccccaagatctaataaccgaacgttctccgagtgacctatgaaaaaagaaataaattgaataaactgcggcggtgaaaggaaattgcagtaatatggtttgttgccaagggttaatggacaggaaacaatctgaccgtaaccgtcccattttagaaccaaatctagttttactgtaactttgtttaactgtgattttaggagtggagatatttttggttaaacttgatttatagttccaattccgaattagttttatttttgaagttcatattaaagtaaaaactaaacgactaaacaaagtgtgaaataatggcaaacatgtgttttatagaactgtcgtgaagacttatatcaaattttattgaacgaattgatttttcgtttgtcgtagcaaattatctcaatattaatgctacggggctacgttacgtaggccagcgtagaccagccgtagactatgtacacacaatcacgagaaactaaagaatcttcaaaaaaagttgattttaatatagttgtgttaaacctgcaatatagctctgctaccagtaacttattttatgaattacatttaaaagtaatccatagccatcaaagcaacaaaaacaaatcttttaaattgaaataaccaagatcattcttgcataatacgaaatacaataacatctctggagtattatcaaagatattcctgccttttttcctttgattacctttaaaaacgttcgtcaaagtcccatctcattaatataccttttgacggtttcctgtgaagctgatcatttcgcgacagagacgctccctgaggtggcttgcagtgtgttattgtttgtgcgggcggcaaatgtcaaaggagggtagggtgactgtggaaacgaaagtatttgggataaaattctctttatgagtagtatattcctgaaaattttggttgttacctgatgagagcaacaaatgcatgacgttattttttttttcgtcagggctatagatggacgtcgtcagatatcatggagacaaaaaaaaatctcaatgtaaatagaatactctgataattaacaaatgagaaacattttttgtgtatgagaaaatatcctcgaaatatgtggttacttcagtcgtagtccattgatcaggccgccaaagacttgccgctgtaaaaggcatccgccggcgactgcttccgcgcgcacgcacctttaatgaactaaaaacacaaacttaagtaccattcacacaaaaagaaaaaaatgcagcggctataaaaatacctaccttattgccatggcaattttttctttgagaattttaaatacaaatcttaaaatagaacagtaagatgaggtaataatgataattaaccgaacagctggcaatgtgagtttaagttaaaaaatacgtcgcatatacatacgtatcttaaatatccatcaacaaaagatgaaatactattttataagctaaaataaaataatttgagtgggtattaaatacaattaattcacgaataacaaccaaatgaattccccacatttaaaaatatttattcatatcaacaaaaaacgccacgattagctcagttcatctgaagcgtctttcacaaaaagtatggccgcaaccatttgtttttcattacgtggaaataagagctataatgctgatagctatgttttgttctagttcaacgaaaacagaaatggggaacaaatgaatattttatacgtattacgagtacttttgttttgacgagaaagtgagtgatgatgataatgtacgagtattcagtacgggtgatacatcttgatatagttgggagaaatgtcaaatggtaacctctgttttttataatatacataattgctgttattgacactgaagtatttaaatacaaattttatatatctatttaatatactgtgaatctattaattaaatagtacattttagaactaaaatatttttaggtagtttatttaaactttttttaacatgttgttttgtaccataaaatttagcacttattaaagattcagtagcttcctcttcataacattttcttacataattgtatacctactaaactaaaatatcttgtgcagtgtcctaaaatataacaaaatactaagcagtatcattacccaaattctcaccgaatacaaaacctacctcttatttccctacaattatttcaaccttatatttttcgacagatttccttctcaacaatcaataaaaccactggtttaagtaacttgccggcaaaccgtaagaacggttcacacatgaacgctcctgtaatcctgtgacgagatgcccaagaattgtgttaaggaccttactaataccaacataaataacattaaacacaaaccttaactcttaagatatacggtcgatattgcaacggctgaaccgcaaaagaaaagttggatacacaatttcgcggttacacttttacaaatttaatttgcgttagctttgagctgtatatcgttgagttaagggttattttgctttgtgtcaagtgtggatatggtttgtaaagatgaatcttttaggatattgaatgttggagtataagcgagggaaatttagtcgtatttgtgggtaacgacttaccttgttaagatttgtacggcatttaagggtaaattttgtacatgaactttccaagaacatattgtccaagtgtgtgtatttatgtgcaataaagtaaagtaaagtaaagtaaaaaagtaaattttcgcgaatattttggttcatctgtaggtacctattacctacctactttaatcttatgcactatcgtaatacattacattttctattattttaatgagtaaattttattgtgacacatcagaagaggcatattatgaggacaatttctatcataaatattttgggcagtgcgaaaaacccaaaaaaatcttgtaaaactaaatttatgtaataactagctgttgcccgcgacttcgtccgcgtggttagaagatataagttataatttatacctgccttctatctatcttgtaggattcagtcagcgtttgcaatgtaagcgcaaaaaatgtgtttttttacgacttcacattagaaacctcaaaaattgtagcctatgtgttattctgatgtataagttatattgtggtaaagtttcattcaaatccattcagtagtttttacgtgaaagagtaacaaacatccatacatccatacttacaaactttcgcctttaaaatagtagtaggatttacaaagtaccaacaaattctcatttcattcacagatataatcaaaatcttcattttacgcctcctgtatcgagactcaggtgcaacaccaaccaagattgcctttgagaatgtcctcaaataataatataatgaaacgagataatttggctctggccacatctggtcttgaagtatacagccctgtggatgatactcttaatttgaatagcttgttaaaattgtattgtcaacattgttctattattttttatggggactaaaatttaaagcgttacggagtaggtaattggtgttatgtattttataggttggtaatttaatttgattttgtttaattatttttgattatgccaaattgttgggttgtgtattgtagaatggttttagttaataacgtgtgtggttcgtcgaatcataagttgctgaactgtaaataaatatccatgtaattgacgacacgaaagaggttgtatatggtatgggagtggatactttttagggttctgtacaaatgggaccgtattacctgaggtttcactgtatattcgtctgtccgtccgtctattgccatcctgtctcatctaccgcacactgttatatttcaaaagggcaagggcatgttctataaattttgtttcattgatatattttttaaagctaacaatatctccaattaaatcccagcaatatttcttcaattaattaacattattatttaaaaccgctcaaacgtaacccttatgtatttcatattttcatccccgctggggttgaaagcatgctgtcggggtgaaaataggtcatgcggacaccgcctttaatctgtttaattaacatggaaaaaaaggttcgatttcaccccctgggcatggctaatgatgtgttaatcaagggtaagatagctcgtgtatgtggtgatgctggagttatgtggcgtaggtttgtttataaagagacctattgtcgtatgtgtatactgggtccataacctatgaaatgcatggtaatgataaaaggttgaatttcaattgaaattgaattattgaaattttagaatcgagaatcgtgaaaagatttgggggaagcctttgcccaaccgtgggtcacagtgggctagagctaaaaaaaaatatttccacaaatttgagcaaccaaatcaattaatccaagtctttacatttggtagttcttatttaagcgttaatttaaaaaaacgcttactacttcctaagtttatcaaaaaccttgccacatttaaaccatcttagcaacaaaaccccaaaaaaaggcacattcacgacaaacacattatttagcaaacacacgtagaaccatgtgagcgtaacaataacagaatttgatattcctcgaaagggattcgccaaatcttttgtggccgcatcagtgaacttgacaaattgcctgtcgtaaccctacaggtaatgtatgatttattgtcagaattgaatactcttttttgcggtgaagctaaaagagtttttgattatgtttgtaatagtatggtagactagtaacgtgaagatttggaatcatggtatttgattgtaagatacaaatatatttttttgtttttcaattgtgttttatggcatcaatttctgttgaagtatgtcttgaaaaaaggaaaaaaaaacgcagggaaaaacactccttattc

SEQ ID NO: 139 - DNA, 22982 bp, unidentified
  misc_feature 1..22982: note = Fanzor polypeptide
  source 1..22982: mol_type = other DNA
ccaacgcagcactttttcttatcagtcggcccgcccggggcgacttgttattgtaactatagtccgtaagatagtcttaagtttctattgtattagaattaattaataaatatgttttaattaagcagtcttacaccaaactctgtgagctcggggtcgtaaataataaatcttatttcgtctctttaaatattaatttttatttctatttttaaaaagacaatttcccgctcccgaaatctaactacctacgaattggttttgacaatttatttcgataataacaaacattggtttcgttcaaaaacaaataaccacctgtcagcatattattttgaattgttaaaatctgattaacgttgttaaatcatcattgtttattaacgataattattcttgttaatattgattaactaagccaaatgtaagtcttgttagattttgataatgataatttgattggtaaacacgtggcggaaatgcgccattggacagagttattgtggagggaatgccaaagtggggcatcgccctatataagaccaagcattcgtttgtgctggcagtctcatcttcggatctgactccattgagagcactagctcccgacaaaactgtcggtttacccggttacagctctgctgtatattttacatagctgtattgctgctcctgagccgatacactttgtaaccacttttgggtggctttgccactgtacgaacagtgaccttgtaggtctgttcggagacgtacttgtagtacgtattatcctatgtgtcctagctagtctatttagattattatttttaatttgtgaagttgttaatcactgtaaataaattcttggtgtattgattttatcttgtttatcccacgaaaatggggactcccaaccctggtgatacgccgctcggcggtccttgatcctacatatatatatatgtatgtaacatgttaaaaaaggtataaaattatcctataagtatgctgattaattattattatttattattactagcctggaatgtcccactgctgggcaaaggcctccccactcttcttccacttgtctctgtcatgagccgcgagtgaccagttcggtaagaacgaatccaggtcatcccgccatctccgtctgggtctgcctcgctgacgtcggttttgtgtcacggaccattcagtggtaatttttgcccattggttgtttggcatacgacagacgtgaccagcccaattccacttcaacgtagcagctttatgagtaacgtctaaaaatttggttgtggcacggatcttagtatttcttattctgtccgtaagtttaatgttaagaagactccgttccattcctctttggcaaacctcgagtgcggacctctgctgacaagtcaaagaccatgtctgtgcgccatacgtgaggatcgggagaatgcaaacgtccatgagtctctttttgagggatagaggaagttttcccttcataagatctttcatagaccaatagcttttccaggcattttcagtgcgtcttgcaatttctttctcttgtcttgcctggaaggaaaccatttgacctaggtagagatattcatcgacgtaagcaatctccgcaccatctaacgatattttgtggtgaatgctgttagtcatcactttggtcttgacatgttcattcgaagtccaacctcgagactcgccttgctaagatcttcaagcattttatttaactcgctggctgaagaagagaagagaacaatatcgtcggcaaatcgaaggttggacaatatcttttggccaacgataatgcctcgccctgcccagcctgctgccagcttctgaaagacatcttctaacacggctgtaaatagtttcggagacaatgggtctccctgtttaacacctctatctatgcgaaatgatggtcctgtaatagaatttattttgattgctgctgtgctatttttgtaaatatttttcattatttgaacgtaaactttatcgatttcctgtttttctaatacttcaaaaatagaactgtgtttaacactgtcaaaagccttactgtagtcaacaaatgccatgtaaatagggagccgatattctgtatgtttttctatgattttattgatggagtgaaggtggtcggttgtggagaggccacgacgaaagccggcttgttctggaggttgaaatctgtcaagaggcgccgaaatgcggttttcgatagatttaataaatgccttgtataaatgcgacaccaagctgatagggcgataattcccaatatctgttttgtcaccttttttgtgaagaagaacaatttctgcgtggcaaaatttgtttggtagaattccagtcttaaaaaatattgttgaaaaatttgtaacatgttgaagaaggacgggctcaccgatctttaaaaaatctgtggttattccatctgcaccgggacttttgcgatatttcatacttcgtagcgcctcatgtatttctgtagcagtaaatggcaagatgtctttgaagtatgaattatcttcggtattctttgttgccttgctgtttgaacaatcgctgtacaagtctttataaaattcagtacaaatatctaaaatttttcctctatctgtgtgttttcttccagagtgatctttcagacacgttattgttggacttcgtttgttggaaataccctgcatagccgatctaagcgatgtatgttgttctagagctgattgaatgacatgggtgttatgctgtcttatgtctttacgaatactccgtttgattttccgattgattgccttatattcgggagtatacattttaagtttaagcctatcgttaatcaactcttttgtatggggactaagttttctggttttatctttactagctttcatcttgtaactaactttttttattgtatccttaatatgattatattgaagatcgatatcgtcatcatttgtctcattcaataaactgaaactatttgataaatcaaagagaaactgtttttgattggctagaagtacgcttttatttacatgtttaatagagctgttaattattttggcacgtttaatattagtgggaaattttaatgtacttcgtagaggtctatggtcggagctaaatttaaaattattaagaatctctacgtttttaactagttgtttctggtttaagaagcaaaaatcaatttcattttttgttattttatctggagatagccatgaccatcgacgctggggttttttatagaagtagctgtttcctagacttagactttgaccgaaagcaaattgtagaagtctcttgccgcggtcgtttcgtaatcctaatccatgaggccccagtatattggtgttatcatattcttgtctgacaccaaccttagcattgaaatcgccttgtacaatcgtctaagtgcttcggttcccatcgtacgctttatttaaaatgtcataaaaatcttaaatttcactgtcagaatgagctatggttggtgcataaacttgaattactgttaggatgttgttctcagctatttggaatctaagagcagcgactctgtcagaatatgacttaaactccaaaatatggttcttccattttttggaaatcaaaaatcctactccgtatttacttcctgtccctccactataataaaatatactatggtttctctccaatgtgtcttcaccgtctcttcttacttcagctagtccaatgatatcccacttaatgttatctattgcattttctagttcggttaggcgttcttcagttctaagtgttcttgtgtttaatgttaaaacatatagtgcatcggaatcctttaaacgtgctttggtcgtctgacaattcaaatgcacgacagttttacgtcatatcgaggaccgatatgacggtatatgctgattaaatataataaaaattacactatgattttacctattcaattgaactaagtaaaattacatcttagtggtgagtcattagttgtttgtgcagtagtatttaaagagcgggagctcagtgaaacgttcagttgctgctcggctagcgaagaagtaacatctaaggtacgatattattctgattatttaattgtaatttatgtactgtagaatgtatgtattggtaacagttacttggttgtttatttctttttttttatcaagtataagtataagcctaatgataacagctatataaattgctagtgaacataaataaataatgtatttattttataaatgtgttttgcttatttacctagctatttccagagttgtttaatgttaataatttatatacctaattaaaccaagaataaatatactttctatctatatcaagggcgtatccggaggttggttgatgcgtaggtgatggttgattaggtgacagctgactggttgatgaaagttgacagctgacagcctgatgacagatgacagccagctgacagatgacagttcgttgacagatgacagctagctgacagatgacagcttgatgacagagggcgcgtcttcaatgacgaacacagggagttatagccgtctcgattgttgctgtctctttcacacacactcagagatgcttgctgcgttctgcgcgcctggtacttttgaaaagtattgaaatgattttcgaattaaaatttaatatttaaatgctaattataaatgcggtccggagggaaggaatacgaggtcaatccttacaactgatattgtcatatttatcatctagacagcaaaaagtaggcgtgaacgccaatgacctcccgtttatgatggccaatttaaccgacatgattttgttcgcggatgatacctctttcatttttaaagttgacaggaaagccttagacgtcactaacataaataacactctcaatttactatcggattcgtttgcaacgaataatctatttctaaacgcgtccaaaactaaatgcctaaagttctcagttccaaatgttcggtctcaatcaggtttaaacgtaatgttagacgataaataactggaatgggtcaatgaaacggtttttctaggcatatcaatagactctaagttacagtggggtgctcacatctcagcactgtctcgaaggctaagctcggctgcttttgcggtccgaagcataagacagcttactgatgttcccactgctaagttagtttatcacgcgtatttccatagtattataccatacgggattttactgtggggatcagctgccgatattgattccattttcattttacagaaacgcgtgataagagcaatctactgcatgggcccgcgagaatccctaagagaaactcttaaagacattaaaattctaacgcttccgtcggtttatattatggagaatataatgtacgttcgaaaaaacctttataatttcaatgtaaatagtgatttccataatttaaatacgagaaattaataaacttacggttccaagattttggttatctaaaaccaacactaaatcgttcctagggaattctattcgtttttataataaattgcctaataatattacttgtttaccttttagcaagttcaaaatgagcgtaaaatcgatgctgattaataaagcttattataaaattagtgattatgtagatgataagcgcgcttggtcttagtattgtctcggtacatgtggcctccctggaggttgactagatcaattttgtcgtacttgctattattagttgccacgtctttattcctgcaggttttgacatgccttgacattcctgttaaggatttcattaggactacatattatttcatcatctcagcctatagcagtccactgctggacataggcctctccataagttctccagcgcgaccggttcattgccacctgcatctaaagggacccagcggttttcaccaggtcgtcggtccatctggcaggtggccatcccacgctgcgcttggtggtgcgtggtctccactccggaacttttctgccccatcggctgtccgatcttcgcgctatgtggcccgcccattgccacttcagtttgctaatcctacgggccatatcggcgactttcgttcgtctacggatctcctcatttctgattcgatcccgcagagaaacgccgaacatagccctctccatagctcgctaagcgactttaagcctgtggaaaagtcccttcgtgaagcaccacgtctcagagccgtaattcatcactggtaacacacactggttgtacacctttgttttaaggcactgaggtactttggacgagaaaacgttgtgcagtttaccgcacgctgcccagccgagttggatccgtctactgacttctctctcgaagttggacttacctaactggactacctgtcctagataaatgaattcgtctataacttcaagagccgagttctcaacagtgactgtggtgggtctaacatggacgttgaacatgattttcgttttttgcatgttcattttgagaccaacttgttgagatactctattgaggtctccgagcatttgccctagttcttccagcgattctgccataaccacgatatcgtcggcaaaccgaaggtgagtgatgtattcgccatttatattaatgcttcgtcctttccattcccgaagcttgaaggaatcctctagagcagctgtaaacagtttcggagatatgacatctccctgtcgtactcctcttattaaagggatttccttcgtgcaatgctcctgtactcggactaacatggtggcgttactatacaaacacttcaacacttcgacgtaccgatagtcaatacggcaccgctggagagacctaaggaccgcccaagtttcgacggaatcgaaggctttaatgatagtccacaaacgccaagcatagtggccgattatactcttcggtcttctgtataacctgccgcagccgtggtctatggtactatagccttaacatagtacgtattgtttgatatattatgtaaaatattcattttgctttttttttgttatgctttaaatatgcctcgtaaatgcatcaacagtgtaaccccagtaaaatttatttttctccattgttggatttattattataatatatgttttttatcattttacaattttacgctgttcttgcataaacataatatttgtaaaaatagtacaatttttacaaatattatgtatacatttattttttaaaatagtaacttatgaagtttcttccggttcttctccataagagtgacactttggaaccgcgcaacgagagccatcaccttaacgttttgaaagtgcctggaaaacgacctacttgaaataaaaaacttttgattttgatgtctatgtctacgtcttgtctatattcatagtcagccaaaattgactggctttcttcaaactttcctataaaacaaatcaaacatgagtttttttacattggattacgccttacattaaatgcaatatgtttcgtagactacacacttttggttcccattttgttaaaaaatatatatgatggatggtcggctccatcactgtttaaaaagggcgaggttagcgtcgctgacgtcacgttttttgactattttccatcttcaaatcaaaacactttatttacttcaaacaacttttatttagtgacgtaacaatcagtataaatacaacggcataaaaggaatggcacagtgtgacggagatgtgttccgtccggcgcactgagccgctctgagcccgtcgcctctatttataccgaccgacgtgctcgaagcacatgtccgagtttttaggttatgatttaaagtttataattattttgataatcttttaaattagttgaacagataattaattgaaacggataattaattgaaacagatggaatagaatatttatttaatgttgttacaggtataacaaaaaaataacaggtgccaaaagggtgtacattattgatatacataggtgcaatcacaatgaattaacaaattaaataaaagtacttgactaaaataaaaatcactaataaacacaataaaggaacaaaatttgttagaaacaatagtaaaattatctgcttaataacatttctctgttaaaaatcgttaatgctatagtaacatttactaactaggaacattttgaggctttttttgaataatttatcattcattattgatgtgttctccgctcgatgcgcctcgatgtggacgtgtgcaagtaatttgttgaacttttgcttaaaattcaagtaattaaatttgtgattggtggatagtgtcaaatcgtattccttgtctagcttgtggagtttttatggacggactcctcccagtgggtgggactagagagggacagctcgtattccggtgttttcgatttgaaaagtgaaactgttgtgttgggccagagtgccgtgatttgatccttggccctgagaatcgacggtcgggtgttgtgcgcactgaaccagttgaacacgtagcgcgcgtcgcgaaataccggtctgtgtgttgcaagcggctacgagtgctacgacgggctacgacctcaccacgcccccttgctacgcgtagcagccagcttagcgcctataaatttctgtggagcaactaattgcgcctgcgcaactaacaagaaattaatcctaggcgcttgcagaaactgaagtcacaagatgtcaaaaattactcgtacgcccccgccgactccaaaacctcagctgatgcacacacattcgaaatcggatccagacttgccatccgcgatggaagaaactgccgagcagagtcggaatgtaacatcacgacataaacgcccacgtattttcggttctccatcagatgaccatgatccttctaaggcatttttgaccaactttaaaaatgagttaatggtaatgcttgaagactggaagttggaacaacaaaaaaccttatctcaattggttaccgatgtcgctcacttaaaactacaatgttccaatatacaacatagcaataatgaaatcgagaaaaagattgtatcattgaatcaagattacgaggaggctttggccaaggtatctcaacttgaagagacacaaaaagaaaatagtaattgcattagcaatcttgaaaagcaaattcaagaacttcaacttaagtgtcgatcgtcggcaattgaaattagaaacgtaccagtaatgccaaatgaaaaaataaacgaccttcttcagattgcctcgtgcttgggacagactatccaaatggatctttctagttccaatatccgtgatatttatcggttgcctggaaaacctggcctcactcgctctatactagttgaattctcaacggtatatttcaaaaataacgttttaagtgcagtgcgcacttataacaaagagcgcaatatcagggataagttgaacacagagaacattggcattgctggagaatgcaaaccaatctacgttgatgaacatctctctccaactacaaagaggcttttttaccttgctcgagacttcgcgaaacgcaacagctacgatttctgctggatatctaacggaaaaatcctaatacgaaaaagttgtgatacaaaggaagttcacttcgtgaagacagaacagtgtttgttgaaattggaatccaagcaatgactattcatcccaaatttgaactcgaatattagcgtcagtagtgatcattgtagcttttctcttttttataaaaagtttcttttctataataagtttttgaaaatatttttttaaaatgttcctgtaacttatacattcttaaaaaacaagttcaaacatgtaaatttctaagtgactttagccaattacactttataactgtaataattatatattcttatagtgagatatgtaacgtgactgatatttccgtgtatatgccactgcaacgtaaacctatagtattgcttaatcatttaaattgcatcattctttattatcgcttaaggcaggtttcgttgctctctaaagataactgttacatcaaaaatgactgataacataaatattatagctaatgacattgatgacttcaaagtagcatattcccacatttgttcaccaaatgaatgttctgagcttgtcgaaaatcctaacactactttaaaaattatacacattaatataaggagcatcaataagaatttcgatcagtttgtgtgtatgttatctatgataaattttaatttcgatattataatcctttcagaatgctggttaaaaggggcggcttcaccacctcatcttgttaattactcttttcatgctacaacgaatcacttaatacaaaattatggtgttgtgatatatgtaagaaatggacttgaatacacaatatctgaaccatcttttcgggatgcaaattgtctaatatgtactgtgggtaatactgcaatcgtgggcctctatcggtcaccatcttattcggacctaagcaacttttatgacagtttagagacggtgatgtgtactttgaaatcatttaaaaacgtggccatgattggggatctcaatgttgacattaaggataacaacaatgttgatcgaaactctagtgaataccttttatttactgcatctttaggattgctatcagcacatgtgtttccgactaggcttggtaactgtctcgatcacattttaatgaagacggacacaactgtaaatacaatagtacttgagacccatattacagaccatttacctgtgatcctatgtctgaggtatcacaataaaatatacaataatactcaaaaatttataacgcgcttagactatgcttctattaaggaagatattgacaaatatgatttcaattccatcatgaatgaaactgatgcaaataaagctgctgataaattgatttcggacattcaaaatgtggtttctaagtacacaacacagaaaaaaaccagtaggcgcacgcgcattttgaaaccatggatcactgaaggaatgcttcgtcgtatcaggaaccgagataaaatgcatcttaatgttaaaaaaaatatcaataacaacattcttctcataacatataaaagataccgcaatttttgtaatacccttcttagaaaattaaaacgtgagtatgaaaaaaatcaattttgtaaagctcagaataatccaaaagcaatgtgggacgttataaattctatctcaggcaggaaatgtcagtcaccgtcagcaacagaactcttgcgactagaaactagtgcgaaactctctgcgaaccgggtcaatcaatatttagttaatattggaaaagacctggcttccaagctagttcctcctgattcttcgaccgctaacaacttaggagtgatagcttcacaatgcaactcacttggaattgaatcggttagcgaagatcaagtgtcagcgatcattgcatcgcttcggagtaactgtgcaactggctgggataatatcccagctttagtgcttaaactttcacagaaagtcttggtaacacccattacacacttatgcaacctttcaatatctaccggtgtgttcccaaacagcttaaaaaaagctttggttactccggtgtttaagggtggggacagaaagcttgtgaggaactatagacctatttctgtcttgagtgccttatccaaaatcctagaaagaatactcaataattgtttaacaaagtatctcaaaaaattttccataatatccgataaccaatttgggtttcgatctggcatatcgactgaagatgcagtaacaaacttcagtaatgcagtagttgattgtttagataaaggatacaaatgctatggtatatttttagatatatcgaaagcgtttgatacggtttttgcaccaatacttttatctaaactagagcttatcggggttcgcggtccatctctagatatatttagggactacctatccaatcgctctcaggtagttaaaattgatgatgttattagtgaggaagaacaaatcgaatacggagtcccacagggaagtatcctcggccctacactattcataatctatgtcaacgacttgtgcaagatgaagcttgatagttgcaatatttttacatacgccgatgatacagccttattagtctatgcgaagacctggttagaagccaaatccttagctgaggctaacctgagaaaaataatgatatggatgtcttcaaacttacttactctaaacatagacaaaactaaattcatacgtttctatctcccaaattctcctacaccaccaattgaaaccacaacaatcacggctcactattgcaacaaaacctcagcaacgatctgttcttgtccgcctttagcaaatgttccctgcattagatatctcggtgttatgattgacgaaagattaaattggcgcactcaaattgaaactcttaccgggcgtgttagaagattactttatatctttaaaaatcttcgtcattctgccgatctatcagttatgcacacagtctatgttgccctgtgtcaatctattctcagttattgcattcctgcatggggtggtacttataaaactctgtttctacaattagaaagggcccagagataccttctcaaagttatacactgcaaacctcgtcgctactcaactacagatctgtataaggaatgccagttattgactgttagacaattattcgtccttcgcaccatactgcggcgacattcacaactaccccttagtaatcaaattttacaaaaaagacggggtgctcttgtatgttctcctgttggatgtaggaccagtttcgcattacgtcaatataacgcactgagttctagaatttataacaaaattaataataaaatctcactgtataaattaaataaacataacttgaagattaaattaacccattggcttaagtctttaaattataatgaaacagaggaactcatagtatttgtaaagtaaaatataagtacctaaatagatctactgtaagtaatcaatattgcacaaaacttttaatgatattgaaattgtaatagcattagagaggagagccgccgattcccgaaatacgagctagtctcagtttgggaatcagtgtgctatttttaattaccccactgtacaattaatatgcttatctttgtgttgtgttgatttgcttattgtacttttgaaggaaataaattattaattattattattattattggttttggtatcttattgtaaacgattggtgccatacaaaagacacttttatgtagtaaggccgtgttagacatctttacacataatttttggctatctcgcctgtttctattatttacttcagagagcctcttaaacaaatttggattagatttaacaaagaccgagatttcagagatatacagaaggcaaagttaaaatatggtgcttaataaagagtggtctacgtagagtcaatggactgcatttgaaacattgacctgatacattttttttgcattttaaaaattacatctttattggtcgaatttgcccagaagatgataccatatcgtaaaattgagatgaaactaccatggtaagctgttatcagagcttctgtgtttaaaactggcacaagttttgataaaaggtaggctgttttgcctagcttttcgcttaggttatctaagtgcgctttccagtctagtcgttggtcaacagttaaaccgagaaattttgatgactctacacgacatagactgttgtttttgtaattaacgattaggttaggaggcacgattcgttggctgaagtgcattaatttagttttcgagcggttaatttttaaattattattgtctaaccaagtgataatggacttaagttgttcaatgcaatacgattgaacacgttttgctgacccagcaatcgaatacagtcgcactaagtgcgcagcgatagccagtgcagtttcggacagcaaaccgggcgcattcgtagcatatcattagccatctagctcatttagcgtagcgtttaatatagcattctatcaataaatctctcaaagatattccagcgtttaattcaatcgtagctagtcataccacttaggtcgcgacccccacattttggtccttcgagccggatacaaggacttcgcggtcggaaaattcgttaattcgggtctaacggcagtgaagtggacttgtgtctgaacagtgactattgacaagcagtgtttattatcttagcagtgaactttgtggtagactccagcagcagcaagtattgaatttcaatagtcagtactgaaaacagcagcgagcctacagctcaaaatatcagcatcagcaatcactgacgggaggcgcaaccttcgtcagtccagcagcgaataatcaagtaagatcgttcaattataatatttttgtagcactcgcacgaaaatggagcaagttctgtacctcagtcagaccgagattgcagagagcattaaaaaacttattatcaactttaaaaaggatagcgtagagcgtaagacctttgattattgtaagcgtaaacttgaattactcgaagcatactggactgaattccagaaaaatcacgagaagctaattccttacgaagtaacgaaccataagtacttcgtcaattcagagtttgagcgtagccaggacctttatttgacagctaaacaactaatcggtcaatgtcaagaagagtccatccagcaaggtaagcggtcgccatatcctcaaccagagcagcaagaagcagccggcacttctctcacccagccggaggcaccagctatagcagcaaccccatcgtttcaatcgaggggatcatcgagcaagcttgacgacatgctccataagcagtcgataaatttcaaagcttttattcgagccgtcggaaatatagacatagagtcactaaccgacaaatgggaatttgaagactcccttcagattctacaaaatcgctggaatgcaattgataatcttcattgggaaattgtcggggagtcggaagaaaatcccgcttacgagtcccactttagcaagcatgaaaaaacctttaacagcatgaagaaagctatcaactcgaagatgtggtctacgtcacatcgcgagaaatccactccgaaaatggacatcccagtatttacgggcagctataaccaatgggtgtcatttaaggatttgtttaatgaagctatccacaaaaatacctcattatcaaacgctcaaaagatgcaattcctaaaaggaaaagtcaaaggtgaagcagagcgtttgatacaacacctgcctatcagctcagataattacattatctgttgggagattcttaatcatcgatatgataataaaaggcgtatatttacatctcacgcgaatgtatttttgaatcttcctaatatacagcagcaatcgttttcagccatcaaaaaattgcatgacgtcacgttagagagccttcacgccattaagaacttaggtgccgacattagcacatgggaccctctacttgtgcatattttgtcgttggatagtgaatcttattcggaatatatagagtcgttaaaaagcccgcgcgagctaccagtattacaagattttttgacttttctagagaataagttcaccagcttagaaacagcgcgtcggcgacaagatagcgcaccaaagtcgcaatcatcttatcaacaggatggtgtatccacatcattttcaaataacaagaaaaataattattataaatcaaacgattataattggaagcaagcaaaaccagttgcgaaatcgttacacgtgtcagcaaccaagtgtccactttgttttgatgaacataatttgtcctattgcgaaaaattccttgctatgtcaaaggaaatgaaacttaaaactgttaacaatcatcaactttgtattaattgcctatttaatcataatggaaataactgctattcgacaaaaagatgtcgcaaatgtcatggaaatcaccatacagtattgcatgaatgttttactcagcagaaaccaaactttacgtccggtccgactaagcaacaatcaaattacaaaaaacaagaggaaaataaacctcaaaataatagcaatggtgttcatgcatcgcaacgagaggtttctgaaattcttttagcaacagctttagtgagggtgacgtcagcagacagcacacagctagttttaagagcacttattgaccaagggtcacaactatcattaattagcgaaagagcagcacagcaacttggattagagcgacggcaatttaatggatgtgtatatggaatcggtaatatggacaacaagaaaataactgcaagggcatgctaagcattacatgtcaatcaatgtataccagctttcaatttaatactgacgttttaattatgactaatctcattaaaaacctgccaaatcagtcgtttgaaaagccttgttggtcacatttagagcacatcaacttggcagatccggagttcaataggagtcgcccagtagacttactactcggggccgacgtttacgcacttatcatgttaagcggtatgataaggggttcagacacatctgcgcctctagctcagcaaactcagcttggatggttattgtgcggtggcgttaaaacttttcattgcaacgtcgtcctaaacaatatagcggatattcatgaattttggcagattgaggatattcaagagcaaagtgaaatgtcatctgaagaccaggaatgtttggaatattacatgtcaacaaccaaacgtttagacagcggtcattacgaagttagaatacctctgaaacaacaagcaagcgaaaagttaggatcatccaaggagatgtctttagcacagtttcgaaacctggaaagaaaatttagcaaacaagaacaattagcacagcaatataagcaatttataagcgaatatgagcaattaggtcatatgaaattagcaacttccagcagtaagctacttgaatgtttcttacctcatcattcggttcagcgggcagactcttgtaccaccaagctacgtgttgtatttaacgcgtctgcaaaaacatcttcaggacatagtctcaatgatcttatgcataaagggcctaatttgcaaaaggacctgcaaggtttattgttgaaatggagggtataccgttatgcgttcacggcagacattgagaagatgtttcgtcagatttatgtcagtccagcagatcaaaaacttcagcagatcgtgtggcgatcacatcccgggcagccaatcagagcatatcaattaactacagtcacctacggtacaaaggctgcaccgtttttagcaatgatgacgctgcgtcaattagcaacggatgaacagcataatttccctcaagcagcaaaaagcttaagagaagacttttacactgatgatctcgtttccggtacccatactattgaagaaggaatatgcaatatagcagagctaaacatgtgtcttagcagcggaggattcgtgttgagaaagtggtcagcaaatgaaaaaaggttattggaaaagattaactcatctcagcaaactttaccaacaacatcgttcatttttaaaaccgaaaacacagggaaaactttgggattacgttgggaccccaccacggatgaattcagttttcaatataccctgtcagcagaaacagcaaagcttacgaaaagagtgctcctctcagaaatatccaagttatttgacccgttaggttggttagcgccactaactactaagatgaaattattatttcaaaagatttggctagacacaaaaattcaatggggtgatgaaattccagatgacataaaaagcgagtgggtcaaattaactgaagatttagcttatataaatcggatcagaatccctcgttggctgcaaagcaagcttgacacggtaattcaaatccacggattttgtgacgcatccacaaaagcgtatgcctgtgttgtgtatgccagaatcgtttcagcgaaggaagtgtcagtggtactaatcgcagcgaaaacaagattaataccgaaaagcaagaccgtatcgttaccgcgactagaactctgcgctgcagagctgttatcaagactcatatcaaaaattactagctgtatacacaacatacaatacgaagtgtatgcctggagtgactcaaaggtcacccttagctggatacagggtagcccagaacgttggaagccctttgtatcaaacagagtaaggaaaatttgcagcataatatcaccggacgattggcgtcacgtatcaacaaaagaaaatccagcagactcagccagtagaggattatcaatgtcacagttgagtgaaaatttgttgtggtggcgaggcccagcttggttatcaacacccaactttaagcctaagcaagacaaagctgagtatacgactgaagaagagctcaggttacagacagcaactgttcagcaatatagcccgcaaaacagcataattgaagatttactaaatcgtctcagctcattcttaaaaataaatcgtattatagcatggttattgcgtgcatttgcaccgaaatctaaacaatcgccgtcgtatctcacgttacaagaactaagaaaagcgaaattaatcataattaaatacgtgcaacgcgcggaatttatatcggatattgaaaatttattgcacaagaaaaggcttacttcagacagcaagctattgaatctcaatccttttctggacaacaacggcatattgagagtcggcggacgtctgaaaaatgcaaacatcagtgcagagatgaaatatcctataataataccatacagcgggcggttaacagagcttcttatacagcaagcacatgaacttacctttcatggaggagctcgacttaccttgtctttattaagacataactattgggttatcaaaggtactcgagccaccaaaaagcagcttcgtaattgcgtgacgtgtaaaaaacaagagccgagaaaactgcaccaaataatgggagatctacctgatgttcgatctaacccagcaccacctttttataacactggagttgacttcaccgggtcgatacgagtgaaatccaataaaggtagaggcataaaaacatctaaaggatatatcgccttgtttatttgcatggttacgaaagcgatccatatagagttagtttcggatctaagcagcgcatctttcatagcagcattacgtcgtatggcggcacggagaggatctccgaagcacatttactcagataatggcacaaactttgtaggcaccaacaagattctccaagaggagcagcagcagttagagcaaatttataacgacagcttttatagagaaatagccgagatgagtatagagtggcactggaactgtccttcttggccaagtgcggggggaatctgggagcgctcaataaggagcctgaagcaacatttaaaaagagtaataggtgatcaagccttgaccttcgaagaatacagtactatactctctcaaattgaagcgagccttaattcaaggccattgtgtcctttatctgacgatattgaagatatcgattttctcacgccagcacattttttaacaagccgcgctggtctaactattattgaaacgccacaggatgcaagaacacgatggtatttatcacagaaaatatttaaggatatatggaagcgttggaaaacggagtatctatgccaattatctgtacgaagcaagtggtttaaagcacagaagaatttagaaatagaagatatggtcacaatacatgatgacaacttcccggctggaaaatggcctgttggtcgtgtggtggaagtccaccctgggagggacggagttgttcgagtagtaactttaaaaacaaaaaatgggtatataaagcgtcctatcttaaagctatctattttacctatagcaaaagaagaagcaagtaagcaaaagcaacagaaaagcaaaacagtaaaacagcaaagcattgaagcagaatcgggattagacaagagcgaagataaaccgtcaaatacttgtcccagaatctttagcatagcactagcattactatttttcatgaccatattaacacccactgaagcgtcttacaaatttacatcatttgaaaacaatcagtcattgtattttgatcctctgggtcaaatgcatcttatccgcgatgagtggaaaatcgtgacttactacaatatgtctccatactggcagggagacaaagctataacaatgtttacaaattatctcgagcaaacctgcgggaaaatacaagagcagagtcattgtcaaatcatcattttacaaatacaacatgagtacaacgaactacattattacaaccagctgttgctagatcagcattttagagcgcgctcgcgaacccgacgcgggcttatcaatgctgtaggttctatagcaaacacattgttcggagtactcgatcaggatttcgcggaaaaatacaagcgtgacattgacctcgtgcgtagtaatataggtcatctaagtcagttatataagaatcaaacatcagtaatagaagcggagtataatattttgaagagaacagaagatactattgaaaagcaacacaagatgataaacaagcatttgaattatctagatagcgtcaccaatacattgcagaaataaattgatgtgatgtctattcagcaagaatttactttagcagcggtagctacgatcagtatgattcaaaacttaaagcgaatgcaagattcttctcttgataccttgactgacatatatcgtggtcagatcaatttgcatcttttgccaccgaaacagttacgtgaagaactacaaattgtgtcgggtcaaatctcaaaagaattatctctgccaatcgatgacatccagcttaatcttcccaagatctacaaactattgaaaatcaaagcaaggatgagtgaggagtatttcatattcgagattaccttaccactaatcagcagagatacattccagctatatcatgtaattgctgtacctgttcaaattaataaaagcatgatcagtgtcaagccagcatcagactacgtcgcgatcaaccttagaagagattcttacctatcagcgagcattagcgatcttcaaggttgtgaatatcaagaccaatcttacctttgtcgtttgcagggacctatcaagaacctcgatcacgatgaaagattctgtgaaacagagaaaccttcgagctgtagattgaccaaatctagctgtcaaaacaaatgggttcagctacacgatttttctacctatttgtatttctgttgcgatgtaaactctttgagagttatatgcgacgatgtaatagaatcacatcaagtcagcaaggccggacttatttaccttagtaagcaatgcattgtaaaaggtcgggatgttacactttattcttaccagcaattagagaatacgcttacacttcaaccaaatatactcgtaggaaagctaacgcctatacatcatttggtcaaagatatttcgctccctatccaaaatcttgatgaagctaactttgaaaaggtacagatgaatgagtctctaaagcatctcggtgaacaaattaagtctatgaaagaatcagctcagcagacagagatcctgacgacacatgatatacatcattatgctttgtcgtatgggttattagcagcagccatcgcagtgttcctgtggttcctgaggaggcgaggacgacgagcccttagctcgcccgaacaacagcgtgacgagagtgtacctaccagtgtgagtgtgtgcataaaccaatctgaccagaaccaaagctctagtgtaagtgcgcgagatctaccccaacccgagatggggtcaagtgtgagtgatagtgttcgcggacatagctttaccaaacggtggtctagcatacgtttaaaaaagcgagacatatcgacgtctcctatcgcgaaaagacaatcggtatttactattgaagactcaaccgtttgagcatatagtttttagtcgctagcttgtaagattttattgttctttcaccttgtgaatcacttaccatccagcattgttttaaccttcattagcatttagttcatcacactcacgtaacttcctttctttgtactagctaatctcatctctcccccttgggagtatgttcaatgcaatacgattgaacacgttttgctgacccagcaatcgaatacagtcgcactaagtgcgcagcgatagcccgtgcagtttcggacagcaaaccgggcgcattcgtagcatatcattagccatctagctcatttagcgtagcgtttaatatagcattctatcaataaatctctcaaagatattccagcgtttaattcaatcgtagctagtcataccacttaggtcgcgacccccacataagtgttttatttatttcagcctcatatgtggatttatttgtacaatcgatagtcacggtactatcatcggcaacaaacacataaggtgcggggtaacttttggtagatcgtttatatacaatataaataataggggtcccaggacgctaccttgtggtaccccgtacatcatagtacgtttgttagacctataaactatttccttttatgtttttatatcaattttgacaacttcggtaaattgtttcggtaacagctgaaggacattacctcgaatcccataagcgtttaacttatcaagtaatatgtcataattaacataatcaaacgcctgtgtcatgtcacagtaaattgcagtaaccggtatctttttatctactttattatatttcataactttatccaaaaaaacatatacagccatattgatatttttatttttacgcaaaccgttttgggtgtcacttaatatatttttcctttctaaatatttgtatatttcctgataaatgaact

SEQ ID NO: 140 - DNA, 20681 bp, Tetradesmus sp.
  source 1..20681: mol_type = other DNA
tagctcagcagcgcaaagagcagcaacccactgcatgaatggcttccactacattgcaggatgccaacattggccgttacacagcgcgactgtcccaccaagcatgcagtgtatgcctgctctgcgctgattgtgtgctggccgctgctgctgctgctgctgctgctgctgctgctgcaggagtttggccagctggacatcctggtgtccaatgcagcagtcaacccaacagcagggccgcttgtagacacaccagcaggtgcgagaacagctcgcagcactgcctttgcaaccagcttgcttctgcagcacgtagcccctgcacacagctttgaagcacccaatgggctcagcttatatcatctgtgtgtgtagtacctgcaatgctccactgcagggtgtgcattgtggcaagcactatgaaagacgctccaaccctaatgctgctttgtggattacatgttgtcctgctgactgtggctgcagtgacaggacatggtgttgcgttcctgctgctgctgctgctgccgtggctgcttctgctgctgctgctgcatctgctctgctgctgccggtgctgctgtgctgtgcattgcaatgcagatgccattgacaagatcctggacatcaacatcaaggcggcactgctgctggtgcaggctgcagctccgcacatgaagcgaggggggcgcatcatcctcatcagcagcgtcactgcataccagtgagtagtttttcaaacctgtcggcactgctcaaggcttgaagcactgctgaagccttaacagtttgtacatgtgtcatagtgctgccaaagagacttacatcattgcttttcagtgccacaacatgcattttggggtgtcttaacaagcgctgcaacagtctgcaccgccagtacgcatcctcgaggacttcctcagtgtttcagcactgcacgtgtgacagatctgtgtctctgcattgcgttatgctactgtgctgctactgtttcacagatcttttgcgcgttgctgcccatgcactgcaggccgcctgcccccatcgcaatgtatgctgtcagcaaaaccgcgctgctcgggcttaccaaaggcttagcagctgagctggggccggacggcatcaccgtgaactgcgtggcacctggtatcgtgcccaccaagttctctgctgctctggtggcagataaggagctggtgagtttcgcgtgtaaaaagatcacgtgctggttcggttcctgtgttgcatagtgtgcaacaatgtgtcttggccaaactcaccacctcagtggtagccgagtctcttctggatggtattgctgttgacggcgtggcccccggcatcgtgcccaccaacttctctgctgctctggtagcagacaaggagttggtgtgtgcttgcgtgtttgcggttctgcgtttgctatggggctgtgcaagcgcgctttgtgtgctgcaaaggtgtttgttacactgtctggtggaagctgtttggggccagacggcatcaccgtgaactgcgtggcccctggcattgtgcccaccaagttctctgctgctctggtagcagataaggagctggtgagtgcttttgttgccaataaccggtttctagggcgtgtatagggggctcagctgtggcacaatgcttacgacctgtgttgccagccgagctagggccggttggcatcaccgtgaactgcgtggcacctggcttcgtgcccactaagttttctgctgctctggtagcagacaaggagctggtgagtgctgttgtcgccagtaaccagtttgtagctgtagggcacgtgtataggcatgcctgtatagggcatgtttatagggggcttagctgtggcacaatacgtgcaacctgtgttgccagcttagggtggggatggaaggtattgctgctgactgcgtggcacctggcatcgtgcccaccaagttttctgctgctctggtggcagataaggagctggtgagtgcttgcgtgttgcggtttgcagtttgctgtggggctgtgaaacagtgcgttgagtgctgcaacagttctgcattgcctatctaaccgacagctgcctgtcggtcagatggcgtcagtggcccctggcatcgtgcccaccgctgctgctgctgctgccgccgctgccgctgctgctgctgctgctgctgctgttgcacttgcaggagcgtgctcagatagaggcgaccagcttgaagcggctgggcaccccgcaagacattgcagcagcagttgcgttcctggcatctgatgacggcagctacatgacaggagagacgctggtggtggcggggggcatgagcagcaaactgtgaagtttgaacacgtggatgtgggtgcagcaggagctgcgatcgagtatcagcagaacggtcgatgttgcagacagccggccagcacagctgcaggctggtgccgctgttttgtggtgagtgttggcttcagcaggctggcacaatgcttgaaggcgcaattgaagcggcgcagctgcattttcggttgttatctggtgtggttttggccgtggttgtgtgcagttgcactttgacagttcctgggggcaactcctacttctggtaacactagtggttacccgtggctacgccactcgccaactatatcgaagacatgggcttctgcatgcacgtttcgttgctgcatgtacagcactggcaccaatgtgttacaaccctcagcacctgaggcataccagcttgtagctgcagctgatagcatatgatacatcatcatcatcatgttacccattaagccatagcatcaacgccatatgatacagcatatgatacataacacaactattgagttcctcaagcacactgttgcattgccgagagtgaaactcaaactccaacgccgaggaacacctcatgacatcatggtacacaacattcttagtgtacacaccagctgtaacagcctctgttgctgcacggaagccctcaaccaccaacaccttgagggcaccccagatgccaacccttgaaaaggccacatacaactggccatgtgagaacacagggcgaggcaggtacacgcctgctgcctcgagtgtttgcccctgtgccttgttgattgtcatggcatatgcaacgcgcaccgggaactggcgacggcacatgtcaaaaggcatagcctgcgcatcagagggtaacatgatgatgatgatgtcaaaaggcatagcctgcgcatcagagggctgcaggttcaggcgtggcagccacaccacttggccctttgcagggcctgtggccacctttgcctggatgaagttgtccatgagttttgtgaccaccatgcgtgtgccattcgccaattgtgcagacatgttgcgcagcagaataaggaagaggctctgtgagttgtgatgttacaagctgaaacgtgaatgtgacatctgaaaataacttccttatacagtttggcagcggttgagcacccggtgatcaccttgtggatcgtttggtctatcgtcggtttcccactgtgaaattgtataatgcgcacaacagcattgatgcagttgcggggcaattgcaattgtgtaaataagtcactcatctaatacaattgcgcagacggtccgagaggctttctgtgcgactgtccctaaagtgcactggcaatctcaagatcaccccaaaaatcacaagaaaccaaaaaacacatttttctctttaccatcaactatggacatggcgcaatttttcagcgccaccagggaacaagtacgtgcagtgctcagcagtttccttgccccaactgcatgtcttgtacacactttaacaactgctgccttacttccctgaatgcatcctcctggctgcatggttcagccaaattgccatactgcctggcagcttcaaccagctgcgtaaacatggattgacattgtttgacaggctcaactccaacacaccatcagccaactaagcagcagatcaggagacaatcgactccgtgtcacattgccatcaatgttaactgctagctcttgaaagcagactgcaaccgatcataccacttcttttgctgctgctgagtcaaaaaactagaggttggcagcaggacaaaaatggatgctgctgccttcagcacgttgcttgtaaagctcgcccaggggtactgctgcttgctgtccttcacccagggccgccagtcaagcatgccagcaactattgcaagaatgagcaggaggaccaccctgatcatggcctctttgcgtgttggcatgccttgccctgaagaacaggcgggaacacctcagtctgtcttgagatgtttgcccttgcctgcatgaagcaacccccgcaaaagagatgatcactggataacagagtggctcttgcacggtggtgtagtatgcaacccattttagaatacaccacatgtgctttgttcatgcattgtgtttcttgcttttcagtgccgcttgagctagtagctactggcctacacgtgcaccccagcaccccagcatgcttctcaccaatgctttccaaaatctcccgtttctggtcggccagagccttgtccagagccttgtccagagctgtcttcagtcgcttctcctgggcagccagagctgcctgatgctcgtcacccagagttttcatgccatctctaaacgttgctgagctcaccagtgccctccctgcaaaggggtgaattggacaatgcatcagaagtcaaaacagcgttatctacgatggtgtgtatatgtgcgtgcggtatacaaagggggcttgcaaagcagtgctgcagagccttgggtgcataagaaagtggcccagtggtagctggcatgtgggcatgatggtacatgcagcaccgttgatggctaggactgcatgaacccccatggcccctgcctcccttggcatgactgtagggcatgtgcagaatgtaataaaccagcttgcataatcaagaaattcatagaccaatccatgctgctgtggcaatccagactgcaacaaccctttccatgggaccagcaagtagccctgcaaatgactttgcagcaactgctggcaggcaccacaggcggccgctacatgctcacatttcaccactgcatgcggctccaacgctcacctggtgctgctgcggtaaagcatgggccaccaaggaatggcagatgatggcgcatgcacaggggcaaggcagggcagagcagggcagcacaggtccacatcagtgttgcatgcaatgggctgtaactgtatgcatgcagcattcagcagtgcaggacggtaatatggcactcttatgttgtcttttgacatcacagcgagcacacttcaatcaacaatgtgtgcagtgtgtgtagttgcatttgggagggcagagttttatagcaggagatacaacgtctttgatgtagttatgcacctcaaataccatgctgctgctgacaggcaggcacgcatgatattggtagtgagcatgctgcaggtggtggtgcattccgtgcgcctgaccaccagggctgctactgcatggggttccacggctgatgctgatgattagcagacatgcatgacagctagcatgctgcataatgaggtgcaggttgtactcctgacaatgagccatgctgttgcatggggttgcaatttgaaaagcaatagcgtaatgcgactggctacagctactgttgagacaagttcagactattgttgactctgttttgtcgtattacatggaaagcgacgcgtttcgggctccacccttcatcaggcttcaatcctgtgaacacggacagaatcaacaaatactcgccatcagaagtgtgcaacagggtgcaggttttggggtgaggtcactggccatgttgccagtggctcgaaccctgtacaatactgcactgcaaaagcaaaccatgaggtcttgatgatgaacacagggtgagagccactggcaacatggccagtgccctcacccaaaaacggccagtcagtgactggcctttactaagaatgaccccaggttcctgccttttgtgaatgcaacaatcggtctctctgaaacctcagcatgtagatctccaccgccaatatcatatgcaccccgcagcaactgttgcagccgcagctcaggtatgagttgtgcatacggcaccaccatgacaggcttgctgttcgcagttgcagctgtgctgctattgctcacagacaggtacctgtgccgcaatgaaaacgacactcggttggtgatgctggctagcagacgctgagggtaacccctctggcgtagccggtgcacaaatttgcgcaccatgcagtcaaaccagtgttcgtcactgttagtgacaacataccgaatcaactctgcattgatgaagctcctaaacacactaggtggatagaaagagtaatgtgggatgtaaaggtacttgttcagtaccttttggtgtgtgcacactttgatacgcactctgccatctgcatcgcagacatcctccatacacctatgaacaaccaagtcgagaaaatctacttcaaactggctgtagctgtgtgtgatctttatgtttggcaacaatgtgttgagcaaactgatgaaagcaagcagtttctgctcgctgccctcaaaaaccacaaatccatcatcgatataacgcttaaacagagaggggaagtcgctgcccaagcgttgcttggcaacaccttcccactccctggccaggtagagctgcaaccccacagctgctccacacacagcagcaagcaatgctggtttggcaggcttgccacaatcaccattgcaagcacacgcacgactcacctgctgctgctgtgggttgaaagaaaaagccaggtgggagccgtgaagagcacatgcaaaaacacacgggcagggccaggttcagcaaaaggtcaaacaaagaagcttgcagcatgaaagcgcagtggcatgcagcacacaggagcatgcaggagggtgttgcagaggtttcacaaggaatacaacacaagatgcacgatgtcggtcaagaaaaggtggggtggggaagcaaagcgtggagggggcatgcattccacaccgcagcatgcatcatcaacacggacacaaacaggcatcgtgcgcattgaaggggttgcatgcatgcagcaaaactcttgctacagcaccataggaaaaaacatagcaacacagggttgtccaccaggggccatgcagggtgctgctgcacacccttgagtgagcaccaaagttgagcaaccgcggctggcatgttgcatgtggtgatgcatgcagcacttgtaatggctaagactgcttctgcttggtttcacagctgcttcaaatgcaatcctcaagcatgcctgttgtgagcaaggtgtgcaaccccaggattgctcgcatctccaaaatccaacctcctgctaagctgttgccaaattctatggttctggtggcaaacaatagacattttcacccacgctgcacgcagcgtataatgacagcctgatggacaccctgattgagtcagcgcatctgcggctagtttcagtggacctttgaaagcttgtctaatgctacagcttcccagtcatccgactgctttagaacagtgcaaacgccttgtcggtcagcagcgtgcattggcttcaagagcgcctagcataatcagcaactgttatcaaggctctgtgatactgcgtgccgacatgcagagctgccagcaacaccactgcctgcaccaaccaaactggggttcctgctgctgtacacggggcctgcctgagattctcatgactcaccagactggctgctcagcttgttgattagccgcagcaactccagctccagcgcctgcagctgttccaactcctcacggttgttggacgcttccgctgcgtcgatgcgagatctgaccttctctaaccgaacctcatggcgttccagctgagcttgaatgctttccagctcctgctgcatggcggacacccctgccaactcggctcctgctgtatggccgaggcacggcgcattaacatccatgaatggatgttggaacgtgttattgtgttgctactccgttgaattaaggagcaatggtagaagcctcgtcgcacctcctgaactcattggactgaagctgcggatgcgcaagcgcagcactgagtgtttcccaatcacttttctacaaaaatttcgccgaggcgtgaatacatgcaatctaatgatggacagctgctgtcgatatgtgctagcaacgaggcaacgcttgatggatagctgctgtcgatgtgctagcaacgaggcaacgcttacagagagcgattcaaccacgcagtacacaccagctgccaagtctgttgttcggtgtcgtcatacattgtaacactcgtagggttcggctgtttcctatcgtaggcccttccctcagcgtgtaggtgcactgctgcctcttctggtgctgttcatctcatctccatctgcatctccaggcatgccaaagtccatatagcccttgcagtgatagtaaacggcactgaagcctgtgcctagtgtggcctggaactgcgccagcatcccgctgagacccagcacccagattggcggctcagctgacagccctggtaaagagctgtgatcccaggtgcctcgcgctgtctctgcctggcgtgaccccatgtacaggtgctgagctgtggccatcagggcctgtgcagcctgccgcgcgcagctgaaagcaaaagcctgaggcattcaccaaggtaaagcgtatgctctctgcatacagtgcaagctctttgcatgttcagtaggtttgtgcatttgaagagcttctgcaggctgtcctggtatgcacacaagtgagcaggcacatgctggcaatcaccttgcagtcccaccaagcatccatcaggcgagtaatggttctggaattggcggggaaagccaggtcaacttgcacaggatcatgaaaaatgagatagcaaggagcttaaacatcagctgcagcaggagcagcgtgcgaacaaggtcagtaaactgtcgtcaagctgcagcaagcgacagcagccttgtggctggtgttcagcagcaacatcagtgatcaggaatccactagttgggtgggtttgagtacctttacaacacagcaacaacaatccagcattgccactctggcacttccatcctgccacctgagcacacttgattctgcttaagttgttgctgtcaaactacaagagagggagcttaatgggtaacatgatgatgatgatgaagagagggagcttgtaagcgttgtacgaacgtgtggctgggtcgccgccagagcatgcagcttgccccacagcaacaggtgtgcctgctccttgtgcccccttcaacatgctcatgcttgctgttgttgttgctggtggtggtggtggtactgctgctgctgcttcactgtgcgcaggaaaaggacaaaaaggtcagcgagctgaacacaactgctgcaggcgctatcacgctgtggacagacaccgggtggcgccaggtcatgacgatcgtgttgccaaccttcagcatcaggaaattggaggaccctgagatgcgcgtcacatacgagatgtacaagcacctgttccctgccgatgatgaccctgacctgagccacatgccaacaggtacagccaacacgctgacccatgcagccacccaactgcgcacagcattcacaaacaacctgtgggtgccgctcgtaccccgcctcaagcgactgtgccgtgcctggcggcggaaacgtaagcaggaacaagtggccaggagcgatgatccgagcatcttggacctggtgcgggcgattcatcatcatcatgttacccattaagccatagcatcaacgcctggtgcgggcgattgagacaagggcagactatgccatggagaagaagatgcatgcagcggctgtggagtttgtgactgaggtcaggcggcggctggggctgcctgatgcaggtgccaagctgacggagtcgtatgccaagcgcaaccagcagcagatgctgctgtctctggcctggctgcagcgtcgcgtggaggcgttgggtggaaagggtgtctggctttgccctgtcttcagcgtgtggcgccagcatcatcatcatgtgtggcgccagcatgtgcagctcgactgcaccacgctgctgcacatgctgagcggcatgcgcctggtgccagagcacctgatggtaaagcagagggcgaggtaacagactgggagggcgtgctggatctggtagccggcgtgtttgagccgccctgccctgcaaagcagaaggggaagctgcagtggtggggctccttgtcaacagatggcgtcgcagccagctttgtgtgcgcagacacaaggccagtctcaaaaaagggcaccaaaactacagcagcagcagcagcagcagcagtcaccagcaacagcagaagcaaagggaccacaggcgctaccaccccagcactgcctcctccccacgacttggttgttgtgggcatcgaccctggcaggtgcacgatcatgcacgccgcgacccaggtgcagagcacccgcacgctggagtggacgctgccccgcaagcgctaccgcctaaagtccgggctggcacaggcgaggccaaggagcggcgttgggacacggccatgattggtggcgcctggaaacagatgaaccagcagagcggagcactgcgcagcagctctcttcagcagctgacccagcacattgcggcgtacaacagcgtggctgaggagtgctggacatccgccatgcagcgggccaagctccgctgccgcacttatggcggccgcaagcgctgcttggaccgcttcttctcaggcttggagcgggacgtgtcggcagccgagcccaacaagcgcctggccattgcctatggtgccgccacgttcagcccctccggtactggcaagcccgccacgcccacaactgctgcctatagagcggcactgcgcctgtggagctctggtgcaattgtggagaagcagaacgagtgccgcacctcaaagcagtgttgtcactgtcatggagatgtggaggcttgctggcagagcgtacggctgcagttgggaccagcacccgacacggacgcttctggtgctggcccctgcccatcacagctcagtgccagaattcaggtggagacctgtcacggacccacggtgccaaaggctggcgcctacctgagggggttgctcttctgcccacagtgcagcaagttcctcaaccgtgacaggtcagcagcgctcaacattcgcttcttgtttacacaaacacagctgctgggttgctctatgcccacacagtttgtggctcgtcgcaagcaaaagaagcagaagaagcgcaaccaggccagctgaaacaagctggtatacagagggccatgtccacttttgatccggccatgctgtagatatgtgtgtgagaccacggccagagagaatgcattctctgcagctgccatcctatctgtcatcacagcacatgcacaaaaagcatcctgacaccgctgctggcaatgatgatcatggctggccttccatctgactgactacctgacatgcatacctaggtctctctcgctctcgtgctcacctgtccgatcatgatccgcatctcctgcggtgggtatgctgctgctgcagcactgctgccaggctgcacagggattgctgctgctgcagcgctgctgccaggctgtgcagggattgctactactgcagcactgctgccaggctgtgcagggggtgctgctgctgcagtgctgctgctgttgcgttgccgcttgggtgtgcgctcggcgtcggtgccctgaaggcaggtcacaagggggcatggcacgaatgttgtttgacaatgtatacatcccatatgatgcaggtcactggcgcagttgcaggtgtctgtaaaggagctagcattcgcacactgctagcagcaaacgctgcaagtgacatgaaaatcacacatgagccagttctacagctgccgctactgccccctgcagccaatgttgccttgtcacctacgtcatctaccttgcgcttgtgggcagccttgcgcctgatcttgttggtagccccgcgcatggcatcaccctggacagagcagcagcacaccatgagtacagcaacaggtaagaaagcaccacgtgacctggtgatgtgccagcacagtcagtaaagctgctctgcatatacatcccaagacacaaacacacaggatgcaggtcactggcacagatgcaggtgctccagtacgtgtgctgtttgacaatggtgcagacgctactgctttctgtcaaagacctggcatttgcacgctgccagagtttgctgatctcagttgcaaaataccatgaccggcaattgccattcctctctacttctgccgctgctctgtcgcacctgcagctggagctcgcgtgctagaccagtatttagcagctccctggccttgtcatcagcaccaacgccagccagccacgcctcgctggccaggtctgcagcagcagcgcagctaccgaacatggcatagcggctgctacacagcaccacgctacaggcttggaagccgggctgttcgcacagcaggttacacagctgctgcgactccactggcaccctttgcagtggtttgtgcgtgcgcttgctgtagaacttcagcgagtcaggcaggggggcattgctgacatccagatgtgcgcgccgctgaaggccggagctatcgcgctcggcggcctcaatgctgcggatggtagtgttgaagaggccctgggtcaagtgagggtctgggccatcctggtacagcgcttgagggcattcaaggacaatgttgctgcctgcaacaagctggttgagtgccgtgcagctgctgcactcccagtcatcgtcagggatgcaggcaacccccaagcatgccatgtgaagtccttggaagcatccctcacatatcagcatggtttcagggctgtcctgactgccgcatgctgtgcagcttgtgttggggtcaataggctcccctacagttccctctcggttttccatagcactgcaatgatagccagcagtagcaaattacaccggttggtggtggagcagctgttgtgcaggctgggttgcagcagtacagcagcagcaggtggtgtggtgagaagactggttgatgggtcgctgctgcagcgaagctgcgccgcttgtaatctatcatgtagctgattgcaaagcatagctgtcacagagttgctaagcagcccaggcactgcagacacgtctgatgccttgatgacaagctggcatgttgaacagttgagtgaatcttgcattccatgagcgtgtggaacattgcgcatgtgtgcgtgccaggaatggcagtgcctggagtctgctgctgctgctgctgcaacagtctcacgctatcagctagggcaggcaagcattgcaccattagggatgagcagatcattgcaagtgcattagaggctagtgcattgcatggctgctggggcaaacgacaaacaaaactgtccgaatggctgaagcagccagccgacgcccgcactcccacaactattgcaactccgaatgtttatccgcatccgaatgaacttgcctctttgccagagcaatatggtaggaggcggaaggccagaatggtgggttgtttcgctgcagcaccggagactggttgctttaccgtgtgtgtcgtctactgcgaacgtgcactgatggtggaaacagtcgagaggggcggacaggcgaggaaatagtcgagcgcagccaaggatcaagatgctcttggattgtccttggacataatctgtgcacttttcagcaacacccaaacaacttgctggatccctactgaatgtgttcaaaaatagccaaaaccgtagtccgatgctctttagagtgctttgcggcgaggcagccaaactagtgcacagcctccaatctttaagggttgatagggcacccaacatgcaagcgcagcttgtgtggcggcaagccagacatgcgcagtgtgttcaggaactctggtgggtacaaataagtttgctgctcaccacgcaccaccgagtctgcactgctgtacacgcggctgtcaacctgaacgccatcagggcgtggtgcacacattcttgctgtcatcagatcattcactgcatcaacatcatcattcagaggcgtaaggatagcaccctccacaatgtactgctgtcgtgcagcatcactgcgctggctgtcaatcttcccatacacagcatgtattagctcctgcagtgcaataacattgcacaataacattggcagtgctgcagtgcaatgcaccggacagcacagagagcaaggcacgtgttcctgtgctattatgttctgtgttgtttggaaaagttgtcgcagccctttgacacgggcactgtatgatcgctgggacccaactctggaactggacaccctagtctgcagcaatcctgtcagagctgatgcgcgtggatgcaaacgttcacaacggttgactggtattgattcctggcacattaagatcctgctgcctgtgcacacgtccaacagtgtcgtgttccacttcctggagctcagcttcgccgttgatcgccttagcaccgctcaagagctataactttccacaaaaatcataatccacgacatgattatggctgcctgacctggcatgggcccaacagtgctggtgagcaggcaaatgcgctcggtacttcgtgtctgacgctgcagtgtccgcatccacggctttacgtgctcggaccaacctctaaccgctacctacgttgctatttgtctcgagcaggatatgtgtgatccagcagcacgacagcagcaacagcagttccttgctgcacaatgtgcaagcctagcggggctctggaggtcgcagcagctggttgatgttcacatacaggcagcagatggcgatctgcacggcgctcatcgcgttgttctggccagcagctccggattcttcagagcgctgctgtgtggggcaggtcaaagcatgaaagagggcagtagcagcagcgtatgtggcttgcaggacagcggcatggtggtgcagctaccgtacagcagccagcagctttcatcgttactgaccatcttatacgagcacagcattgaggtgagagctttttgagggtggcggaatttctgtggttccttgtggctcagacgaatgcttgcttcttgcaggaaatgagcttcatgcaacagttctctaatttgttctgttatggttacagccacgccaactgctgagtcaggcgatggctatgtacagcacaccttacctgcccacaagccttgctgctgtggctgcaacaccagcacatgcaacttacggtgcttccttctacaggatgtaagttcttgaacatgtatttcacaccggctgctgctgatgctgtcttgcaggtgtgtgctggcaacgtggcttggctgttggacatggcctcttacctggaggtgcagcccttgcaggaggcctgctgcgaggtgcgttgttcaatttccgtgatgtcatcgtcattgagaagggcacctgcagaatgagcttctcccaagccatgtgctggtgttgagatcctgtgtatcagtatgctggtgcttgccgcgtgccgccttggatgttgagatgttggtcttatgttcagtggtttgaattttcagctgcgctttggacatggcctcgtaccttgttacagcctctgcaggaggcctgctgtgaggtgtgctgtgctgcaggttcattcatggactttattgaatgtattcaacaaggtcaatgcatgaatttgcagcacaacccacctcgcagcaggcctcctgcaagggctgcacctcaaggtaaaagtgcgcagagggagctactcccaagccacgtgctgctgctggagttatgtgtgtcggtatcaaattgtcagtatgtttgctgcttgcatggtgctgctgcttgctgttcttgtggcatgttatgtagacatttgagtgtttggcttggcttggcttggcttgtacctgggctcatacctggaggcacagcccttgcaggaggcatgctgcaggtattgtgctggagtgtcattcaattcagtgatggcgtgtcatttggcgatggcatgtcattgtgagaaagaaactgcaaagtgacccactcccaagccacgtgctggtgttgggatcctttgtatcaatcagttgctgcttgccgcgtgctgctgactgctgtgactgatgtgtcgttcagtggtttgcattttgagcgtggctgttggacatggcctaatactcggaggtgcagcccttgcaggaggcctgctgcgaggtggtttgtcacactctattcgccgtcgtggctgggtgacagtcattggtgtcaccctgcatgcactgctgaacgctgtgtcaaggcagctgctgctcaagctgttgctactgactgctggccaaagggccgatggtgtgtcaagattgtctttgctgtgcttaggcctgcaggcatgtcgaattggcctctgcaatcacagatcgtggacagttcacaccacccaggacggtattgcaagccattttgcatacacacatcacctcaggtccttcgggtgcaagtacaaccccgttgttcttgcgtctcgctctgcgtttctgcctgtcctgcagtttctgcgctctgctctgagccccgaagcttgcgtggacgtgctgctgctggcgcaccactaccactgcagcgcgctacagtcagaaggggtgagcagcctgctgcaagtcctgcaaccgcggctctccgaccccatctgcactggttcgcttgctgcctttgttatcgcggaccagcataactgttgcatatttaaaccttcagccaagcatagccctagatgctgcggtccgcgcgctcttatcgaaaaaagccaacactgaccgtcggcatgctgcctgcaggtgcagtacattgcgcagcacctgtcctcgctgctgctgctgcctgaggtgcggcaggcgctgaccaagctgccgccagtgctgctggtgcagctgctgtccagcgaggccctggaggttgaccaggtgggtgcaatggtttgaccaggttgcaagccgctgcatgcaagtcgctgcatgtattgccagagacactgcctgattttgtgcaccgcatggcggcgggcgcaattggtctgagaggagcaaagtgaatgcaagtgctgctgcattcgttgtcccccctcccctcaatgagattgatgccgttgggttctagggtaccgtgccaagcagcttcgagtgcgctcatactgctgcatttgtcaccccctccttcagcaatacacatgccaacaagcatcctctgcattttgtatctgtttgcttgcaggaggctgagctagtatgccttgtgtcagactgggtagcagcagcaccacaggaccgcctgccgctgctgcaccagctgctgccgctgctgcagctctcactgctgcctgaggaggctccgctgtcgcagcagcagctgtgcgcttgcacgactcctgcggctgcgcaactcgcgaggcagctgcatcaggctgcagtacagtgccagcagcagcagggtgtgcagcagcagcagcagcggcagcagcagcagcagcaaggggtcaaccgcgaggacagcaggatcctgcaagtcctgcaacagcagcagcgacagactgcgagctcagcagctagcagtagcgcctccgctgctgctgctagtgctgcatgtggcttgcaggacagcagtctgcaccctgctgctagtgtggacttcaacaaccaggcaagcagcagcagcagcagcagcaatagtgcggccctattggcaatggagccaaccacaccaacctggatagactgcgttggcggcagcagcagcagcagcagaggcattggtgctgttgtgtcagaggcgtggccaggcagacagcgcggctaccagcccacacggctgttagttgctggcggtcacgatctgtcgtggcgaggcttgaaggcagtagagctgtacgacccgcgcagtgatagttggagcccaggacccacactgccagcagcactgccatttgcaggtaggatgggttgaactctcacatgcgttgtgtttgggatgctggttcgttgtgaaggtccgggccgcctgaatcaggtgtattgtgtctgcatggtcgattgcagacgggagggtgacttgcttgtgtgtggccttgtgtggggctttgattttcgcttgtctgttagtgtcactctgaaggcagttcagctgtgcagccagcgcagcgacagatggagcccaggacccactctgccagcagcattgacatttgcaggtaggatgggttctgtgcttacttgcttttgtttgcgatgctggtctggtggtcaagattcaagcgtatgatgtgtgttgcatggtcggttgcggacgagagacgcattgctggtgtgtgtcgccgtgtgtgggactttgttctttggatttttggtgcgtgtccatttgaaggcggttgagctgtatgacccgcgcagtgacagctggagcccgggacccactctgccagctgcgttgccatttgcaggtaggttgagttttatgcttacctgcttgagtatgagatgctgggatgcggacaaggtttcaggcgtatgatgtctgctgcatggccggtttcagacagagggggtgcgacttgcctatgtgtgttgctttgtgtggggcgttgtttcttgcttgtctgtttagtgtcgctctgaggcagtagagctgtaagacccatgcagtgacagctggatcccgggacccactctgccagcagcactgccgttcgcaggtgggacatgctctcaactaactcagttcgtttgcagaggagcagagagcctatagggagagctctctgttgtgtcaacaatttggttgtagaggagcagacaggcgtatcggatcctgcattgttgccactagtgtcgtattcgcctgcaggcgctgggctgctgcgacgcagtgaaacctgtgttgtgggttgcggcatgcacgttgcccaatggcatgtgcgcatcgtcatcaaaacgaagctgttgcttcctttcattcatttgcaagcgctgggctgttgtggcgtggcgagctgtacgttgtgggtatcggcatgtacagcgacaaatcttggcatatatgccacaacaccctctgacttgcaatcatacattgttttcatcggcttgcaggcgctgggctgctggggcgtggtcagcttcattgtgcgactggcggctggctcagctgattgctgtcacaggtgcagcagcatcaaccatctggcatgctgatgtatgtgtgtgtgtctgcaggcgctgggctgctgggtcgtggcgagctgtacgttgtgggtggcggcatgtacagcagcctgctggtcaagctggacgcagctggcggctgctggcacagctgcgaggggccacgcacgccgcggctgcacgctgctgttgcaggagcatcaggtgatgaccgtcggtacagctgcaacttgtcttatgctgtgtagctgcgatgagcacaatgtgtgactgttagtattgttcaggtgctttgtcaggtaagtgcctggacgttgaatttgcatgacagcttggttacagggtgaagatgcctccttgctgtctgggttcaggcgctttatggggcagctgcctgatccttgctgagttgcttggcttgctgggttgcaggcagcgtgcagcagattgtttgctcgcattgagcactggttgctgatccattgctgcttctgatgttgcatgcgcagggctattgtatgttgctggaggccgcagccaggtcaaccaagtcgtggcaacagcagaggtgagaggtgtcatctgcctgcacatgccgtactcttgcatgttgtccctgcagcagctgaagctggtctgctctgatagcctccttgcagcaacagcacacgcgtcgctgtacatcaccagtggacgtgtcagcgatgcgatgctgtgcaatgtcactgtgctgctgccgtacccgggtgctgcttgctcatgtgtgtggcaactgaacgaaccctcatcccgttgcgagcagctgctgcaaatacaagtaacacaccctgcagtcacaatcctcacgaacaacaacagtgtatgtactgcatttactgacagaactcgcctcattttctttggcgtcacgtcatttgccgccaggtgtacgacccctcagcctgctgctggcagtcgctgccagacatgcgacaacctcgctacgcgcatgcagtcgcgtcacttgctggacgagtttacgcgctgggaggccaagccagcaaggccatccacaggtggggcactgcgtcaggcattgttgtgttgtgcgagcttactttacatcctttcgcctcattgtcgttatggcgttgctggctggacgcgtctaggcgctgagaggccaagccagcaaggccatccattggttgggcgctgcgtcaggcattgccgtgttgtgtgcgtgctgtctttgcctccttgttgcctcgttaataagtgataatcacatgata

SEQ ID NO: 141 - DNA, 20648 bp, Tetradesmus sp.
  source 1..20648: mol_type = other DNA
tttatattcaagctgcccctcacttgctgctgcacagattcccatccaggatactgccacatcactgacagctgtgctaatgctgcaaccacccgactgccgccaccgctgcggatgctgctgctgctactgctgcggtctcacctgcccaaacagcgtgtgcttctcatccaagctgtccagtgcatctcccagcgtgatgtagaactgcgaggcattgagccctggcccagcactggccatacccactgcgccgcgcttggcatgtttgcgctttggggtgatttcatcatcaaagaagcgagcctgggagccatacatcagcctgcgatgtcatcaacagcaacattgagctataagtgcaagtaaaacagagatacacagggtccatgttaaaatgtcagtggctgcgacatggcgccccagtgtgagctacttgacacatgtgccagcagcagctgcagcataagagcaggagggcaagcagatgtgtatcacaggcagcagctgctgacacacagcgcctgctttgccgccaaaactccaggtatactccttgtgctcccgttgcatctgctgttcctgctgctgccaatcacgcactgcaggcggcagtatgccgctgcctgcaatgctgctgtttgctgctgcagctgctcacccgtagactgactctccccccttgccagtgcctgtggggtcgcccgtctgcgcaatgaagttgcgctgcacattgtggaatatgcagcagcagtagtacttgaccctgcaggacagcagtgcattgcaacaggtgaggtgcacagcggatgtgctagcaggatgacaaggatatcctggttttgaactgccatatgattgcaagcagtacacacaaaaaggtgcaataacaggcaacaacggataactactgctgctgggtgaagaggtttattgcagagaaggctggtgaagctgggactggtgtgcacgagctgctctgtttgcagaggatgtgggcggtgtgctgcggcctcacttgcatagcttcaagaagtttttgcaggtgctaggcgcttcatccacgtatagatctatcactatgtcgcctttgcttgtctccaacagcactgccatggctgcatcagctgctactgctgctgtattgcagttggtctgctgcggtgtgtgatgcagtgctgaaagcctgaccagcagtacgtgacggatatccacagcctcgaaaactgacggcgggctttcaaccaagcagcaggcaaagaacccttctttgtacctgctgtcagtgttatgttgacgtgacggcacgctctggggcattgaacaagcgcgatcgtggacacaccttagtacttttgctttgcttgcgggctaagagggcagggcggctcgaagcgcaataatttcaagccaacatcgtcgtattcctgcctcttggcactcgctccagactggtcaagatgagcctcttttaccacgcacaagcagtgatcatacggctgcttacatggctgtatgacctgctgcagcttggcgcagtttttgatgctctgctcaaagtagtcatgcgggtcacagagctagacgtagtgccggatttcattattagaaggggtatccggctgctgctgaagatcaggctgctgtctgtgagtgctagtgactgtgtgctggcagttggtagaactggcgggtggcagcagtgaatgtgtggtgacaggctgtgcaatcttccacttcacctgtgcaatcttccaagcaatatgctggcatgatctaacactgttacagcaataggtagggctttatcctaatgccttgcaagaacgccacacatcggtgcatcaccgttcctccctagatctggctccagcctgacatgcatatcacctgcttacacctcatcatctgctgccgtcatcatccttctgctggtgtgcagatgggtggcagcctagagcagcagctggagcgcaagttgacgtttgtgcaggagctcaagtgcctgccagtggcggtgcagacagcagcagcaaacgagcagcactacgaggttggtcctgctagtcctgcagcacacttgcagcagtagagaggacacgcagcagccacagcactggcatcgcagctggaaggtgttgcctggctgctcagaacatgctgaatgtagcttctactttctgaaataaagcgattgtgcgtacatcagcacgtgccatgcaaaggtagtcgtttgtgtgggaatggccacactagtaccttcagcattatgaagcagctgatgccagggttcacctgctgttggtgttgcgcccctgcaggtaccaacaaaatacttggcgctggtgcagctagcttgtgccctgcatatcacctggcaatgtgtgccactcgtcctgcgggtgccccttaggttttgctgatgctggggcttcaccttgcatttgcgttgcacctgtgaccagtgctaactgcttcctgctgtgccatgctgccactgcaggtaccgactgagtactttgtgctagtcctgggccgccacctcaagtacagctgctgcctgtacaacaacgctggcgagggtctcaatgaggcagagaggaacatgctgggtgggttaagagtcagtggttttggcatgcgttgagcctgagtgctgatgttgtgttgccgcagcttgcacggcacaagttgaagctgccgcagcattggtcgcagtgcacgttgtgtgaatttggtgtttgcttacaatgttccttgcaggtttaccaaattgcagctgtgcattgtgtagcatgactgccagcgtgcagagtctcccagtgcactcttctcacctctgctgccacgtgtgtttcctgcgtgccctgcgtttaccatcacctgcagcgctgtactgcgcacgtgccaagctagctgatggccaatcggtgcttgagctaggctgcggttggggcagcatgagcctgtttatggcacaagccttccccaacagcagcatcacagcagtcagcaacagcgcaacgcagcgcgagttcatccagcggcgtgcacgggacctggatgtgacaaacctgacggttataacagcagacatagtagactttcaggtagggtagtttgaagatatcgcgataagcattacttggcgttggtatcctcttctggcagcgcggctgaagtttgttttttgtgtgatgggcaattgacatggtactatgtcggtggatgcgcgtctgcagttcgtagtccagggtacaaacgcagtctgcataactggcaaagtgcacgacacgtgacttgactgccacctgcatgcactgttggcacccgccatattccgtgcacttctgctggcacataggcttcctgcagacgtgtgcacaccatgtactgcatgccgtcacaaactcaacaccaaccgcaagtatgtgctgctgtgtgcttgcaggcgcccggcacgtatgatcgcatcgtgtcgattgagatgtttgagcacatgaagaactacgcagtgagtgtgaagacagcctgaggctgtgtagcagcggcttttagcaagcagacacaggcagcagcgagtactgcaaggcaccgccaagaacgacaattgggagcttgtatcctcagtatgccatctgaggaagagtagatgcggcagctgctgtttaccccccacatgtcgaatggtggcatgagtggctgtgctgctggctgctcaacccagcccacttgtgggacagagtggcgctgtccagcgtgaatgaccaacagccatctgtggccctgttccctgttcacgaaaactgctggctgctgctgctgttgctgctgcaggagctgctgcgtcgcatcagcacctggctgaagcctggaggggcgctgtttgtgcacatcttctgtcacaagagcagcccataccacttcgaggtatgcacagctgcagctgccaacaccacctgctgcctccccgtttccttagcgactggcctcaggctgtggacacctcaggcttgtgtcaagaacctatagactggtgtcagtgctataggcaccataggtggcaagccattgtgcatcatgcacctgtctgcacccctgccgcctgcctcttgccatgatgcggcatgtgtgggagtgagtcgcgcttgatgtcttgctccctttgcagatcaactgccctgagggtgcaatgcccagccaggaccagctgctgctgcttccactggtgcatcctgtacacttctgcttgctgctgttggcctgcacaggtcaaggatgagtcggaccggatggctcgctacttcttcagtggaggcaccatgcccagcctggacctgctgctgctgctgctgcttacgctgatgcttcctgtacactgctgctctgtcctgttggcctgcacaggtcaaggatgagtcggactggatggcccgctacttcttcagcgggggcaccatgcccagcctggacctgctgctgctgctgcttacactgatgcttcctgtacactactgctcgctaccgttggcctgcacaggtcaaggatgagtcagactggatggctcgctacttcttcagccagaggcaccatgcccagcctcacttctcaagttgcggcagcatgcccagccagctgtaccatgcaattcattctgcaccactgcctgctgcctgctgcctttgcatcgtttatgtcatgcatatgttatttatttactaggtcaaggatgagtcggactggatggctcgctacttcttcagcggcggtaccatgcccagcctcgctctcaagttgcgacagcatgcctagccagctttaccatgaatcgttgcgcattactactacttcagtactcctgctgcctgctgtggtttgcaatcaataggtcaaggatgagtcagactggatggcccgctacttcttcagtggcggcaccatgcccagcctggacctgctgctgtacttccagcagcacctgacgctgcagcagcagtggtgggtcaacgggcagcactacagcaagacgtgcgaggcatggctggtcaaccaggacaagttcaggaaggccatcctacccatctttgcacaggtggggggggaaggggttcaagatgcaaccagtttggtatcatgcctttgtctactgtgtatgcttgcacactgcgtatcgctgtattcaagcatgcaagtggcgttggccgctggatggcaatcttgaagtgtggctcttgacccgcattgcagcaggggcgcatgggctcatgcagtacagtgcttgctcgcagagcctgagagcttcctggtttgccttgccgtttcccaaggctctgctggaagtacttttggggcatcagctgaaacttgcagcactgcagagctgttgtagccgaactttgctagtgtagtacgtcaacctaccccccacaccttgaccatgctgctgtgctgctgctgctgccgctgctgctgccgctgctgctgccgctgctgctgccgctgctgctgccgctgctgctgccgctgctgctgccgctgctgccgccgctgctgctgccgctgctgctgcagacgtacgggcgcgagtctgcgctgaagtggtttgtgtactggcggctgttctacctggcctgcagcgagctgttcaacttcaatgggggagaggagtggggcgtggggcactacctgtttgtgaagtcagcagcagccaacaagattgtgtgaccagtcgcagtacggctaggcaccgcgtttgctagcagttgctggtgcgctgtctgcgtgagacagaccatgcctcgtgacgttcaacagcaagttgttgctgttgttgccagcatgtattgtgcctgctgagctctcagaggccaaattacaccagcagtgtggtggtctgtgcatgctcactggcaggggtattcttggtacagagaggaggtgtggcttacaaggattgattattagagaggaggtgtgtgggaagcggcggggcaggttgtatgcagatgtgatgcgaacgttgccagatgcagcgccacagatgaaaggaagcgggaaggaaactggatggaagcgggaaccgtgtcagatagcatggcgagctgtgcaggcgagcagtgcagctccagcaactgcttgctgtgcctgcagtccctgcccctgctggtcatggacacacgccgacgacgcccggtgcatacataggcactctagtgctttactttgcgttgtttgcgcgtggttatgcgtcttcagcactgccgctgagccgggtgacatgccagtgttgctgatgtatccgccaaaactttttcgtggctggctgcagagcagtatatagtcgctgtgtgctcaaatctcaaccagaacaagcaacaagcaatcttcaccatcttgcaatacttctttcgcttcccggttatcagcaaaaacaagatgatgaaggtttcgcgcgtccagtgctccgtggcccagcaggcccatggctgcaccaagggcgcccacagcaaggccaaccacaagacggaccccataaagtccctcctcggcagccctgcctgggccctgctgaagtcccgcgcccgctacactcccgcgccgggccccgacttctccgtgtcactggagacggaggagcgtttcgtggtggctgtctgcaacatgctggtgtggtattccatcagggaagccaccagcaacatcatcagcgacaagtagttgtgcctccaggtaaggaaggcaagcctcacagcagcacttgcacagcctgtgtgatgtactgctagcatacagcacagccaatgcatggctcatgttccctacaaaatcattcacaccttcagcaagcttacgccttatctgcgctgcttctgcctctgcaggctcgcaagcggcaccgcaagcccagtgttgcggacttgattgcagcctggggacactgctacgtagatggtgtgtacacaacggccaccaccaccaccaccaccatggctctgacagccgcctctgcacctgccaccagcaccgtaccagccaccaccaccagcagcagcggcagcctggctgacgagccagcatcaacgacctgcactgctgctgacagcaagtccagcacagcagcactgctggcagcaccagctgcagctgctgtcagctcgccagtcttcatttacgttgagactggctgcggcagcagcagcagcagcctgctgagcaggcgcagcagtgttgacagcacagcagacacgcactgcgacccctgcatgcagcagcagcatgagatggctgatgcaatagcagcagaggaccacacatcgcacaacaacacacttgcagcagcaccattggcagcaggtgtgaaagccaaactgccactgcagcagcagcagctggatgtatgtgacacagctgcagcagaggctggcatggcagacaacatgcagcagcactcacagctgctgcagtgcctgccgattgctgaatcagcagcagcaacaacagtggctgcagcggtggctggtacggaggctgtcaaacagcctggctggctgtggcgagtatgcagcaggctgtttagttgtgtggctgacagccgcctgagctgggaggatggagtgttgacagttgaagtggctgtcagctgacgttgaacatggctggttggcgtttgttggcagttcttgttgttgttgatccttggttggttcggtgcagttcatggcattgtttgttgtggtcgtcgcatgcatccatatgcatcggggttgcatcatcccagcattgtagtactatcaatgtcaatagggtgaaatgcatcacttcaaggatgtgatgatgagatgccaccacgtgtacgtcactgtgacatgtcaccactgccaagatatgggtgtcatgtagctctggtgtgggtgttgtgtgtgagagaggaggtgagaggggtctgaagcagctggggacactttcttgcggtgatgcagcctggcaaaaaaagttttcatgtacccctctcacccctggcatacccacaacttgtccaaattctctgcttcactccaaatccaacgcacagctgatgggtgttgtctacaacgagcatggtctggcagcaacagtctggggagaggtagagcaggtggcctgggccaggtggcaggtggcctgggccaggtggcaggtggcaggtggccaaggcaaggtggcaagtggctaaagctaggtggcaggtggcctagacgaggtcgcctgccaaccactcgcctgacctggcatacccacaacttgtccaaaatctctgcttccctccaaatccaacgcacagctgatgggtgctgtctataatcaacaatgcttgattccagtgtaaaccctgaaacacaagagctgcgctgccgccaccatgcacagctcaacctcagacatgcatgctgctcagcacagccctactagtagtcagtgttaccacccccgcgtgcgatgcaaactgccttcctggcggcaatgctgttcatcaggttttggcacatggacagcggcatggaggcccaaatggcctgcgctgcttcccacattgcctccaggctagcatactgttgtgcatacaactgctgcttgagccaagcccatgcattctcaatggggttcaggtctggagagtatggcggccagtctgcaatgatgtatatggctttgaggctcatgaatgctgcagtgctcttagccctgtgcggactagcaccatcaagcaagtacacccactcatgcacacccgctgcactgaaaatcacctcagcatcaggctgcaactcctcccacagcacatcctggaactcctctgcacccacacctgtgtgctgcacaaacgccttcagcttcttgttgtaactgaagtatttcttggggtgcccagtgctgccagtgacgcggatgagacgggtgacgccatacttggttacaccaccatacacatgcaactgcttgcccttaataggcttgcaggcaactggcttggtgcccttcttgacccacttcttgcaccggcgcggggtggagctcagagtgaggatgatgctgtcgatggcaatgatgcggtcactgtcatgctgctgctggcagaatgcaacgcgtctcttcttagttgcgctggtcaagatgggctgctgctgcactggcgccaagtccaacgcattcttggctgccctgagcacggttttagtgcagatgctgctagctatggtgccttgctgcttgagtgctgctgatgcttttgctgctgactgatgctccagtactgttgttgctactgcttccacctggactgcattgagcgccttagggcggcctgaacgtggtaaagcagacacggatcctcgctcgttgtacttgtttagctgtgcctgcacgtatcgagtgggatgaccgagagctcgtgctgctgctgccacgttccacttcttggctttgaggtccgccagagtagtctggcgtttgatttcaagttcagcagcagtgcgtctcttagccattttgtcaatgtgcaacttctgagctagcttgctgctgtgtcaatcgacccagaagaacaacagcagcagcagctgaacaggcagtgtcacaaataaactaacctttgtcacgcatttgcgccaaacagcgaggtttaacatcatcatcatcatgttacccattaagccatagcatcaacgccatcgaggtttaacataaagaatacatcataacaagcacgttaacatagccggtgcgagctgtagtcaccgcttcacgatgtaccggcctcacattgtcccctggtgacaggtgctgcaggcagccaggctgaaacctgcattggagtcacccagagggcattgcctataaaatcaaaatgctgtatacctgagcacgtgacttgcaattataagactatgccatggagaagaagatgcatgcagcggctgtggagtttgtgactgaggtcaggcggcggctggggctgcctgatgcaggtgccaagctgacggagtcctatgccaagcgcaaccagcagcagatgccgttgtttctggcctggctgcagcgtcgcgtggaggcgttgggtggaaagggtgtccggctttgccctgtcttcagcgtgcggcgccagcatgtgcagctcgactgcaccacgctgctgcacatgctgagcggcatgcgcctggtgccagagcacctgatggtaaagcagagggcgaggcaacggactgggagggcgtgctggatctggtagccggcgtgtttgagccgccctgccctactaagcagaaggggaagctgcagtggtggggctccttgtcaacagatggcgtcgcagccagctttgtgtacgcagacacaaggccagtctcaaagaagggcaccaaaactgcaacagcagcagcagtcaccagcagcagcagaagcaaagggaccacgggcgctaccaccccagcactgcctcctccccacgacttggctgttgtgggcatcaaccctggcaggtgcacgatcgtgcacgccgcgacccaggtgcagggcacccgcacgctggagtggacgctgccccgcaagcgctaccacctaaagtccgggctggcacaggcgaggccaaggagcggcgttgggacacagccatgattggtggcgcctggaaacagatgaaccagcagggcggagcactgcgcagcagctctcttcagcagctgacccagcacattgcggcgtacgacagcgtggctgaggagtggtggacatccgccatgcagcgcaagcgggccaagctccgcttccgcacttatggcggccgcaagcgctgcttgggccgcttcttctcaggcttggagcgggacgtgtcggcagccgagcccaacaagcgcctggccattgcctatggtgccgccacgttcagcccctccggtactggcaagcccgccacgcccacaactgctgcttatagagcggcgttgcgcctgcggagctctggtgcaattgtggagaagcagaacgagtgccgcacctcaaagcagtgttgtcactgtcatggagatgtggaggcttgctggcagagcgtacggctgcagttgggaccagcaccagacacggacgttgctggtgctggcccctgcccatcacagctcagtgccagaattcaggtggagacatgtcacggacccacggtgccaaaggctggcgcctgcctgagggggttgctcttctgcccagagtgcagcaagttcctcaaccgtgaaaggtcagcagcgctcaacattcgcttcttgtttacacaaacacagctgctgggttgctctatgcccacacagtttgtggctcgtcgcaagcaaaagaagcagaagaagcgcaaccaggccagcagaaacaagctggtatacagagggccatgtccacttttgatccggccatgctgtagatgtgtgtgtaataataataatcattctgataagccctacctttcggcatcggcaccgcgcctcaccctctggggaggcggaaattgaacgactattattctctctactggtgtaagatgtggtgtagatgtgtgtgtgtgtgagaccacggccagagagaatgcattctctgcagctgccatcctatctgtcatcacagcacatgcactaaaagcatcctgacaccgctgctggcaatgatgatcatggctggccttccatctgactgtctacctgacatgcatacctaggtctctctcgctctcgtgctcacctgtccgatcatgatccgcatctcctgcggtgggtatgctgctgctgcagcactgctgccaggctgcacagggattgctgctgctgcagcgctgctgccaggctgtgcagggattgctaccactgcagcactgctaccaggctgtgcagggggtgctgctgctgcagtgctgctactgttgcgttgccgcttgggtgtgcgctcggcgtcggtgccctgcaggcaggtcacaagggggcatggcccggatgttgtttgacaatgtattcatcccatatgatgcaggtcactggcgcagttgcaggtgtctgtaaaggagctggcattcgcacactgctagcagcaaacgctgcaagtgacatgacaatcacacatgagccagttctacagctgccgctactgccccctgcagccaatgttgccttgtcacctacgtcatctaccttgcgcttgtgggcagccttgcgcctgatcttgttggtagccccgagcatggcatcaccctggacagagcagcagcacactatgagtacagcaacaggtaagaatgcaccacgtgacctggtgatgtgccagcacagtcagtaaagctgctctgcatatacatcccaagacacaaacacaggatgcaggtcactggcacggatgcaggtgctccagtacgtgtgctgtttgacaatggtgcagacactactgctttctgtcaaagacctggcatttgcacgctgccagagtttgctgaactcagttgcaaaataccatgaccggcaattgccattcctctctacttctgccgctgctctgtcgcacctgcagctggagctcgcgtgctagaccagtatttagcagctccctggccttgtcatcagccccaacgccagccagccacgcctcactggccaggtctgcagcagcagcgcagctacagaacatggcatagcggctgctacacagcaccacgctacaggcttggaagccgggctgttcgcacagcaggttacacagctgctgcgactccactggcaccctttgcagcggtttgtgcgtgcgcttgctgtagaacttcagcgagtcaggcaggggggcattgctgacatccagctgtgcgcgccgctgaaggccggagctatcgcgctcggcggcctcaatgctgcggatggtggcgttgaagaggccctgggtcaagtgagggtctgggccatcctggtacagcgcttgagggcattcaaggacaatgttgctgcctgcaccaagctggttgagtgccgtgcagctgctgcactcccagtcatcgtcagggatgcaggcaatccccaagcatgccatgtgaagtccttggaagcatccctggaggcagcagaactgcagtgacaagccagccatcacatgggagatcttccagagcaaactgaataatgataagaagagggccaggaatatctggaccaaatgccgcaacaagaaaactggcgcgtattattcagcatcctagacatgccaagtggcgcagcacggcgatggctggagctgtccagcacgccggtgatagcaaaggcgatagaagggcgatccatggcttctagcgaagataagggtgttatcagttatacagatgtgtttgcaaaagataaaacagccaaatcaagaagaaaacgacgtcaaggtgcccgtgttcacgtaacgtgtcattttgcagtgtaaacgggcttgttatttgaatcatacatgtgggtgggtttcctaccacatccaagtaacgaattcgtgtaacagtgtaaacaggccctaagggttgaatgcacgcacagaacctcttcagtgttccgtggcgccctgtcctgcacggcttacgatgttaggagcaacggttatgacccggttaccgcctcaattccaactcctgcactgcagcgcagtgccacactgtgaccttaggcagcctagcggccagcccgacacgaccaaaccaaagcaatcagcatgagcgcctgcatatgacacgcagcgacagcagatcatcaccatgctgatgcagaacctgctgctttcgtgcaatcacatcgccagcgcacagtacagcttagcagctgcctcaagcagcactcacgccctcctgcaagcctctagccaagcactgctgcatcacccatccatgtaaggcacatctgagcaatacttgtctgcttcatccagcgtcgctgtcatcctctgctgcctcagacatctgcaggcgccgcgcgccacacaaatctaaactgtccaaaaactgctgcgttgatgctatggcttaatgggtaacatgatgatgatgatggggcattcatcttgcaacctgacacatcctgtaacatagttggtgcacggctgctaggtaatgctgaaagtactcgactgttttagacactgcaggcaggcggctgcttagcagacaagggcagtaagcggcttgctgtcacaagggctactgccactcaaccaccttgtagtcatcagggccttctggaagcacaatccactgccacttgtcaaaggccctctcaagctgcgactgcatgatgatgatgttggagggatcatggagtgtgatgccaaccttggtctgcaagaagcagaggcagggcagtcacatatgatcacacaggtgaatgatgccaaaaacaaagccacctgcatggaatgcataatgctcctcaaacccggctccagtgtcaactgacaattgccacaatgctcagtcaacaagcgtttaagccttgcttgaacgccactgcgttgacccgtgtttgttggcaggaagttactcaccagccagctcttgggccactgctgcctgtaaatgtgccctgccaccaactcccccacactgcactccatgcctgtaaccatgcatgtgtatgctgcgtcggagctggagccatagtaaaacactaaggccctgtcacggtagcgtttaagctccttgctgctggcaatagacgacgttgggtgaaataggtccaaaataagcccttggtagttctgctgctgctcagttagcagctgctgctgcccagtttgcagctgctgctgcccagtttgcagctgctgctgctcagtttgcagctgttgctgctgctccttgaggagctccaactgcttgaggacctccgaaagcccaactgcatcacctgcatgatgcatcaaagacacatctgcaaggagtaagtgtctctaaatgcatgtggggtgtagagcaaagctgcgccagaaacacttttcaagtacggctgcttggaaaggcttgatcgcaacagatcacgcaaggcagcacacaaacagggtcaggcatggccgacgctcgctgtcggccccatcggaggcttcctgtggatgtcaacaagtgtgacgaccagcaagagtgagggtttcgcagcgcgcgggcgattgcagcccatggttgtgatgtgctaaattaggggcatcgttcgttcaggggcctgcgcccggatggtggcccctgccgggagaacaggcagcagcagacccttccaatggctttttctcgcaaacggccgaacttcacccttaatggacattgacccaaaacgatgctcatcgcataatctatcatctcagcgagcgtcgacggcatcggagggcgcctgtggatgtcacgctgctgttgtcacacgtcagcaacacgtgtgaacaccagcaagagtgagggtggttggacaggcatagaaacagtatgtctttcgatccaatgtcaatatgtcatcgaaatcgttggcatggacctcacccctgccagcgctctgcaacaaaacgatgatcgaaaccggcagagacgagcagcctcagaagcggccttatcgcctctgcctgttgctgaagaacatggacgaaacgcgtctgcagcagcaggaggtcttagcttgcagcagcgcttctgcaaggaggccagatgtcagtgctgcaggcacaacagatccatgcagggcagcgacagcgcagggctacatcaaacaccctgactgagtgccaaagtccattgccgtggcatcatgccacgggttccacactagtggtgtatattgtacttttcaaatcattagcagcaaccagtagaccctctactagagttacaataagcactatctggcgcacaccaagtgaaatgcgactgcactgcgacagccaagatcccagaacgtcaacaacggtgttgtatacattaaacacaagctactgctgcctttgtgaacgcagaatgctcataaacatcaaccttcgcccagcaaatgtagtgcatgcagcattccggactggcagatggtggcacatgcgatgtgcctgacaaccgggactcctgttgcatggggttgcacggctgctccacacacagcgcaagcaatgctggtttggcaggcttgccacgagcaccagtgtaagcacatgcacaactcacctgctgctgctgtggggacgagagaagaagccaggtaggaagccgtgacgagaacatgcgaggacacgcgggcagggcttcgttcagcgaaaggtcaaacaaggactatcgcagtatgaaagcacagtggcacgcagcacacatgagcacacagaatggtgatgatgacagaatggtgtcgcagggactgcctggtattgtgaaagtgttcaaacatgcgcacgacactgctttacaagcacattgtaaactatgctttagcagagtgctgcttggtgggcacgcacaacatgtgataacccagcttgcataatcaaaagattcataaactactctgtgctctgatgatgatgataaactactctgtgctgctgcggcagttcagactgcagaaacccttttcatgggaccagcaagtagtcctgcagaagaagggtttgcagcaactgctggcatgcgccacaggcggcaacttcatgctaacatgccaccgatgcatgccactccaacgctcacctggtgctggcacgggccaccaaggaatggcagatgatggtagctaccatgcgccaggtggtgctgcatgcggtgatggtaatcagcaggactgctggggcatgggttttggcggctgctccacacacagtggcaggccatgcatgtttggccgccctgcaagcacatgcatgactcacctgctgctgctgtggggacgagacagaagccaggtggggtgccatgaagagaacatgcaagggacacacgggcagggtgatattcagcaaaaggttaacaaagaagcttgcaaagtgaaagcacaggggcatgcattacacatgagcacgcaggattctgttgcaggggctgcatggtactgtggaagtgttcaagcatgcctcatgacacggctttacaagcacatcataaattacgccctagcaaagggctgcttggtgggcacgtgcagcatgtgataacccagcttgcatattcaatagattcatagactaatccatgctgctgtggcagctcaagctgctgaaaccccttccatgggaccagcaaatattcttgcagaagggtttgcagcaactgctggcatgcaccacaggcggccgctgcatgctaacatgccaccaatgcatgcgactccaacgctcacctggtgctgttgtggtgaagcaggggccgccaaggaatggcagatgatggcgcatgcacgggagcagggcaaggcagcatgtgcagcacaggtcaaacatcagtggccaatgcaatcagcattatgcatgcagcattcagcaatgcaggatggtaatgtggcatttgggagtgcagaggtgggtgatacgggcttgcagcacaagaccatgcatgaatcgcctgctgctggtgtgggatgatggattcaagggtgcttgacaagcgaacctacacattcacccacctgttggctgctgcagcttgtgtgacaagctgcagcagccatgaggcggtcgccgccgctgctggtaatgctgagcatgcagcaaaccaaccatcaccaaccaccggattgcacagcacacctggaacatcatacaacttgtaggtgcctgcctccaagacgtcgccatcagccaacaccactccatctttggttttcagctggcccaccacgagcagttgctggagtaccacttctgcacgttttggagcatagaaacgagcgatctctgtgttgtcagccgctttatgtactaggatgagctcacttggcgaggccattggaattcctgcataacagacagccaattgacagccatcaagcaaaaaaagaacaagcaagcttgcgaccatgtgcacagtcgactatgctgcacggcgatacaagtcaaatactgagacagcggcagatgcacactgctcacggcagcattccatgacacaaaacccactgccacctagcaggttgcgacaggctgctggacgaagccacctccaagccttactgatatgcaggtgcgcctgcagggccacctagctgcctgcagctagtgcgaagcctgcttgctgctggcttgttcccaactgcatgtagcacctgctatgctggtcgttgcatgtaaggccttgacaagtgatcaaaaggacgatttgactgtatctctgcgcagaaagggttgaaaaagccagcgccaaaggcaacgagtggaaggcaggcttgaaggccgtttcagtcgtgctaatggctgtgcaaagcttatgcgtctcagtaaagctgcagcatcaacgtaggctcactaaacgacaagcaaaacataggttcacagcatagcagttgctcaacacactgcgttacttgctctcagagcagtgctccatttcaactccttgaaccatgcatgttgttgctgcacatgggagaacacaagattgcagtgcatacagtgcatgcaatgttgttgaagaatacaggatgtctcaaaagttttgaaaacggaatgagagctgtgccactagatgatgatagaggggttacacggtgtgttcatgcggcatacgccaccacagacatctggtaaaataggaagctgcaagcagctcagctcgggctgtcactctgaggtcttaagaggttaagacataaccccagaaaaacctctgtgcgtagggtatgacattggttatgctagcataaccgtcttccttacgacacgtaatttggctgcactctgagaatcttcgggcatgaatgcagtattctaatcagtgttggtgacagcagtctatacatcttccagtgtagagggcaggctgaacatgcttcgctgactcagcaaaatgctgtgccacgtagtagagagtgaccgttaatcgatgctgcccacatacgagatacatgtgctgagcagcatctgatcatgtgctgttttggctaagtgggaacgtgccagcgtggtgtccgggaggtcgctgattcaagtcggggtgtggtcaaatacagttccgctcgcgcgtgtgaatagccttagccttagccgcatgacgcatgacgccaaaaagcacttgattgggctctgttcttgttttgcaggggtgctgctgtgctgccagggctgtattgtggtccgtgcatgccctggcatgccttcctggtgcctgctggtcaacagatgctgcctgtatcacagcagtgccttctgaagctgttcatgtgtgctgctgtggtctggtctggcatgcaaagctacaggtgtgggccttggtgtcatcttcctcccacactggcaaaggcaaatttattttcacctgcggggatcgggtcctacaggtgcctaaacgttagacattaatgttcttataatacatatcggtgctgtacccccatcgctgcgacgtaacctagcccagactgcctcacatactcgccactcaacaaccgcggaacgcctctgccactgcttagacaaaccccagctgccgataaatcaacaaaatggacgttttaagcggcttagatgacgctattgaagatgtgttggcagcagcagagacagcttgcgatgaggaggacaggccggatgcgcaggctgtgcagaactacctgttcaagctctcacaagacaacctgccaaacaagggcaagaggggctgcatcgatcagttcggctgcagctgctttgtagtgccttgccccatccagcagcagcatgacatggcacgccaggggaacacctctgccaatgaccctgtctttgcatactgccaatgcaactcgccacaacccagcgcaacaggcgtctccactctgctgccaaatgcttgtgaaacccgctgtagcaggcgtctccactctgccaccaaatgcttatgcaaaccgtagcagcaggcgtctccactctgccaccaaatgctgatgcaagccgctgtagcaggcgtctccactctgccaccaaatgctatcaaaaaccactgaatctggctgtgcgcttgctgcgccacgcagctgcgcgtgtcaacccatgccgcggcatgcaaggccctggcgaatgcgttgacagggcttattgcccaacagcacgagtagtctgcggctgcagcaaaacgttttttcaacatactgcagctgcgctcatcgcttatgcgtattcagtcgtcacctgctggagcagctgcagctgcgcgcatgcactgcgccatcttttgcatcattgctgcaaagacacggctgtcgagagcataaagacggatgctgttgcgaagctctgactggctacgcagctggtggaacagcgcctggtgcctgtcgaataaatggacgatggtgcgcctatccagagcgaccgctgggttgatagcctgcacatcctcgagcaggctgcggtactccgcagtgaagtagtcagcgtccatgatgccctgcatcatcatcatcatcatgttacccattaagccatagca

SEQ ID NO: 142 - DNA, 15421 bp, Tetradesmus sp.
  source 1..15421: mol_type = other DNA
atgatgatgatgacgacgatgatgatgatgatgatgatgatgatgatgatgataatgatgatgatgatgatgatgatgatgatgatgatgatgggtgttgctgaaaagtgcacagattatgtccaaggacaatccaagagcatcttgatccttggctgcgctcgactatttcctcgcctgtccggccctctcgactgtttccaccatcagtgcacgttcgcagtagacgacacacacggtaaaacaaccagtctccggtgctgcagcgaaacaacccaccattctggccttccgcctcctaccatattgctctggcaacgaggcaagttcattcggatgcggataaacattcggagttgtgggagtgcgggcgtcggctggctgcttcagccattcggacagttttgtttgtcgtttgccccagcagccatgcaatgcactagcctctacagcagggcccagcattttgtggacagtccacctcatgcccttctacgccctgtttgtatacagtgtggtcccccaaggtcccgtgacgaccttggtcccactgccaggtggtttgttgtggaatacgttgttaacgtattgattaccacttccccgggctatggggacacagtccctcgtttagccagcggctgccgggcgctggggtggttgtccaccaatattgctgcaccgccattgccttaagtgatgatgcttgtccacattcgcatggcacagggtgtcatggtgcaatgcttgcctgccctagctggtagcgtgagactgttgcagcagcagcagcagcagcagcagactccaggcactgccattcctggcacgcacacatgtgcaatgttccacacgctcatggaatgcaagattcactcaactgtgcaacatgccagcttgtcatcaaggcatcagacgtgtctgcagtgcctgagctagcaactctgtgacagctatgctttgcaagcggcgcagcttcgctgcagcagcgacccatcaaccagtgttctcaccacaccacctgctgctgctgtactgctgcaacccagcctgcacaacagctgctccaccaccaaccggtgtaatttgctactgctggctatcattgcagtgctatggaaagccgagagggaactgtaggggagcctattgaacccaacacaagctgcacagcatgcggcagtcaggacagccctgaaaccatgctgatatgtgagggatgcttccaaggacttcacatggcatgcttggggattgcctgcatccctgacgatgactgggagtgcagcagctgcacggcactcaaccagcttggtgcaggcagcaacattgtcctcgaatgccctcaagcgctgtaccaggatggcccagaccctcacttgacccagggcctcttcaacaccaccatccgcagcattgaggccgccgagcgcgatagctccggccttcagcggcgcgcacagctggatgtcagcaatgccccactgcctgactcgctgaagttctacagcaagcgcacgcacaaaccactgcaaagggtgccagtggagtcgcagcagctgtgtaacctgcgcgcgtggtatttgccgtatgagaatagcaggtattgaacgtgcgctcacatggatcacacgccaccacgctaccactatgccattggaacggctagcacgaattgccctgacatgtgtattatcgatacaaaacaccgagctctttgaagtaacactgagactttgacgttgacaccgttttttccgtcatgccagtcgttctctgcgcagagttcatgttattgggtgggggaagctgctttttgcctctttgaggctttttgtggtttactctcgtgtaccgcgctctgcggtcctaaaagtgtctgcgggcacacctggtaacttacttcaatcaatcaatcagacggcaaaaacggtattgcgtttacttttgtgtcaacctttcccccaaaaccctaaaacacaagagctgcgctgccgccaccatgcacagctcaacctcggacatgcatgctgctcagcacagccctactagtagtcagtgttaccacccccgcgtgcgatgcaaaccgccttcctggtggcaatgctgttcatcaggttttggcacatggacagcggcatggaggcccaaatggcctgcgctgcttcccacattgcctccatgatgatgatgatgatgattgcctccaggctagcatactgctgtgcatacaactgctgcttgagccaagcccatgcattctcaatggggttcaggtctggcgagtatggcggccagtctgcaatgatgcgtatgtctttgaggctcatgaatgctgcagtgctcttagccctgtgcggactagcaccatcaagcaagtacacccactcatgcacacccgctgcactgaaaatcacctcagcatcaggctgcaactcctcccacagcacatcctggaactcctctgcacccacacctgtgtgctgcacaaccgccttcagcttcttgttgtaactgaagtatttcttggggtgcccagtgctgccagtgacgcggatgagacgggtgacgccatacttggttacaccaccatacacatgcaactgcttgcccttaataggcttgcaggcaactggcttggtgcccttcttgacccacttcttgcaccggcgcggggtggagctcagagtggggatgatgctgtcgatggcaatgatgcggtcactgtcatgctgctgctggcagaacgcaacgcgcctcttcttagttgcgctggtcaagatgggctgctgctgcactggcgccaagtccaacgcattcttggctgccctgagcacggttttagtgcagatgctgctagctatggtgccttgctgcttgagtgctgctgttgcttttgctgctgactgatgctccagtactgttgttgctactgcgtccacctggactgcattgagcgccttagggcggcctgaacgtggtaacgcagacacggatcctcgctcgttgtacttgtttagctgtgcctgcacgtatcgagtgggataaccgagagctcgtgctgctgctgccacgttccacttcttggctttgagggcagcaagagtagtctggcgtttgatttcaagttcagcagcagtgcgtctcttagccattttgtcaatgtgcaacttctgagctagcttgctgctgtgtcaagcgacccagaagaacagcagcagcagctgaacaggcagtgtcacaaataaactaacctttgtcacgcatttgcgccaaatagcgaggtttaacataaagaatacatcataacaagcacgttaacgtagccggtgcgagctgtagtaaccgcttcacgatgtactggcctcacattgtcccctggtgacaggtgctgcaggcagccaggctgaaacctgcattggagtcactctgagggcattgcctgtaaaatcaaaatgctgtatacctgagcacgtgacttgcaattataagactttctcgtcgattttcagcgattttagcagcacagagcttacatccaagccatgtacagctgcagtgaagttgacatactgaaccggctgctttggcctaatcaggcctgctgctgctgccacactgcaggcaggcaagaactgagcactggctggcaaaacccacacactaggtgccaacatactcgaagactggaggcagattctttcagcaagggggtgaaagtagactggaaccacattgcatcatttcagcaccaacacagtggccatagtgcaagccctcaatttcctgcaaactgcagcagcagcattttgtgactaaacagccaaatgaatggtaggcacctctctgaggcagacaggtcaggccacatgttgcattgatgccacaattgcagctgcaccttgtcacattcagaagtcagccatctccaatgtttggttcaaagaggtgtagatggggcatgactcaaacagcgacagtcgaatgcagcctgaggggggccatactcctaccaggcgacacaaagcacgacctgctgcagcgcctggagtcactggtcttggctgtctccaagctgatgcggcgcggcagcctgctggcgctgcttcactacacgcggctgctgggcgacggccaggacagggctgcagacgctatcacgctgtggacagacaccgggtagcgccaggtcatgacgatcgggctgccaaccttcagcatcaggaaattggaggaccctgagatgcgcgtcacatacgagatgtacaagcacctgttccctgccgatgatgaccctgacctgagccacatgccaacaggtacagccaaaacgctgacccatgcagccacccaactgcgcacagcattcacaaacaacctgtgggtgccgcttgtaccccgcctcaagcgactgtgccgtgcctggcggcggaaacgtaagcaggaacaagtggccaggagcgatgatccgagcatcttggacctggtgcgggcgattgagacaggggcagactatgccatggagaagaagatgcatgcagcggctgtggagtttgtgactgaggtcaggcggcggctggggctgcctgatgcaggtgccaagctgacggagtcctatgccaagcgcaaccagcagcagatgctgttgtttctggcctggctgcagcgtcgcgtggaggcgttgggtggaaagggtgtccggctttgccctgtcttcagcgtgcggcgccagcatgtgcagctcgactgcaccacgctgctgcacatgctgagcggcatgcgcctggtgccagagcacctgatggtaaagcagagggcgaggcaacggactgggagggcgtgctggatctggtagccggcgtgtttgagccgccctgccctgctaagcagaaggggaagctgcagtggtggggctccttgtcaacagatggcgtcgcagccagctttgtgtacacagacacaaggccagtctcaaagaagggcaccaaaactgcaacagcagcagcagtcaccagcagcagcagaagcaaagggaccacgagcgctaccaccccagcactgcctcctccccacgacttggctgttgtgggcatcgaccctggcaggtgcacgatcgtgcacgccgcgacccaggtgcagggcacccgcacgctggagtggacactgccccgcaagcgctaccgcctggagtccgggctgccacaggcgcaggccaaggagcggcgttgggacacggccatgattggtggcgcctggaaacagatgaaccagcagggcggagcactgcgcagcagctctcttcagcagctgacccagcacattgcggcgtacaacagcgtggctgaggagtggtggacatccgccatgcagtgcaagcgggccaagctccgcttccgcacttatggcggccgcaagcgctgctaggaccgcttcttctcaggcttggagcgggacgtgtcggcagccgagcccaacaagcgcctggccattgcctatggtgccgccacgctcagcccctccggtactggcaagcccgccacgaccacaactgctgcctatagagcggcactgcgcctgcagagctctggtgcaattgtggagaagcagaacgagtgccgcacctcaaagcagtgttgtcactgtcatggagatgtggaggcttgctggcagagcgtacggctgcagttgggaccagcaccagacacggacgctgctggtgctggcccctgcccatcacagctcagtgccagaattcaggtggagacctgtcacggacccacggtgccaaaggctggcgcctacctgagggggttgctcttctgcccagagtgcagcaagttcctcaaccgtgacaggtcaacagcgctcaacattcgcttcttgtttacacaagcacagctgctgggttgctctatgcccacacagtttgtggctcgtcgcaagcaaaagaagcagaagaagcgcaaccaggcctgctgaaacaagctggtatacaaagggccatgtccacttttgatccggccatgctgtagatgtgtgtgtgtgtgtgtgtgagaccacggccagagagaatgcattctctgcagctgccatcctatctgtcatcacagcacatgcacaaaaagcatcctgacaccgctgctggcaatgatgatcatggctggccttccatctgactgtctacctgacatgcatacctaggtctctctcgctctcgtgctcacctgtccgatcatgatccgcatctcctgcggtgggtatgctgctgctgcagcactactgccaggctgcacagggattgctgctgcagcagcgctgctgccaggctgtgcagggattgctactactgcagcactgttgccaggctgtgcagggggtgctgctgctgcagtgctgctgctgttgcgttgccgcttgggtgtgcgctcggcgtcggtgccctgcaggcaggtcacaagggggcatggcacggatgttgtttgacaatgtatacatcccatatgatgcaggtcactggcgcagttgcaggtgtctgtaaaggagctggcattcgcacactgctagcagcaaacgctgcaggtgacatgacaatcacacatgagccggcgggacgttaaacacgtggcgcagtggtgatgacggacgaacagtggccgaaaggttgcaggttcgattctgagcctaagcagtatgtccctggactcagggatacagttggcaaaagccgaaggaaggatgctgctaatgtcctcgcgactctccgcaggactccgtcgattgctggctatatacacaccggccctgctaggtatgcagtccaccgtatggggtgattccacatgctgcctagtaaggggtgtaagggtctgggtggtctaccttacaccgaaaatagagagaataatcagtctgctttccgcctccccagtgggtgaggcgcggttgccgatgccgaaaggtatggcttacaaggattgattattattatgagccagttctacagctgccgcgactgccccctgcagccaatgttgccttgtcacctacgtcatctaccttgcgcttgtgggcagccttgcgcctgatcttgttggtagccccgcgcatggcatcaccctggacagagcagcagcacaccatgagtacagcaacaggtaagaaagcaccacgtgacctggtggtgtgccagcacagtcagtaaagctgctctgcatatacatcccaagacacaaacacacaggatgcaggtcactggcacggatgcaggtgctccagtacgtgtgctgtttgacaatggtgcagatactactgctttctgacctttcagacctggcatttgcacgctgccagagtttgctgaactcagttgcaaaataccatgaccggcaattgccattcctctctacttctgccgctgctctgtcgcacctgcagctggagctcgcgtgctagaccagtatttagcagctccctggccttatcatcagccccaacgccagccagccacgcctcgctggccaggtctgcagcagcagcgcagctaccgaacatggcatagcggctgctacacagcaccacgctgcaggcttggaagccgggctgttcgcacagcaggttacacagctgctgcgactccactggcaccctttgcagtggtttgtgcgtgcgcttgctgtagaacttcagcgagtcaggcagtggggcattgctgacatccagctgtgcgcgccgctgaaggccggagctatcgcgctcggcggcctcaatgctgcggatggtggtgttgaagaggccctgggtcaagtgagggtctgggccatcctggtacagcgcttgagggcattcgaggacaatgttgctgcctgcaccaagctggttgagtgccgtgcagctgctgcactcccagtcatcgtcagggatgcaggcaatccccaagcatgccatgtgaagtccttggaagcatccctcacatatcagcatggtttcagggctgtcctgactgccgcatgctgtgcagcttgtgttgggttcaataggctcccctacagttccctctcggctttccatagcactgcaatgatagccagcagtagcaaattacaccggttggtggtggagcagctgttgtgcaggctgggttgcagcagtacagcagcagcaggtggtgtggtgagaacactggttgatgggtcgctgctgcagcgaagctgcgccgcttgcaaagcatagctgtcacagagttgctagctcaggcactgcagacacgtctgatgccttgatgacaagctggcatgttgcacagttgagtgaatcttgcattccatgagcgtgtggaacattgcacatgtgtgcgtgccaggaatggcagtgcctggagtctgctgctgctgctgctgctgctgcaacagtctcacgctaccagctagggcaggcaagcattgcaccatgacaccctgtgccatgcgaatgtggacaagcatcatcacttaaggcaatggcggtgcagcaatattggtggacaaccaccccagcgcccggcagccgctggctaaacgagggactgtgtccccatagcccggggaagtggtaatcaatacgttaacaacgtattccacaacaaaccacctggcagtgggaccaaggtcgtcacgggaccttgggggaccacactgtatacaaacagggcgtagaagggcatgaggtggactgtccacaaaatgctgggccctgctgtagaggctagtgcattgcatggctgctggggcaaacgacaaacaaaactgtccgaatggctgaagcagccagccgacgcccgcactcccacaactattgcaactccgaatgtttatccgcatccgaatgaacttgcctcgttgccagagcaatatggtaggaggcggaaggccagaatggtgggttgtttcgctgcagcaccggagactggttgttttaccgtgtgtgtcgtctactgcgaacgtgcactgatggtggaaacagtcgagaggggcggacaggcgaggaaatagtcgagcgcagccaaggatcaagatgccaaggaccaaggatcttggattgtccttggacataatctgtgcacttttcagcaacacccaaacaacttgctggatccctactgaatgtgttcaaaaatagccaaaaccgtagtccgatgctctttagagagctttgcggcgaggcagccaaactagtgcacagcctctcgagagagagacttttctgggtctccaatctctaagggttaggtataggccgggatatgggctgtctgctgggtattgccctgctatatgaaggccctccacgtgctgctggtggtggtcggcatcaggagttaggcagctggttgttgacgatgcacagtgacagtcgtggtgttcatgctgctgatctgtactgcttttgggtactgcttttgggtactgcttcagcttcttgctcgcgggatacagacttgagctgcagaggtggcttgtggggtgctgcttgatcagctgctcgttatgtgcaggtacaacagtgctgcagcaggtgcagtacgctagcctggccccctcccctcagccaaaccagcaggcagcacgaacagcgccatcaatacgctggcgtgtagcaacgcatcagacattgagcatggctcaacagcggaagcctttgaatgtcagcaccacttgtgttcggggagcagcagtgccctcacccacatgacaatgatagtactggcaccagcgcagcacgtggagcgtaggcccattgtttgggattgggttcacgttgttctaaagcaactgctggcctattaacgtcgaccaccacccccatcggtcacatcagaatacttcgccgcaaaacaattgactttatgaatcagagctattatgtttgttgatcatagttgctagaaatcacatccgcagaacagcgccaccagggctagggcgagtgtggcttgcaaccaggcaggagcagcacctgaggcggtgtctggcatgcagtgccggacagtatcagcgttcaagtagcattgatatatgaaccggaccctgagcagcagctgcggtcacagccatgctgtcactactacaagggtcgctgcaggagccaggtactgacattcgcagcattgctgccccctagacattgttaattgatgtaattcaggtttggtaaggctgcagccgcgaatggggttgccagggtaggttaggttgccatgcaccttgacgctgtgctgctgctgttgcgtcggcactttgtgcaggttgggcagagaggctgcccactacagcagcaccaggacacctgctacagctgcatacagctacgtgtcatctgagggcctgctgagcagcagccagctgcaggtgggctgggacaccatacattgctagctgcacctgccatcagctgtgcctggcgcctctcatatcgctcgacagatgcactgctgcgctgaggggtgaatgcaacagaatgcttgcaggaaaccttcctgaaaacttgcttaggatcggtggctgcgtgctttcgttggcctgggtataaggtgatgaggtattcaggcaagcttacacctgcaggaatgcaggcagcacacgcacaggtgactgtgactgtgcacgccgccactattgacagtgctcctttagtttcaacatctgcatctcagcagggcacttctcatgttgtcgtctgctgcaaacttggtgttgttcccgcaggatgtggtgctgtcagggctggcagatccagcagcagaccttctgctagggtccaacggcagcagcagcagcaatatcaatggccattacaacagacggccacgccggcagctgcagcagcagcagcttcacgctgagcaggtgcctgcgtcaagcaacggcacggtgcctgcaagtttgccagaacaacaagtgcagctaaggcatgcaggacaaccacctctgcagcagcagcctctgcacctgcagcagcagcagcaggagcatccgttggagaagttgcagttgcagccgcagcgcatgcagcggcagtggagcagcatgcgcaactggcagtggctggcatcgcagctgcagttcaacagcagcaacggcagcagcaggagcagcacctcgttgcagacacttgtcagcatgctgacgcagctctcacaaccaggtgtgggcccatcgcagcatgataagcaacagcagcagcggttcagggcgtttctggcacagctgctgctggcagtgcagcagcagctgcaggcggcagcagtagcaggtgatgctgcagcggcagcagcacctgatgatgtgacagatctgctgtgggggttggcaaagctgagggtgcaacctcaatggagtgaatcccagccacagcagcagccacagcagcagcagcagcagttgctctccccaggtcgtcttcctgctgctcaggtgctgccgcggcgtgtggcagaagtggctgcagctgcagttcactgcttgacacagcacctgcagcagcagcagcagtggggcagcagcagaggtggtctgtactcccctaggcagctggcactgtgcggttgggcacttgcaaagatagattaccccatgcagcagcagcaggaacaaagcctgcagcaagacctgcagcaatggcagcagcaaggccccctccagcagcagcagcagcatcctttttgggacccttacctgtcagccgtgcagcagcagctgcatgagtgctgccctcaggacttggcgaacattgtctgggcactgtcacagctaggctgccaaccaggagcagcgtggatggatgcttacctggcagcagcacaccaagcattctgcagcagcagcagcagtggtcaggcgttggccgttgtcatgctaagcctagcgcagctgggtgaacagccgcccgctggctggatagatgcagtgttgacgtcattgctgcacccacagcagcagcagcagcagctaggccggcagcggcagcagcaacaccgacaccaacgctggcagcagcacccgcatgacgacagcagccagcacctgctgctgcatcagctgaatggccaggcgctgggttcaatgctgggtgcgctcgcgatctggcgtcaccggccgagtgacgcttggctggaggcagtacaaggtgcactgctgtactgcctggagcgctgcaacgggcaagatgtagcacacattgcctggaagctggcaacactgatgcagctgcccagcagcagcagcagcagcagcagcagtctgcatttgtcaggggatgaacaggagaccggcttagctctgctgcagcggcagtttgagagcaacagcagcagcctgttcagctggccagctgccagcaccgtaccccagcatcagcatcagcatcagcatcagcagcgttgtgtgcagcctgagctgctacaggagctggcccatcgtctggctgagacagcacacagcactgcaccgtgcatggtagcgcaaggcatgtggggcattgcaaagctgtaccagcaagcacaaccagcagcagagccttggcctagcatacacgccggaaagcaggagcagcattggcctagtcagcatgtggcaggtcgcaacagcagcagcagcagcagcagcaggcagcagtcgctgcatcaggagttgcagcagcactggcagccctgcagggctgcactgctgcactgtgcggcagcactgcagcagcggcaggcactgaatggtctagactgcaagcagttatcgctgatagcttggggcttggcactcgcaggtggcaacacgttgccatcccaacagcagcagcagcggcggcagcaggacagtagaaattgcagtctaggtggtagcagcagcacttctaggggcagcagcagagtgattagcagcaggtttactgtgccacatcagtttgctcaacagatcctggatgcttccagagctagcttagcagcagcagaaccgcattcccaagcgctgctgctgtgtgcagctgtgcacctgcagttgcagccgtcctggcagtggctgctggggttttacgaggccacagaaccccagctgaaccgctgcagtgctcaagacctgtccatgatagcggcagctcttgcacagctgcaggtgcggccgttagggtcttggctgggtaggtttctaggagccttccaaaccctagctgaggcacagcacagcagcgtcacacctggctgcttggtatctgtggttcaggcagtggcagcgccgtgcttgggtttagcagcgggtagtcaaaaccctagccagggccagctccagcagcagcagcagcagctggagctgctgtcgccagggtggacagcagctgtgcagcagcaggtgatgcagctgctgccgcagctgtcgctacatcaggttgtggtgctgctgagagcagcaagcaaacttggctgggcgaaagaggggccagccagcagcagcatcgatgggggtgtacctcgcggcacaacggctgtagctggcttgctggcagcagctgctgagcgcgtgcagcagcagcagcagcacacccagagcttacctagccagacagctgaggagcagttgcagcagctgctgcagctgtcagctgctgttgtggcgttgcctgctgctgctgtgcctgcagactggtggctctggctggcacagcagctgaatcagacactgactcagcagcagcagcagcagcaggaacatgtgctggctgactgtactgcctatgagctgtgcagtagcatgcgaacactgacagcagtcatacgcaaggtgcagcagcaccagcagctcttgccccacgaccagcagcagcagcagcacgctgctgcattgttatgctgcagcctggacgctgtcgtcgttgcagctgctcagcaggctcagcagctgccaattaaccagtccctgcagcttgttgcagcagcaacagacagcatgcagaggctggcacaagctagcgcagcacccaacagccacgccagtgtatcaactggagaagcagcaggttgtgcagctgcagtgcagaagttgcgtgggtcggtgcagctgcagctgcagcaacagctgcccagactgagcctacatgagcttgcgtgtgtgttgcagcaagccagtcagctcgggttgctgctggcatgcacagcagcgcctacagggcatgctgctgaagttgcgaagcagtttgcgcagccaggtgattgcttgatgcaggtgactgtgaccgcgttgcagcagctgctgcaggatcttgaggctcagcagcagcagcagcagcaggaggctatctcctggcatcaccagcaacaacagcagcagaaccagttgcacatgcaacctctgcagcagcagcagcagcagctcatgtacagaggcgcgtccttcaatgatagcagcagcaatcaggtgcatgtggtgacgcagctgcgcatgccagcagtaagtgctgctgccgcagggcagtttgctgacatcttggcagcttttgcacgcagcagttacaggccacccagcaagctgctgcggcggctggtagcggccatacagccgagtcttgaacagatggcacctgcacagctgtacagtgtagcagctgcaggggcagcgctgcagctcaggggcatggttggccagcagtttaggggccagtactggctggcactggcagctatgctgcggtcacagcagcagcagcagctcgttaggagacctggtggtgttgttacaagtggggcagcagcagcagcagcagccggcagtacagatgcgtctgccgggatgcgcagcaggcgtgggatgtcaccagcagcagctgcctcggcaacaagcatggccacaaccagcagcatgagcagcacacccggcagcgacagcagtcacagcacgcgggtgttgctgaccctcagggctctcaacacactggcggctggcacacccagcagcagcagcaagtggtccaacgcacctgttgctcttgatgtttacagtggctgtgcattaggtgcaccccctcccaggaggctcattgaactggccttctcagctgctgctggagtgctgccacagctaagcagtagccctgcccagcaggtgctgctgctgcagctgctggtacccctggcagcgcggctgtcagcaaagggcctcaggggcttctacctcagggtgcggcagcagctgcaactgcagctgatgcctgaattggagaggtgcaaggcgcgtgcggcgctgcagcagctggtggagtgctggagggctggcaagcagcgaagggagggggtggtgcagcggcagcggttgttgaagcggcagcgggagcagcggatgcagctgctggctgctagctgcgttgctggcgggccggatacggatccagctgctgaagatgccag

(The sequence listing continues in the following parts.)
